United States Patent Application Publication US 2024/0398993 A1 - sequence listing, part 17

SEQ ID NO: 64625 - protein, 1293 aa, Homo sapiens
MAMGDDKSFDDEESVDGNRPSSAASAFKVPAPKTSGNPANSARKPGSAGGPKVGGASKEGGAGAVDEDDFIKAFTDVPSIQIYSSRELEETLNKIREILSDDKHDWDQRANALKKIRSLLVAGAAQYDCFFQHLRLLDGALKLSAKDLRSQVVREACITVAHLSTVLGNKFDHGAEAIVPTLFNLVPNSAKVMATSGCAAIRFIIRHTHVPRLIPLITSNCTSKSVPVRRRSFEFLDLLLQEWQTHSLERHAAVLVETIKKGIHDADAEARVEARKTYMGLRNHFPGEAETLYNSLEPSYQKSLQTYLKSSGSVASLPQSDRSSSSSQESLNRPFSSKWSTANPSTVAGRVSAGSSKASSLPGSLQRSRSDIDVNAAAGAKAHHAAGQSVRSGRLGAGALNAGSYASLEDTSDKLDGTASEDGRVRAKLSAPLAGMGNAKADSRGRSRTKMVSQSQPGSRSGSPGRVLTTTALSTVSSGVQRVLVNSASAQKRSKIPRSQGCSREASPSRLSVARSSRIPRPSVSQGCSREASRESSRDTSPVRSFQPLASRHHSRSTGALYAPEVYGASGPGYGISQSSRLSSSVSAMRVLNTGSDVEEAVADALKKPARRRYESYGMHSDDDANSDASSACSERSYSSRNGSIPTYMRQTEDVAEVLNRCASSNWSERKEGLLGLQNLLKNQRTLSRVELKRLCEIFTRMFADPHGKVFSMFLETLVDFIQVHKDDLQDWLFVLLTQLLKKMGADLLGSVQAKVQKALDVTRESFPNDLQFNILMRFTVDQTQTPSLKVKVAILKYIETLAKQMDPGDFINSSETRLAVSRVITWTTEPKSSDVRKAAQSVLISLFELNTPEFTMLLGALPKTFQDGATKLLHNHLRNTGNGTQSSMGSPLTRPTPRSPANWSSPLTSPTNTSQNTLSPSAFDYDTENMNSEDIYSSLRGVTEAIQNFSFRSQEDMNEPLKRDSKKDDGDSMCGGPGMSDPRAGGDATDSSQTALDNKASLLHSMPTHSSPRSRDYNPYNYSDSISPFNKSALKEAMFDDDADQFPDDLSLDHSDLVAELLKELSNHNERVEERKIALYELMKLTQEESFSVWDEHFKTILLLLLETLGDKEPTIRALALKVLREILRHQPARFKNYAELTVMKTLEAHKDPHKEVVRSAEEAASVLATSISPEQCIKVLCPIIQTADYPINLAAIKMQTKVIERVSKETLNLLLPEIMPGLIQGYDNSESSVRKACVFCLVAVHAVIGDELKPHLSQLTGSKMKLLNLYIKRAQTGSGGADPTTDVSGQS

SEQ ID NO: 64626 - protein, 507 aa, Homo sapiens
MAVKDTGERLSHAVGCAFAACLERKQKREKECGVTATFDASRTTFTREGSFRVTTATEQAEREEIMKQMQDAKKAETDKIVVGSSVAPGNTAPSPSSPTSPTSDATTSLEMNNPHAIPRRHAPIEQLARQGSFRGFPALSQKMSPFKRQLSLRINELPSTMQRKTDFPIKNAVPEVEGEAESISSLCSQITNAFSTPEDPFSSAPMTKPVTVVAPQSPTFQANGTDSAFHVLAKPAHTALAPVAMPVRETNPWAHAPDAANKEIAATCSGTEWGQSSGAASPGLFQAGHRRTPSEADRWLEEVSKSVRAQQPQASAAPLQPVLQPPPPTAISQPASPFQGNAFLTSQPVPVGVVPALQPAFVPAQSYPVANGMPYPAPNVPVVGITPSQMVANVFGTAGHPQAAHPHQSPSLVRQQTFPHYEASSATTSPFFKPPAQHLNGSAAFNGVDDGRLASADRHTEVPTGTCPVDPFEAQWAALENKSKQRTNPSPTNPFSSDLQKTFEIEL

SEQ ID NO: 64627 - protein, 15 aa, Homo sapiens
MLHLQKETFATYVAR

SEQ ID NO: 64628 - protein, 117 aa, Homo sapiens
MGIRVLRLSLVVILVLLLVAGALTALLPSVKEDKMLMLRREIKSQGKSTMDSFTLIMQTYNRTDLLLKLLNHYQAVPNLHKVIVVWNNIGEKAPDELWNSLGPHPIPVIFKQQTANR

SEQ ID NO: 64629 - protein, 633 aa, Homo sapiens
MLRMRVPALLVLLFCFRGRAGPSPHFLQQPEDLVVLLGEEARLPCALGAYWGLVQWTKSGLALGGQRDLPGWSRYWISGNAANGQHDLHIRPVELEDEASYECQATQAGLRSRPAQLHVLVPPEAPQVLGGPSVSLVAGVPANLTCRSRGDARPTPELLWFRDGVLLDGATFHQTLLKEGTPGSVESTLTLTPFSHDDGATFVCRARSQALPTGRDTAITLSLQYPPEVTLSASPHTVQEGEKVIFLCQATAQPPVTGYRWAKGGSPVLGARGPRLEVVADASFLTEPVSCEVSNAVGSANRSTALDVLFGPILQAKPEPVSVDVGEDASFSCAWRGNPLPRVTWTRRGGAQVLGSGATLRLPSVGPEDAGDYVCRAEAGLSGLRGGAAEARLTVNAPPVVTALHSAPAFLRGPARLQCLVFASPAPDAVVWSWDEGFLEAGSQGRFLVETFPAPESRGGLGPGLISVLHISGTQESDFSRSFNCSARNRLGEGGAQASLGRRDLLPTVRIVAGVAAATTTLLMVITGVALCCWRHSKASASFSEQKNLMRIPGSSDGSSSRGPEEEETGSREDRGPIVHTDHSDLVLEEEGTLETKDPTNGYYKVRGVSPPASPDSRVTSFQWKSPGISNLP

SEQ ID NO: 64630 - protein, 154 aa, Homo sapiens
MMGHRPVLVLSQNTKRESGRKVQSGNINAAKTIADIIRTCLGPKSMMKIQVQHPAAKSMIEISRTQDEEVGDGTTSVIILAGEMLSVAEHFLEQQMHPTVVISAYRKALDDMISTLKKISIPVDISDSDMMLNIINSSITTKAISRWSSLACNI

SEQ ID NO: 64631 - protein, 236 aa, Homo sapiens
MKRQLVTNSFLHHLLIGQKRPRNAPRTLPSVTMKLWVSALLMAWFGVLSCVQAEFFTSIGHMTDLIYAEKELVQSLKEYILVEEAKLSKIKSWANKMEALTSKSAADAEGYLAHPVNAYKLVKRLNTDWPALEDLVLQDSAAGFIANLSVQRQFFPTDEDEIGAAKALMRLQDTYRLDPGTISRGELPGTKYQAMLSVDDCFGMGRSAYNEGDYYHTVLWMEQVLKQLDAGEEATT

SEQ ID NO: 64632 - protein, 86 aa, Homo sapiens
MCVRRSLVGLTFCTCYLASYLTNKVADAHWWTFASCVLETGLGRDQQQFKISCSCVASCFSAVCGYNLCWVQSIVQTGHSCVSHFA

SEQ ID NO: 64633 - protein, 108 aa, Homo sapiens
MKVIESRAQKDEEKMEIQEIQLKEAKHIAEDADRKYEEVARKLVIIESDLERAEERAELSEGQVRQLEEQLRIMDQTLKALMAAEDKYSQKEDRYEEEIKVLSDKLKE

SEQ ID NO: 64634 - protein, 138 aa, Homo sapiens
MLVGQGAGLLGPAVVTAAVVLLLSGVGPAHGSEDIVVGCGGFVKSDVEINYSLIEIKLYTKHGTLKYQTDCAPNNGYFMIPLYDKGDFILKIEPPLGWSFEPTTVELHVDGVSDICTKGGDINFVFTGFSVNGKVCIF

SEQ ID NO: 64635 - protein, 1335 aa, Homo sapiens
MNSLSWGAANAVLLLLLLAWASPTFISINRGVRVMKGHSAFLSGDDLKFAIPKEKDACKVEVVMNEPITQRVGKLTPQVFDCHFLPNEVKYVHNGCPILDEDTVKLRLYRFTERDTFIETFILWVYLLEPDCNIIHMSNNVLEVPEFNGLSQAIDKNLLRFDYDRMASLECTVSLDTARTRLPAHGQMVLGEPRPEEPRGDQPHSFFPESQLRAKLKCPGGSCTPGLKKIGSLKVSCEEFLLMGLRYQHLDPPSPNIDYISIQLDLTDTRSKIVYKSESAWLPVYIRAGIPNQIPKAAFMAVFILEVDQFILTSLTTSVLDCEEDETPKPLLVFNITKAPLQGYVTHLLDHTRPISSFTWKDLSDMQIAYQPPNSSHSERRHDEVELEVYDFFFERSAPMTVHISIRTADTNAPRVSWNTGLSLLEGQSRAITWEQFQVVDNDDIGAVRLVTVGGLQHGWLTLRGGKGFLFTVADLQAGVVRYHHDDSDSTKDFVVFRIFDGHHSIRHKFPINVLPKDDSPPFLITNVVIELEEGQTILIQGSMLRASDVDASDDYIFFNITKPPQAGEIMKKPGPGLIGYPVHGFLQRDLFNGIIYYRHFGGEIFEDSFQFVLWDSHEPPNLSVPQVATIHITPVDDQLPKEAPGVSRHLVVKETEVAYITKKQLHFIDSESYDRELVYTITTPPFFSFSHRHLDAGKLFMVDSIPKVVKNPTALELRSFTQHAVNYMKVAYMPPMQDIGPHCRDVQFTFSVSNQHGGTLHGICFNITILPVDNQVPEAFTNPLKVTEGGQSIISTEHILISDADTKLDNIDLSLRELPLHGRVELNGFPLNSGGTFSWGDLHTLKVRYQHDGTEVLQDDLLLEVTDGTNSAEFVLHVEVFPVNDEPPVLKADLMPVMNCSEGGEVVITSEYIFATDVDSDNLKLMFVIAREPQHGVVRRAGVTVDQFSQRDVISEAVTYKHTGGEIGLMPCFDTITLVVSDGEAGPFVNGCCYNGPNPSVPLHASFPVYDLNITVYPVDNQPPSIAIGPVFVVDEGCSTALTVNHLSATDPDTAADDLEFVLVSPPQFGYLENILPSVGFEKSNIGISIDSFQWKDMNAFHINYVQSRHLRIEPTADQFTVYVTDGKHHSLEIPFSIIINPTNDEAPDFVVQNITVCEGQMKELDSSIISAVDLDIPQDALLFSITQKPRHGLLIDRGFSKDFSENKQPANPHQKHAPVHSFSMELLKTGMRLTYMHDDSESLADDFTIQLSDGKHKILKTISVEVIPVNDEKPMLSKKAEIAMNMGETRIISSAILSAIDEDSPREKIYYVFERLPQNGQLQLKECQLRCGI

SEQ ID NO: 64636 - protein, 1943 aa, Homo sapiens
MTTMLQKSDSNASFLRAARAGNLDKVVEYLKGGIDINTCNQNGLNALHLAAKEGHVGLVQELLGRGSSVDSATKKGNTALHIASLAGQAEVVKVLVKEGANINAQSQNGFTPLYMAAQENHIDVVKYLLENGANQSTATEDGFTPLAVALQQGHNQAVAILLENDTKGKVRLPALHIAARKDDTKSAALLLQNDHNADVQSKMMVNRTTESGFTPLHIAAHYGNVNVATLLLNRGAAVDFTARNGITPLHVASKRGNTNMVKLLLDRGGQIDAKTRDGLTPLHCAARSGHDQVVELLLERGAPLLARTKNGLSPLHMAAQGDHVECVKHLLQHKAPVDDVTLDYLTALHVAAHCGHYRVTKLLLDKRANPNARALNGFTPLHIACKKNRIKVMELLVKYGASIQAITESGLTPIHVAAFMGHLNIVLLLLQNGASPDVTNIRGETALHMAARAGQVEVVRCLLRNGALVDARAREEQTPLHIASRLGKTEIVQLLLQHMAHPDAATTNGYTPLHISAREGQVDVASVLLEAGAAHSLATKKGFTPLHVAAKYGSLDVAKLLLQRRAAADSAGKNGLTPLHVAAHYDNQKVALLLLEKGASPHATAKNGYTPLHIAAKKNQMQIASTLLNYGAETNIVTKQGVTPLHLASQEGHTDMVTLLLDKGANIHMSTKSGLTSLHLAAQEDKVNVADILTKHGADQDAHTKLGYTPLIVACHYGNVKMVNFLLKQGANVNAKTKNGYTPLHQAAQQGHTHIINVLLQHGAKPNATTANGNTALAIAKRLGYISVVDTLKVVTEEVTTTTTTITEKHKLNVPETMTEVLDVSDEEGDDTMTGDGGEYLRPEDLKELGDDSLPSSQFLDGMNYLRYSLEGGRSDSLRSFSSDRSHTLSHASYLRDSAVMDDSVVIPSHQVSTLAKEAERNSYRLSWGTENLDNVALSSSPIHSGFLVSFMVDARGGAMRGCRHNGLRIIIPPRKCTAPTRVTCRLVKRHRLATMPPMVEGEGLASRLIEVGPSGAQFLGKLHLPTAPPPLNEGESLVSRILQLGPPGTKFLGPVIVEIPHFAALRGKERELVVLRSENGDSWKEHFCDYTEDELNEILNGMDEVLDSPEDLEKKRICRIITRDFPQYFAVVSRIKQDSNLIGPEGGVLSSTVVPQVQAVFPEGALTKRIRVGLQAQPMHSELVKKILGNKATFSPIVTLEPRRRKFHKPITMTIPVPKASSDVMLNGFGGDAPTLRLLCSITGGTTPAQWEDITGTTPLTFVNECVSFTTNVSARFWLIDCRQIQESVTFASQVYREIICVPYMAKFVVFAKSHDPIEARLRCFCMTDDKVDKTLEQQENFAEVARSRDVEVLEGKPIYVDCFGNLVPLTKSGQHHIFSFFAFKENRLPLFVKVRDTTQEPCGRLSFMKEPKSTRGLVHQAICNLNITLPIYTKESESDQEQEEEIDMTSEKNPQDEQERIEERLAYIADHLGFSWTELARELDFTEEQIHQIRIENPNSLQDQSHALLKYWLERDGKHATDTNLVECLTKINRMDIVHLMETNTEPLQERISHSYAEIEQTITLDHSEGFSVLQEELCTAQHKQKEEQAVSKESETCDHPPIVSEEDISVGYSTFQDGVPKTEGDSSATALFPQTHKEQVQQDFSGKMQDLPEESSLEYQQEYFVTTPGTETSETQKAMIVPSSPSKTPEEVSTPAEEEKLYLQTPTSSERGGSPIIQEPEEPSEHREESSPRKTSLVIVESADNQPETCERLDEDAAFEKELTEELGELEASSDEEAMVTTRVVRRRVIIQGDDMPEIPPETVTEEEYIDEHGHTVVKKVTRKIIRRYVSSEGTEKEEIMVQGMPQEPVNIEEGDGYSKVIKRVVLKSDTEQSEVTLCEPSILSSTSQFQAEPVEGRRVSKVVKTTVVLGERMEKHLGDSSLATDLPSAKDDFEEDNNE

SEQ ID NO: 64637 - protein, 44 aa, Homo sapiens
MDSTSSLHGSSLHRPSTEQTRTDFSWDGINLECFFLETMNLLHV

SEQ ID NO: 64638 - protein, 260 aa, Homo sapiens
MIINISHVWCCGEMKAIEDGNLEEMEEEVRLKKRKRRRNVDKDPAKEDVEKAKKRRGRPPAEKLSPNPPKLTKQMNAIIDTVINYKDSSGRQLSEVFIQLPSRKELPEYYELIRKPVDFKKIKERIRNHKYRSLGDLEKDVMLLCHNAQTFNLEGSQIYEDSIVLQSVFKSARQKIAKEEESEDESNEEEEEEDEEESESEAKSVKVKIKLNKKDDKGRDKGKGKKRPNRGKAKPVVSDFDSDEEQDEREQSEGSGTDDE

SEQ ID NO: 64639 - protein, 24 aa, Homo sapiens
YSPEYVSMCDSLAKIPKRYGAFFD

SEQ ID NO: 64640 - protein, 67 aa, Homo sapiens
MAALLLRHVGRHCLRAHFSPQLCIRNAVPLGTTAKEEMERFWNKNIGSNRPLSPHITIYSPISDAVW

SEQ ID NO: 64641 - protein, 49 aa, Homo sapiens
MSFSATILFSPPSGSEARCCCCACKSETNGGNTGSQGGNPPPSTPITVT

SEQ ID NO: 64642 - protein, 1327 aa, Homo sapiens
MPSSLLGAAMPASTSAAALQEALENAGRLIDRQLQEDRMYPDLSELLMVSAPNNPTVSGMSDMDYPLQGPGLLSVPNLPEISSIRRVPLPPELVEQFGHMQCNCMMGVFPPISRAWLTIDSDIFMWNYEDGGDLAYFDGLSETILAVGLVKPKAGIFQPHVRHLLVLATPVDIVILGLSYANLQTGSGVLNDSLSGGMQLLPDPLYSLPTDNTYLLTITSTDNGRIFLAGKDGCLYEVAYQAEAGWFSQRCRKINHSKSSLSFLVPSLLQFTFSEDDPILQIAIDNSRNILYTRSEKGVIQVYDLGQDGQGMSRVASVSQNAIVSAAGNIARTIDRSVFKPIVQIAVIENSESLDCQLLAVTHAGVRLYFSTCPFRQPLARPNTLTLVHVRLPPGFSASSTVEKPSKVHRALYSKGILLMAASENEDNDILWCVNHDTFPFQKPMMETQMTAGVDGHSWALSAIDELKVDKIITPLNKDHIPITDSPVVVQQHMLPPKKFVLLSAQGSLMFHKLRPVDQLRHLLVSNVGGDGEEIERFFKLHQEDQACATCLILACSTAACDREVSAWATRAFFRYGGEAQMRFPTTLPPPSNVGPILGSPVYSSSPVPSGSPYPNPSFLGTPSHGIQPPAMSTPVCALGNPATQATNMSCVTGPEIVYSGKHNGICIYFSRIMGNIWDASLVVERIFKSGNREITAIESSVPCQLLESVLQELKGLQEFLDRNSQFAGGPLGNPNTTAKVQQRLIGFMRPENGNPQQMQQELQRKFHEAQLSEKISLQAIQQLVRKSYQALALWKLLCEHQFTIIVAELQKANELLQRSRQVQNKTEKERMLRESLKEYQKISNQVDLSNVCAQYRQVRFYEGVVELSLTAAEKKDPQGLGLHFYKHGEPEEDIVGLQAFQERLNSYKCITDTLQELVNQSKAAPQSPSVPKKPGPPVLSSDPNMLSNEEAGHHFEQMLKLSQRSKDELFSIALYNWLIQVDLADKLLQVASPFLEPHLVRMAKVDQNRVRYMDLLWRYYEKNRSFSNAARVLSRLADMHSTEISLQQRLEYIARAILSAKSSTAISSIAADGEFLHELEEKMEVARIQLQIQETLQRQYSHHSSVQDAVSQLDSELMDITKLYGEFADPFKLAECKLAIIHCAGYSDPILVQTLWQDIIEKELSDSVTLSSSDRMHALSLKIVLLGKIYAGTPRFFPLDFIVQFLEQQVCTLNWDVGFVIQTMNEIGVPLPRLLEVYDQLFKSRDPFWNRMKKPLHLLDCIHVLLIRYVENPSQVLNCERRRFTNLCLDAVCGYLVELQSMSSSVAVQAITGNFKSLQAKLERLH

SEQ ID NO: 64643 - protein, 178 aa, Homo sapiens
MAQLFPRSSFHLKGEGGSKSPWEVKGRRYWSFFHGLARQRTLEDEEEQERERRRRHRNLSSTTDDEAPRLSQNGDRQASASERLPSVEEAEVPKPLPPASKDEDEDIQSILRTRQERRQRRQVVEAAQAPIQERLEAEEGRNSLSPVQATQKPLVSKKELEIPPRRRLSREQRGPWAL

SEQ ID NO: 64644 - protein, 78 aa, Homo sapiens
MSGPTDETAGDLPVKDTGLNLFGMGGLQETSTTRTMKSRQAVSRVSREELEDRFLRLHDENILLKQHARKQEDKIKRL

SEQ ID NO: 64645 - protein, 451 aa, Homo sapiens
MEISGPPFEIGSAPAGVDDTPVNMDSPPIALDGPPIKVSGAPDKRERAERPPVEEEAAEMEGAADAAEGGKVPSPGYGSPAAGAASADTAARAAPAAPADPDSGATPEDPDSGTAPADPDSGAFAADPDSGAAPAAPADPDSGAAPDAPADPDSGAAPDAPADPDAGAAPEAPAAPAAAETRAAHVAPAAPDAGAPTAPAASATRAAQVRRAASAAPASGARRKIHLRPPSPEIQAADPPTPRPTRASAWRGKSESSRGRRVYYDEGVASSDDDSSGDESDDGTSGCLRWFQHRRNRRRRKPQRNLLRNFLVQAFGGCFGRSESPQPKASRSLKVKKVPLAEKRRQMRKEALEKRAQKRAEKKRSKLIDKQLQDEKMGYMCTHRLLLLGRKVVPSDTEGRFRLDRPAPATVSWTGRGFSVSSLLIRSPNPPAFTVEKPDTQVLENLVKAPL

SEQ ID NO: 64646 - protein, 77 aa, Homo sapiens
MEDGVLKEGFLVKRGHIVHNWKARWFILRQNTLVYYKLEGGRRVTPPKGRILLDGCTITCPCLEYENRPSHCGQDAR

SEQ ID NO: 64647 - protein, 90 aa, Homo sapiens
MKDSCITVMAMALLSGFFFFERPNGKLYPQALGRAFRALGGPGVAPSIFPEVNALEGKRRVRVAWGATSGWAWDRPPAGHVQGRGSLGRS

SEQ ID NO: 64648 - protein, 194 aa, Homo sapiens
  MOD_RES (1)..(1): Any amino acid
XLFLILGTCTLFFAFECRYLAVQLSPAIPVFAAMLFLFSMATLLRTSFSDPGVIPRALPDEAAFIEMEIEATNGAVPQGQRPPPRIKNFQINNQIVKLKYCYTCKIFRPPRASHCSICDNCVESLKIGFLETLKETPGTVLEVLICFFTLWSVVGLTGFHTFLVALNQTTNEDIKGSWTGKNRVQNPYSHGNIV

SEQ ID NO: 64649 - protein, 83 aa, Homo sapiens
MARWIPTKRQKYGVAIYNYNASQDVELSLQIGDTVHILEMYEGWYRGYTLQNKSKKAIGSRTPTIPKSMDAQVSDIKWHSICI

SEQ ID NO: 64650 - protein, 507 aa, Homo sapiens
MEKKLLIKSKELQDSQDKCHKMEQEMTRLHRRVSEVEAVLSQKEVELKASETQRSLLEQDLATYITECSSLKRSLEQARMEVSQEDDKALQLLHDIREQSRKLQEIKEQEYQAQVEEMRLMMNQLEEDLVSARRRSDLYESELRESRLAAEEFKRKATECQHKLLKAKDQGKPEVGEYAKLEKINAEQQLKIQELQEKLEKAVKASTEATELLQNIRQAKERAERELEKLQNREDSSEGIRKKLVEAEERRHSLENKVKRLETMERRENRLKDDIQTKSQQIQQMADKILELEEKHREAQVSAQHLEVHLKQKEQHYEEKIKVLDNQIKKDLADKETLENMMQRHEEEAHEKGKILSEQKAMINAMDSKIRSLEQRIVELSEANKLAANSSLFTQRNMKAQEEMISELSVPSKLHTSLPAEDDSVHTQSSAVLPHETVTFQMSLSLGLDLRPGSLRKQPQLNSSSSARVGKSLGAVRLPLGLRTLLLEYEIPGNWYRTNLEALQLAS

SEQ ID NO: 64651 - protein, 41 aa, Homo sapiens
NKVNMVTASYITPALKELEKSFPFSSFHLLQCGRCWHHNHW

SEQ ID NO: 64652 - protein, 809 aa, Homo sapiens
MAVLLLLLRALRRGPGPGPRPLWGPGPAWSPGFPARPGRGRPYMASRPPGDLAEAGGRALQSLQLRLLTPTFEGINGLLLKQHLVQNPVRLWQLLGGTFYFNTSRLKQKNKEKDKSKGKAPEEDEEERRRRERDDQMYRERLRTLLVIAVVMSLLNALSTSGGSISWNDFVHEMLAKGEVQRVQVVPESDVVEVYLHPGAVVFGRPRLALMYRMQVANIDKFEEKLRAAEDELNIEAKDRIPVSYKRTGFFGNALYSVGMTAVGLAILWYVFRLAGMTGREGGFSAFNQLKMARFTIVDGKMGKGVSFKDVAGMHEAKLEVREFVDYLKSPERFLQLGAKVPKGALLLGPPGCGKTLLAKAVATEAQVPFLAMAGPEFVEVIGGLGAARVRSLFKEARARAPCIVYIDEIDAVGKKRSTTMSGFSNTEEEQTLNQLLVEMDGMGTTDHVIVLASTNRADILDGALMRPGRLDRHVFIDLPTLQERREIFEQHLKSLKLTQSSTFYSQRLAELTPGFSGADIANICNEAALHAAREGHTSVHTLNFEYAVERVLAGTAKKSKILSKEEQKVVAFHESGHALVGWMLEHTEAVMKVSITPRTNAALGFAQMLPRDQHLFTKEQLFERMCMALGGRASEALSFNEVTSGAQDDLRKVTRIAYSMVKQFGMAPGIGPISFPEAQEGLMGIGRRPFSQGLQQMMDHEARLLVAKAYRHTEKVLQDNLDKLQARALCVTWGSCLGPLDCRPQPAAAASGQVWAVPSPAEAGLPVDPCSSRLTKQLCRARAHHSGSHNGSKAAAGKRPSGKGSDKL

SEQ ID NO: 64653 - protein, 112 aa, Homo sapiens
MAREDSVKCLRCLLYALNLLFWLMSISVLAVSAWMRDYLNNVLTLTAETRVEEAVILTYFPVVHPVMIAVCCFLIIVGMLGYCGTVKRNLLLLAWYFGSLLVIFCVELACGV

SEQ ID NO: 64654 - protein, 184 aa, Homo sapiens
MGRTVVVLGGGISGLAASYHLSRAPCPPKVVLVESSERLGGWIRSVRGPNGAIFELGPRGIRPAGALGARTLLLVSELGLDSEVLPVRGDHPAAQNRFLYVGGALHALPTGLRGLLRPSPPFSKPLFWAGLRELTKPRGKEPDETVHSFAQRRLGPEGGPHSQTQHSFARPWLSAGASGHFVEV

SEQ ID NO: 64655 - protein, 53 aa, Homo sapiens
MAATAAVSPSDYLQPAASTTQDSQPSPLALLAATCSKIGPPAVEAAVTPPAPP

SEQ ID NO: 64656 - protein, 80 aa, Homo sapiens
FVAFLRSARPFLPCAPSPRPPHCPPAVSLALPFGKPELFVQCLATYSYRHGSGKEKKVLTYSDLANTAQQSETFQFLAGT

SEQ ID NO: 64657 - protein, 229 aa, Homo sapiens
KQAWRGSATRLGPQNSGRQECYAFNGTQRFLERYIYNREEFVRFDSDVGEFRAVTELGRPDEEYWNSQKDILEEERAVPDRMCRHNYELGGPMTLQRRVQPRVNVSPSKKGPLQHHNLLVCHVTDFYPGSIQVRWFLNGQEETAGVVSTNLIRNGDWTFQILVMLEMTPQQGDVYTCQVEHTSLDSPVTVEWKAQSDSARSKTLTGAGGFVLGLIICGVGIFMHRRSKK

SEQ ID NO: 64658 - protein, 104 aa, Homo sapiens
MSPPPLLQPLLLLLPLLNVEPSGATLIRIPLHRVQPGRRILNLLRGWREPAELPKLGAPSPGDKPIFVPLSNYRDGYTTDLIPKPLAPSRPMGPSLPFNMELGG

SEQ ID NO: 64659 - protein, 81 aa, Homo sapiens
PHVRLGQRRPHHSGRISKCKVVEELLSGNPHIEKESARSIADGAMMEAASVCMGQMIWQGIDIETKMHVRFLNMETMALCH

SEQ ID NO: 64660 - protein, 138 aa, Homo sapiens
MAGELADKKDRDASPSKEERKRSRTPDRERDRDRDRKSSPSKDRKRHRSRDRRRGGSRSRSRSRSKSAERERRHKERERDKERDRNKKDRDRDKDGHRRDKDRKRSSLSPGRGKDFKSRKDRDSKKDEEDEHGDKKPK

SEQ ID NO: 64661 - protein, 110 aa, Homo sapiens
MALWRAYQRALAAHPWKVQVLTADFWGGRQHCWPHASSYTCRPRPPGLKDTLPAPHSKKPLLAPLPSAHETQKPQKNIAVCHPHEVTRSRMMEFGGVKTERKCISLGNVL

SEQ ID NO: 64662 - protein, 697 aa, Homo sapiens
MQEGLHRMTWDCIAIGSHENSVQGTVAFEDVAVNFSQEEWSLLSEVQRCLYHDVMLENWVLISSLGCWCGSEDEEAPSKKSISIQRVSQVSTPGAGVSPKKAHSCEMCGAILGDILHLADHQGTHHKQKLHRCEAWGNKLYDSSNRPHQNQYLGEKPYRSSVEEALFVKRCKFHVSEESSIFIQSGKDFLPSSGLLLQEATHTGEKSNSKPECESPFQWGDTHYSCGECMKHSSTKHVFVQQQRLPSREECYCWECGKSFSKYDSVSNHQRVHTGKRPYECGECGKSFSHKGSLVQHQRVHTGKRPYECGECGKSFSHKGSLVQHQRVHTGERPYECGECGKSFSQNGTLIKHQRVHTGERPYECEECGKCFTQKGNLIQHQRGHTSERPYECEECGKCFSQKGTLTEHHRVHTRERPYECGECGKSFSRKGHLRNHQRGHTGERPYECGECGKSFSRKGNLIQHQRSHTGERPYECRECRKLFRGKSHLIEHQRVHTGERPYECNECGKSFQDSSGFRVHQRVHTGEKPFECSECGKSFPQSCSLLRHRRVHTGERPYECGECGKSFHQSSSLLRHQKTHTAERPYECRECGKFFSSLLEHRRVHTGERPYECRECGKTFTRRSAHFKHQRLHTRGKPYECSECGKSFAETFSLTEHRRVHTGERPYECSECGKSFHRSSSLLRHQRVHTERSPYK

SEQ ID NO: 64663 - protein, 252 aa, Homo sapiens
MSLICSISNEVPEHPCVSPVSNHVYERRLIEKYIAENGTDPINNQPLSEEQLIDIKVAHPIRPKPPSATSIPAILKALQDEWDAVMLHSFTLRQQLQTTRQELSHALYQHDAACRVIARLTKEVTAAREALATLKPQAGLIVPQAVPSSQPSVVGAGEPMDLGELVGMTPEIIQKLQDKATVLTTERKKRGKTVPEELVKPEELSKYRQVASHVGLHSASIPGILALDLCPSDTNKILTGTMDSQIKIWDLK

SEQ ID NO: 64664 - protein, 278 aa, Homo sapiens
ETCQQLARETLEELDWCLEQLETMQTYRSVSEMASHKFKRMLNRELTHLSEMSRSGNQVSEYISTTFLDKQNEVEIPSPTMKEREKQQAPRPRPSQPPPPPVPHLQPMSQITGLKKLMHSNSLNNSNIPRFGVKTDQEELLAQELENLNKWGLNIFCVSDYAGGRSLTCIMYMIFQAVFTDLEILAALFAAAIHDVDHPGVSNQFLINTNSELALMYNDESVLENHHLAVGFKLLQEDNCDIFQNLSKRQRQSLRKMVIDMVLATDMSKHMTLLADLK

SEQ ID NO: 64665 - protein, 132 aa, Homo sapiens
NGVGGAVESCGALQVKMKPKITRPPINVKIIEGLKAVLPCTTMGNPKPSVSWIKGDSPLRENSRIAVLESGSLRIHNVQKEDAGQYRCVAKNSLGTAYSKVVKLEVEGAKGIHTQFVASALQLRSFLSCPQI

SEQ ID NO: 64666 - protein, 293 aa, Homo sapiens
MATRRLGVGETLGALNAALGPGGPVWIKETRTRHLRSRDFLAPHRALQARFDDGQRSAVFERVLSAVAAYATPASPASLGQRVLLHCPALRSSPCALRLSQLRTVLVADHLARALRAHGVCVRLVPAVRDPHMLTFLQQLRVDWPAASERASSHTLRSHALEELTSANDGRTLSPGILGRLCLKELVEEQGRTAGYDPNLDNCLVTEDLLSVLAELQEALWHWPEDSHPGLAGASDTGTGGCLVVHVVSCEEEFQQQKLDLLWQKLVDKAPLRQKHLICGPVKVAGAPGTLMT

SEQ ID NO: 64667 - protein, 936 aa, Homo sapiens
LCIVQGPLTFRDVAIEFSQEEWKSLDPVQKALYWDVMLENYRNLVFLGILPKCMTKELPPIGNSNTGEKCQTVTLERHECYDVENFYLREIQKNLQDLEFQWKDGEINYKEVPMTYKNNLNGKRGQHSQEDVENKCIENQLTLSFQSRLTELQKFQTEGKIYECNQSEKTVNNSSLVSPLQRILPSVQTNISKKYENEFLQLSLPTQLEKTHIREKPYMCKGCGKAFRVSSSLINHQMVHTTEKPYKCNECGKAFHRGSLLTIHQIVHTRGKPYQCGVCGKIFRQNSDLVNHRRSHTGEKPYKCNECGKSFSQSYNLAIHQRIHTGEKPYKCNECGKTFKQGSCLTTHQIIHTGEKPYQCDICGKVFRQNSNLVNHQRIHTGEKPYKCNICGKSFSQSSNLATHQTVHSGNKPYKCDECGKTFKRSSSLTTHQIIHTGEKPYTCDVCDKVFSQRSQLARHQRSHTGEKPYKCNECGKVFSQTSHLVGHRRIHTGEKPYKCDKCGKAFKQGSLLTRHKIIHTREKRYQCGECGKVFSENSCLVRHLRIHTGEQPYKCNVCGKVFNYSGNLSIHKRIHTGEKPFQCNECGTVFRNYSCLARHLRIHTGQKPYKCNVCGKVFNDSGNLSNHKRIHTGEKPFQCNECGKVFSYYSCLARHRKIHTGEKPYKCNDCGKAYTQRSSLTKHLIIHTGEKPYNCNEFGGAFIQSSKLARYHRNPTGEKPHKCSHCGRTFSHITGLTYHQRRHTGEMPYKCIECGQVFNSTSNLARHRRIHTGEKPYKCNECGKVFRHQSTLARHRSIHTGEKPYVCNECGKAFRVRSILVNHQKMHTGDKPYKCNECGKAFIERSKLVYHQRNHTGEKPYKCIECGKAFGRFSCLNKHQMIHSGEKPYKCNECGKSFISRSGLTKHQTKHTAESLKTKFNVEKPLDVLLTSGFK

SEQ ID NO: 64668 - protein, 523 aa, Homo sapiens
MLSGVTLEGGGARSGEGRRSRTELKPRSLQSQIGILCPVCDAQVDLPMGGVKALTIDHLAVNDVMLESLRGEGQGLVCDLCNDREVEKRCQTCKANLCHFCCQAHRRQKKTTYHTMVDLKDLKGYSRIGKPILCPVHPAEELRLFCEFCDRPVCQDCVVGEHREHPCDFTSNVIHKHGDSVWELLKGTQPHVEALEEALAQIHIINSALQKRVEAVAADVRTFSEGYIKAIEEHRDKLLKQLEDIRAQKENSLQLQKAQLEQLLADMRTGVEFTEHLLTSGSDLEILITKRVVVERLRKLNKVQYSTRPGVNDKIRFCPQEKAGQCRGYEIYGTINTKEVDPAKCVLQGEDLHRAREKQTASFTLLCKDAAGEIMGRGGDNVQVAVVPKDKKDSPVRTMVQDNKDGTYYISYTPKEPGVYTVWVCIKEQHVQGSPFTVMVRRKHRPHSGVFHCCTFCSSGGQKTARCACGGTMPGGYLGCGHGHKGHPGHPHWSCCGKFNEKSECTWTGGQSAPRSLLRTVAL

SEQ ID NO: 64669 - protein, 49 aa, Homo sapiens
MYHQPSAPAGIGGPYMFQWNDDRCNMKNNFICKYSDEKPAVPSREAEGE

SEQ ID NO: 64670 - protein, 48 aa, Homo sapiens
  MOD_RES (1)..(1): Any amino acid
XSGLCAPSPPRDMEYMNAVENWWKQVMMYGNRTKKMLPSSIGLPSITE

SEQ ID NO: 64671 - protein, 35 aa, Homo sapiens
  MOD_RES (1)..(1): Any amino acid
XLMPSGPLPRTSVVPRPTTAPQETRNKEGNRLFPL

SEQ ID NO: 64672 - protein, 152 aa, Homo sapiens
MNSFSTSAFGPVAFSLGLLLVLPAAFPAPVPPGEDSKDVAAPHRQPLTSSERIDKQIRYILDGISALRKETCNKSNMCESSKEALAENNLNLPKMAEKDGCFQSGFNEETCLVKIITGLLEFEVYLEYLQNRFESSEEQARAVQMSTKVLIQ

SEQ ID NO: 64673 - protein, 114 aa, Homo sapiens
MPSAEAKLKKNRCANCFDCPGCMHTLSTRATSISTQLPDDPAKTTMKKAYYLACGFCRWTSRDVGMADKSVASGGWQEPENPHTQRMNKLIEYYQQLAQKEKVERDRKKLARRR

SEQ ID NO: 64674 - protein, 107 aa, Homo sapiens
MEASGTTWSPENWSSRELWTILLGRSALRELSQIEAELNKHWRRLLEGLSYYKPPSPSSAEKVKANKDVASPLKELGLRISKFLGLDEEQSVQLLQCYLQEDYRGTR

SEQ ID NO: 64675 - protein, 164 aa, Homo sapiens
MRLWNKISRWMLGCYDALQKKYVYTNPEDPQTISECYQFKFKYTNNGPLMDFISKNQSNESSMLSTDTKKASILLIRKIYILMQNLGPLPNDVCLTMKLFYYDEVTPPDYQPPGFKDGDCEGVIFEGEPMYLNVGEVSTPFHIFKVKVTTERERMENIDSTILS

SEQ ID NO: 64676 - protein, 297 aa, Homo sapiens
MLFNKSLFSTNKKKIKEFHQYFQVYDEDFEYGSQLPECLLRNWSKSKKWFLELFEKNIPDIKACKSAKDNSMTLLQATLDIVETETSKENSPNYGLLLLWASLSNAVPVAFWTLAYVLSHPDIHKAIMEGISSVFGKAGKDKIKVSEDDLENLLLIKWCVLETIRLKAPGVITRKVVKPVEILNYIIPSGDLLMLSPFWLHRNPKYFPEPELFKPERWKKANLEKHSFLDCFMAFGSGKFQCPARWFALLEVQMCIILILYKYDCSLLDPLPKQSYLHLVGVPQPEGQCRIEYKQRI

SEQ ID NO: 64677 - protein, 61 aa, Homo sapiens
MRDISPKNGLKTFFSRENYKDHSMAPSLKELRVLSNRESRGVMWTCWLNTQRFLQIPKLLE

SEQ ID NO: 64678 - protein, 308 aa, Homo sapiens
VVAENGLSEEKPHLLVFPPDLVAEQFTLMDAECRILKNFSSLYAILSALQSNSIHRLKKTWEDVSRDSFRIFQKLSEIFSDENNYSLSRELLIKEGTSKFATLEMNPKRAQKRPKETGIIQGTVPYLGTFLTDLVMLDTAMKDYLYGRLINFEKRRKEFEVIAQIKLLQSACNNYSIAPDEQFGAWFRAVERLSETESYNLSCELEPPSESASNTLRTKKNTAIVKRWSDRQAPSTELSTSGSSHSKSCDQLRCGPYLSSGDIADALSVHSAGSSSSDVEEINISFVPESPDGQEKKFWESASQSSPE

SEQ ID NO: 64679 - protein, 213 aa, Homo sapiens
MNESELFGRTIRVNLAKPMRIKEGSSRPVWSDDDWLKKFSGKTLEENKEEEGSEPPKAETQEGEPIAKKARSNPQVYMDIKIGNKPAGRIQMLLRSDVVPMTAENFRCLCTHEKGFGFKGSSFHRIIPQFMCQGGDFTNHNGTGGKSIYGKKFDDENFILKHTGPGLLSMANSGPNTNGSQFFLTCDKTDWLDGKHVVFGEVTEGLDVLRQIE

SEQ ID NO: 64680 - protein, 85 aa, Homo sapiens
  MOD_RES (1)..(1): Any amino acid
XTPELTTPCGSAEYMAPEVVEVFTDQATFYDKRCDLWSLGVVLYIMLSGYPPFVGHCGADCGWDRGEVCRVCQEQQHNGPDALRS

SEQ ID NO: 64681 - protein, 286 aa, Homo sapiens
MHHCKRYRSPEPDPYLSYRWKRRRSYSREHEGRLRYPSRREPPPRRSRSRSKDPADQRPHPPFGSHDRLPYQRRYRERRDSDTYRCEERSPSFGEDYYGPSRSRHRRRSRERGPYRTRKHAHHCHKRRTRSCSSASSRSQQSSKRSSRSVEDDKEGHLVCRIGDWLQERYEIVGNLGEGTFGKVVECLDHARGKSQVALKIIRNVGKYREAARLEINVLKKIKEKDKENKFLCVLMSDWFNFHGHMCIAFELLGKNTFEFLKENNFQPYPLPHVRHMAYQLCHALR

SEQ ID NO: 64682 - protein, 824 aa, Homo sapiens
MFPALETHLKQTIPDPYEDFMYRHLQYYGYFKAQRGSLPNSATHQHVRKNNPQCLLNGSLGEKDDLIPDTLQKEKLLWPISLSSAVHRQIEAINRDSHMLSLPHLRSRQLLYDELDEVNPRLREPQELFSILSTKRPLQAPRWPIECEVIKENIHHIEWAPPQPEYFYQPKGNEKVPEIVGEKKGTVVYQLDSVPIEGSYFTSSRVGGKRGIVKELAVTLQGPEDNTLLFESRFESGNLQKAVRVDTYEYELTLRTDLYTNKHTQWFYFRVQNTRKDATYRFTIVNLLKPKSLYTVGMKPLLYSQLDANTRNIGWRREGNEIKYYKNNTDDGQQPFYCLTWTIQFPYDQDTCFFAHFYPYTYTDLQCYLLSVANNPIQSQFCKLQTLCRSLAGNTVYLLTITNPSQTPQEAAAKKAVVLSARVHPGESNGSWVMKGFLDFILSNSPDAQLLRDIFVFKVLPMLNPDGVIVGNYRCSLAGRDLNRHYKTILKESFPCIWYTRNMIKRLLEEREVLLYCDFHGHSRKNNIFLYGCNNNNRKYWLHERVFPLMLCKNAPDKFSFHSCNFKVQKCKEGTGRVVMWRMGILNSYTMESTFGGSTLGNKRDTHFTIEDLKSLGYHVCDTLLDFCDPDQMKFTQCLAELKELLRQEIHKKFHELGQDVDLEGSWSDISLSDIESSTSGSDSSLSDGLPVHLANIADELTQKKKMFKKKKKKSLQTRKQRNEQYQKKNLMQKLKLTEDTSEKAGFASTLQKQPTFFKNSENSSFLPMKNENPRLNEVVFLFLTLCHTDSLTSRISTSLPQCDKCNSHLRYPNLTVPLGARKH

SEQ ID NO: 64683 - protein, 146 aa, Homo sapiens
MEASVILPILKKKLAFLSGGKDRRSGLILTIPLCLEQTNMDELSVTLDYLLSIPSEKCKARGFTVIVDGRKSQWNVVKTVVVMLQNVVPAEVSLVCVVKPDEFWDKKVTHFCFWKEKDRLGFEVILVSANKLTRYIEPCQLTEDFG

SEQ ID NO: 64684 - protein, 83 aa, Homo sapiens
  MOD_RES (1)..(1): Any amino acid
XYTLDGGDIINALCFSPNRYWLCAATGPSIKIWDLEGKIIVDELKQEVISTSSKAEPPQCTSLAWSADGQVSGSVLSGDSASS

SEQ ID NO: 64685 - protein, 83 aa, Homo sapiens
  MOD_RES (1)..(1): Any amino acid
XPEELTFASAQAEAREEERRVRETVRRDKTLLKEKRKRREELFIEQKKRKLLPDTILEKLTTASQTNIKKSPGKVKEGMTILI

SEQ ID NO: 64686 - protein, 211 aa, Homo sapiens
  MOD_RES (1)..(1): Any amino acid
XEELRHHFRIEFAVAEGAKNVMKLLGSGKVTDRKALSEAQARFNESSQKLDLLKYSLEQRLNEVPKNHPKSRIIIEELSLVAASPTLSPRQSMISTQNQYSTLSKPAALTDDVCAVLKLDNTVVGQTSWKPISNQSWDQKFTLELDRSRELEISVYWRDWRSLCAVKFLRLEDFLDNQRHGMCLYLEPQGTLFAEVTFFNPVIERRPKLQR

SEQ ID NO: 64687 - protein, 180 aa, Homo sapiens
MAVISLLFLAVMYVVHHPLMVSDRMDLDTLARSRQLEKRMSEEMRLLEMEFEERKRAAEQRQKAENFWTGDTSSDQLVLGKKDMGWPFQADGQEGPLGWMLGNLWNTGLFCLFLVFELLRQNMQHEPAFDSSSEEEEEEVRVVPVTSYNWLTDFPSQEALDSFYKHYVQNAIRDLPCTCE

SEQ ID NO: 64688 - protein, 675 aa, Homo sapiens
MLLPVFTLKLRHKISPRMVAIGRYDGTHPCLAAATQTGKVFIHNPHTRNQHVSASRVFQSPLESDVSLLSINQAVSCLTAGVLNPELGYDALLVGTQTNLLAYDVYNNSDLFYREVADGANAIVLGTLGDISSPLAIIGGNCALQGFNHEGSDLFWTVTGDNVNSLALCDFDGDGKKELLVGSEDFDIRVFKEDEIVAEMTETEIVTSLCPMYGSRFGYALSNGTVGVYDKTSRYWRIKSKNHAMSIHAFDLNSDGVNELITGWSNGKVDARSDRTGEVIFKDNFSSAIAGVVEGDYRMDGHIQLICCSVDGEIRGYLPGTAEMRGNLMDTSAEQDLIRELSQKKQNLLLELRNYEENAKAELASPLNEADGHRGIIPANTRLHTTLSVSLGNETQTAHTELRISTSNDTIIRAVLIFAEGIFTGESHVVHPSIHNLSSSICIPIVPPKDVPVDLHLKAFVGYRSSTQFHVFESTRQLPRFSMYALTSLDPASEPISYVNFTIAERAQRVVVWLGQNFLLPEDTHIQNAPFQVCFTSLRNGGHLHIKIKLSGEVDEYHSVHQKLSADMADHSNLIRSLLVGAEDARLMRDMKTMKSRYMELYDLNRDLLNGYKIRCNNHTELLGNLKAVNQAIQRAGRLRVGKPKNQVITACRDAIRSNNINTLFKIMRVGTASS

SEQ ID NO: 64689 - protein, 76 aa, Homo sapiens
MDSVAFEDVAVNFTQEEWALLDPSQKNLYREVMQETLRNLTSIGKKWNNQYIEDEHQNPRRNLRCFRIQWPLRMWL

SEQ ID NO: 64690 - protein, 256 aa, Homo sapiens
MSGPVPSRARVYTDVNTHRPREYWDYESHVVEWGNQDDYQLVRKLGRGKYSEVFEAINITNNEKVVVKILKPVKKKKIKREIKILENLRGGPNIITLADIVKDPVSRTPALVFEHVNNTDFKQLYQTLTDYDIRFYMYEILKALDYCHSMGIMHRDVKPHNVMIDHEHRKLRLIDWGLAEFYHPGQEYNVRVASRYFKGPELLVDYQMYDYSLDMWSLGCMLASMIFRKEPFFHGHDNYDQVIYVIPIEKCTGLMQ

SEQ ID NO: 64691 - protein, 254 aa, Homo sapiens
MANSMNGRNPGGRGGNPRKGRILGIIDAIQDAVGPPKQAAADRRTVEKTWKLMDKVVRLCQNPKLQLKNSPPYILDILPDTYQHLRLILSKYDDNQKLAQLSENEYFKIYIDSLMKKSKRAIRLFKEGKERMYEEQSQDRRNLTKLSLIFSHMLAEIKAIFPNGQFQGDNFRITKADAAEFWRKFFGDKTIVPWKVFRQCLHEVHQISSGLEAMALKSTIDLTCNDYISVFEFDIFTRLFQVSDNFTEYLIYLT

SEQ ID NO: 64692 - protein, 62 aa, Homo sapiens
MSSEVSARRDAKKLVRSPSGLRMVPEHRAFGSPFGLEEPQWVPDKEEPPSSSRLETQRNLKL

SEQ ID NO: 64693 - protein, 472 aa, Homo sapiens
MTSENQEKVKALLRDLQEQDADAGSERGLSGEEEDDEPDCCNDERYWPAGQEPSLVPDLDPLEYAGLASVEPYVPEFTVSPFAVQKLSRYGFNTERCQAVLRMCDGDVGASLEHLLTQCFSETFGERMKISEAVNQISLDECMEQRQEEAFALKSICGEKFIERIQNRVWTIGLELEYLTSRFRKSKPKESTKNVQENSLEICKFYLKGNCKFGSKCRFKHEVPPNQIVGRIERSVDDSHLNAIEDASFLYELEIRFSKDHKYPYQAPLVAFYSTNENLPLACRLHISEFLYDKALTFAETSEPVVYSLITLLEEESEIVKLLTNTHHKYSDPPVNFLPVPSRTRINNPACHKTVIPNNSFVSNQIPEVEKASESEESDEDDGPAPVIVENESYVNLKKKISKRYDWQAKSVHAENGKICKQFRMKQASRQFQSILQERQSLPAWEERETILNLLRKHQVVVISGMTGTYLF

SEQ ID NO: 64694 - protein, 731 aa, Homo sapiens
MITLTELKCLADAQSSYHILKPWWDVFWYYITLIMLLVAVLAGALQLTQSRVLCCLPCKVEFDNHCAVPWDILKASMNTSSNPGTPLPLPLRIQNDLHRQQYSYIDAVCYEKQLHWFAKFFPYLVLLHTLIFAACSNFWLHYPSTSSRLEHFVAILHKCFDSPWTTRALSETVAEQSVRPLKLSKSKILLSSSGCSADIDSGKQSLPYPQPGLESAGIESPTSSVLDKKEGEQAKAIFEKVKRFRMHVEQKDIIYRVYLKQIIVKVILFVLIITYVPYFLTHITLEIDCSVDVQAFTGYKRYQCVYSLAEIFKVLASFYVILVILYGLTSSYSLWWMLRSSLKQYSFEALREKSNYSDIPDVKNDFAFILHLADQYDPLYSKRFSIFLSEVSENKLKQINLNNEWTVEKLKSKLVKNAQDKIELHLFMLNGLPDNVFELTEMEVLSLELIPEVKLPSAVSQLVNLKELRVYHSSLVVDHPALAFLEENLKILRLKFTEMGKIPRWVFHLKNLKELYLSGCVLPEQLSTMQLEGFQDLKNLRTLYLKSSLSRIPQVVTDLLPSLQKLSLDNEGSKLVVLNNLKKMVNLKSLELISCDLERIPHSIFSLNNLHELDLRENNLKTVEEIISFQHLQNLSCLKLWHNNIAYIPAQIGALSNLEQLSLDHNNIENLPLQLFLCTKLHYLDLSYNHLTFIPEEIQYLSNLQYFAVTNNNDSSEPLTYEYALCFSKER

SEQ ID NO: 64695 - protein, 148 aa, Homo sapiens
  MOD_RES (1)..(1): Any amino acid
XRVKLMHFVNSLHNYIMTRILHSTGLEFQHQVEEAKDLDQLIKIHYRYLSTIHDRCLLREKVSFVKEAIMKVLNLALMFADGWQAGLGTWRMESIEKMESDFKNCHMFLVTILNKAVCRGSFPHFSIGLPVVCIRRWSLLSTGGLGGT

SEQ ID NO: 64696 - protein, 84 aa, Homo sapiens
  MOD_RES (1)..(1): Any amino acid
XFPHQELPRALPAAAATAGCAGLEATYSNVGLAALPGVSLAASPVVAEYARVQKRKGTHRSPQEPQQGKTEVTPAAQGSSVGGG

SEQ ID NO: 64697 - protein, 2199 aa, Homo sapiens
MGCTASIVLLQAFRSVVQRSCPHICRRRQEEPSHEILPLESDDEMNRPRTLIIMQEKPRLLEPLDYETVIEELEKTYRNDPLQDLLFFPSDDFSAATVSWDIRTLYSTVPEDAEHKAENLLVKEACKFYSSQWHVVNYKYEQYSGDIRQLPRAEYKPEKLPSHSFEIDHEDADKDEDTTSHSSSKGGGGAGGTGVFKSGWLYKGNFNSTVNNTVTVRSFKKRYFQLTQLPDNSYIMNFYKDEKISKEPKGCIFLDSCTGVVQNNRLRKYAFELKMNDLTYFVLAAETESDMDEWIHTLNRILQISPEGPLQGRRSTELTDLGLDSLDNSVTCECTPEETDSSENNLHADFAKYLTETEDTVKTTRNMERLNLFSLDPDIDTLKLQKKDLLEPESVIKPFEEKAAKRIMIICKALNSNLQGCVTENENDPITNIEPFFVSVALYDLRDSRKISADFHVDLNHAAVRQMLLGASVALENGNIDTITPRQSEEPHIKGLPEEWLKFPKQAVFSVSNPHSEIVLVAKIEKVLMGNIASGAEPYIKNPDSNKYAQKILKSNRQFCSKLGKYRMPFAWAVRSVFKDNQGNVDRDSRFSPLFRQESSKISTEDLVKLVSDYRRADRISKMQTIPGSLDIAVDNVPLEHPNCVTSSFIPVKPFNMMAQTEPTVEVEEFVYDSTKYCRPYRVYKNQIYIYPKHLKYDSQKCFNKARNITVCIEFKNSDEESAKPLKCIYGKPGGPLFTSAAYTAVLHHSQNPDFSDEVKIELPTQLHEKHHILFSFYHVTCDINAKANAKKKEALETSVGYAWLPLMKHDQIASQEYNIPIATSLPPNYLSFQDSASGKHGGSDIKWVDGGKPLFKVSTFVVSTVNTQDPHVNAFFQECQKREKDMSQSPTSNFIRSCKNLLNVEKIHAIMSFLPIILNQLFKVLVQNEEDEITTTVTRVLTDIVAKCHEEQLDHSVQSYIKFVFKTRACKERTVHEELAKNVTGLLKSNDSTTVKHVLKHSWFFFAIILKSMAQHLIDTNKIQLPRPQRFPESYQNELDNLVMVLSDHVIWKYKDALEETRRANHSVARFLKRCFTFMDRGYVFKMVNNYISMFSSGDLKTLCQYKFDFLQEVCQHEHFIPLCLPIRSANIPDPLTPSESTQELHASDMPEYSVTNEFCRKHFLIGILLREVGFALQEDQDVRHLALAVLKNLMAKHSFDDRYREPRKQAQIASLYMPLYGMLLDNMPRIYLKDLYPFTVNTSNQGSRDDLSTNGGFQSQTAIKHANSVDTSFSKDVLNSIAAFSSIAISTVNHADSRASLASLDSNPSTNEKSSEKTDNCEKIPRPLSLIGSTLRFDKLDQAETRSLLMCFLHIMKTISYETLIAYWQRAPSPEVSDFFSILDVCLQNFRYLGKRNIIRKIAAAFKFVQSTQNNGTLKGSNPSCQTSGLLSQWMHSTSSHEGHKQHRSQTLPIIRGKNALSNPKLLQMLDNTMTSNSNEIDIVHHVDTEANIATEVCLTILDLLSLFTQTHQRQLQQCDCQNSLMKRVFDTYMLFFQVNQSATALKHVFASLRLFVCKFPSAFFQGPADLCGSFCYEVLKCCNHRSRSTQTEASALLYFFMRKNFEFNKQKSIVRSHLQLIKAVSQLIADAGIGGSRFQHSLAITNNFANGDKQMKNSNFPAEVKDLTKRIRTVLMATAQMKEHEKDPEMLVDLQYSLANSYASTPELRRTWLESMAKIHARNGDLSEAAMCYIHIAALIAEYLKRKGYWKVEKICTASLLSEDTHPCDSNSLLTTPSGGSMFSMGWPAFLSITPNIKEEGAMKEDSGMQDTPYNENILVEQLYMCVEFLWKSERYELIADVNKPIIAVFEKQRDFKKLSDLYYDIHRSYLKVAEVVNSEKRLFGRYYRVAFYGQGFFEEEEGKEYIYKEPKLTGLSEISQRLLKLYADKFGADNVKIIQDSNKVNPKDLDPKYAYIQVTYVTPFFEEKEIEDRKTDFEMHHNINRFVFETPFTLSGKKHGGVAEQCKRRTILTTSHLFPYVKKRIQVISQSSTELNPIEVAIDEMSKKVSELNQLCTMEEVDMIRLQLKLQGSVSVKVNAGPMAYARAFLEETNAKKYPDNQVKLLKEIFRQFADACGQALDVNERLIKEDQLEYQEELRSHYKDMLSELSTVMNEQITGRDDLSKRGVDQTCTRVISKATPALPTVSISSSAEV

SEQ ID NO: 64698 - protein, 238 aa, Homo sapiens
MIVRVTNRDIICQIAYARIEGDMIVCAAYAHELPKYGVKVGLTNYAAAYCTGLLLARRLLNRFGMDKIYEGQVEVTGDEYNVESIDGQPGAFTCYLDAGLARTTTGNKVFGALKGAVDGGLSIPHSTKRFPGYDSESKEFNAEVHRKHIMGQNVADYMRYLMEEDEDAYKKQFSQYIKNSVTPDMMEEMYKKAHAAIRENPVYEKKPKKEVKKKRWNRPKMSLAQKKDRVAQKKASFL

SEQ ID NO: 64699 - protein, 245 aa, Homo sapiens
MAAGGPGAGSAAPVSSTSSLPLAALNMRVRRRLSLFLNVRTQVAADWTALAEEMDFEYLEIRQLETQADPTGRLLDAWQGRPGASVGRLLELLTKLGRDDVLLELGPSIEEDCQKYILKQQQEEAEKPLQVAAVDSSVPRTAELAGITTLDDPLGHMPERFDAFICYCPSDIQFVQEMIRQLEQTNYRLKLCVSDRDVLPGTCVWSIASAAGWWWLSLMITCRARNVTSRPNLHSASLQVPIRSD

SEQ ID NO: 64700 - protein, 80 aa, Homo sapiens
MEANQCPLVVEPSYPDLVINVGEVTLGEENRKKLQKIQRDQEKERVMRAACALLNSGGGVIRMAKKVEHPVEMGLDLEQS

SEQ ID NO: 64701 - protein, 80 aa, Homo sapiens
MKVLLRLICFIALLISSLEADKCKEREEKIILVSSANEIDVRPCPLNPNEHKGTITWYKDDSKTPVSTEQASRIHQHKEK

SEQ ID NO: 64702 - protein, 54 aa, Homo sapiens
MEQSNDSLRVNHNDGEESKTSAQVFEHLICMDSRDSSFGQNDSPTVLPITTREA

SEQ ID NO: 64703 - protein, 435 aa, Homo sapiens
VFGVILGAVCGGLLRLASPIHPDVVMLIAFPGDILMRMLKMLILPLIISSLITGLSGLDAKASGRLGTRAMVYYMSTTIIAAVLGVILVLAIHPGNPKLKKQLGPGKKNDEVSSLDAFLDLIRNLFPENLVQACFQQIQTVTKKVLVAPPPDEEANATSAVVSLLNETVTEVPEETKMVIKKGLEFKDGMNVLGLIGFFIAFGIAMGKMGDQAKLMVDFFNILNEIVMKLVIMIMCAGTLPVTFRCLEENLGIDKRVTRFVLPVGATINMDGTALYEAVAAIFIAQMNGVVLDGGQIVTVSLTATLASVGAASIPSAGLVTMLLILTAVGLPTEDISLLVAVDWLLDRMRTSVNVVGDSFGAGIVYHLSKSELDTIDSQHRVHEDIEMTKTQSIYDDMKNHRESNSNQCVYAAHNSVIVDECKVHFPFMDIETCI

SEQ ID NO: 64704 - protein, 1296 aa, Homo sapiens
  MOD_RES (1)..(1): Any amino acid
XIPIIIPQTISELQLSVSAGSPHPAIARLTVAAPPSGGPGFLSIERPDSRPPRVGDTLNLNLRAVGSGATFSHYYYMILSRGQIVFMNREPKRTLTSVSVFVDHHLAPSFYFVAFYYHGDHPVANSLRVDVQAGACEGKLELSVDGAKQYRNGESVKLHLETDSLALVALGALDTALYAAGSKSHKPLNMGKVFEAMNSYDLGCGPGGGDSALQVFQAAGLAFSDGDQWTLSRKRLSCPKEKTTRKKRNVNFQKAINEKLGQYASPTAKRCCQDGVTRLPMMRSCEQRAARVQQPDCREPFLSCCQFAESLRKKSRDKGQAGLQRALEILQEEDLIDEDDIPVRSFFPENWLWRVETVDRFQILTLWLPDSLTTWEIHGLSLSKTKGLCVATPVQLRVFREFHLHLRLPMSVRRFEQLELRPVLYNYLDKNLTVSVHVSPVEGLCLAGGGGLAQQVLVPAGSARPVAFSVVPTAATAVSLKVVARGSFEFPVGDAVSKVLQIEKEGAIHREELVYELNPLDHRGRTLEIPGNSDPNMIPDGDFNSYVRVTASDPLDTLGSEGALSPGGVASLLRLPRGCGEQTMIYLAPTLAASRYLDKTEQWSTLPPETKDHAVDLIQKGYMRIQQFRKADGSYAAWLSRGSSTWLTAFVLKVLSLAQEQVGGSPEKLQETSNWLLSQQQADGSFQDLSPVIHRSMQGGLVGNDETVALTAFVTIALHHGLAVFQDEGAEPLKQRVEASISKASSFLGEKASAGLLGAHAAAITAYALTLTKAPADLRGVAHNNLMAMAQETGDNLYWGSVTGSQSNAVSPTPAPRNPSDPMPQAPALWIETTAYALLHLLLHEGKAEMADQAAAWLTRQGSFQGGFRSTQDTVIALDALSAYWIASHTTEERGLNVTLSSTGRNGFKSHALQLNNRQIRGLEEELQFSLGSKINVKVGGNSKGTLKVLRTYNVLDMKNTTCQDLQIEVTVKGHVEYTMEANEDYEDYEYDELPAKDDPDAPLQPVTPLQLFEGRRNRRRREAPKVVEEQESRVHYTVCIWRNGKVGLSGMAIADVTLLSGFHALRADLEKLTSLSDRYVPTSRECVGFEAVQEVPVGLVQPASATLYDYYNPERRCSVFYGAPSKSRLLATLCSAEVCQCAEGKCPRQRRALERGLQDEDGYRMKFACYYPRVEYGFQVKVLREDSRAAFRLFETKITQVLHFTKDVKAAANQMRNFLVRASCRLRLEPGKEYLIMGLDGATYDLEGHPQYLLDSNSWIEEMPSERLCRSTRQRAACAQLNDFLQEYGTQGCQV

SEQ ID NO: 64705 - protein, 136 aa, Homo sapiens
  MOD_RES (1)..(1): Any amino acid
XPLNTSHIWHPRIRELHSPDHPLLPVPAQPHLPAACLPLGQGPHSPPHPDLQNVSCQWGLPTVTAAAVLGMFSATLAGIIESIGDYYACARLAGAPPPPVHAINRGIFTEGICCIIAGLLGTGNGSTSSSPNIGVL

SEQ ID NO: 64706 - protein, 120 aa, Homo sapiens
MKRHEMVANPSVICSHFAQDLWPEQNIKDSFQKVILRRYEKRGHGNLQLIKRCESVDECKVHTGGYNGLNQCSTTTQSKVFQCDKYGKVFHKFSNSNRHNIRHTEKKPFKCIECGKAFNQ

SEQ ID NO: 64707 - protein, 64 aa, Homo sapiens
MGPDMAGDIQATVGCHGVGESWPEELDNLELNIVHDCRVASAVASCLPLLPVPFTKITFVFYQL

SEQ ID NO: 64708 - protein, 252 aa, Homo sapiens
  MOD_RES (1)..(1): Any amino acid
XLEKLEELTMDGAKAKAILDASRSSMGMDISAIDLINIESFSSRVVSLSEYRQSLHTYLRSKMSQVAPSLSALIGEAVGARLIAHAGSLTNLAKYPASTVQILGAEKALFRALKTRGNTPKYGLIFHSTFIGRAAAKNKGRISRYLANKCSIASRIDCFSEVPTSVFGEKLREQVEERLSFYETGEIPRKNLDVMKEAMVQAEEAAAEITRKLEKQEKKRLKKEKKRLAALALASSENSSSTPEECEEGDRC

SEQ ID NO: 64709 - protein, 82 aa, Homo sapiens
MAAATADPGAGNPQPGDSSGGGAGGGLPSPGEQELSRRLQRLYPAVNQQETPLPRSWSPKDKYNYIGLSQGNLRVHYKVTWE

SEQ ID NO: 64710 - protein, 229 aa, Homo sapiens
  MOD_RES (1)..(1): Any amino acid
XNIFHKDPDVTVAPVFLLGESSVEYGKKKRRYLPYNQQHLYFFLIGPPLLTLVNFEVENLAYMLVCMQWADLLWAASFYARFFLSYLPFYGVPGVLLFFVAVRVLESHWFVWITQMNHIPKEIGHEKHRDWVSSQLAATCNVEPSLFTNWFSGHLNFQIEHQCQHTLPTPSLFPRMPRHNYSRVAPLVKSLCAKHGLSYEVKPFLTALVDIVRSLKKSGDIWLDAYLHQ

SEQ ID NO: 64711 - protein, 136 aa, Homo sapiens
MSAAQGWDRNRRRGGGAAGAGGGGSGAGGGSGGSGGRGTGQLNRFVQLSGRPHLPGHRPPPARSGHRCVADNTNLYVFGGYNPDYDESGGPDNEDYPLFRELWRYHFATGVWHQMGTDGYMPRELASMSLVLHGNN

SEQ ID NO: 64712 - protein, 222 aa, Homo sapiens
MSVKCVDARKNHHKTKWFVPWGPNHCDKIRDIEEAIPREIEANDIVFSVHIPLPHMEMSPWFQFMLFILQLDIAFKLNNQIRENAEVSMDVSLAYRDDAFAEWTEMAHERVPRKLKCTFTSPKTPEHEGRYYECDVLPFMEIGSVAHKFYLLNIRLPVNEKKKINVGIGEIKDIRLVGIHQNGGFTKVWFAMKTFLTPSIFIIMVWYWRRITMMSRPPVLLE

SEQ ID NO: 64713 - protein, 111 aa, Homo sapiens
MVHLTPEEKSAVTALWGKVNVDEVGGEALGRLLVVYPWTQRFFESFGDLSTPDAVMGNPKVKAHGKKVLGAFSDGLAHLDNLKGTFATLSELHCDKLHVDPENFRVSLWDA

SEQ ID NO: 64714 - protein, 148 aa, Homo sapiens
MAGYLPPKGYAPSPPPPYPVTPGYPEPALHPGPGQAPVPAQVPAPAPGFALFPSPGPVALGSAAPFLPLPGVPSGLEFLVQIDQILIHQKAERVENGSTGSTRHHHWPRATDLASLPPQVLHPGCRSPDSLASGGALLDLWLWHRHQL

SEQ ID NO: 64715 - protein, 497 aa, Homo sapiens
MDSQKEALQRIISTLANKNDEIQNFIDTLHHTLKGVQENSSNILSELDEEFDSLYSILDEVKESMINCIKQEQARKSQELQSQISQCNNALENSEELLEFATRSLDIKEPEEFSKAARQIKDRVTMASAFRLSLKPKVSDNMTHLMVDFSQERQMLQTLKFLPVPKAPEIDPVECLVADNSVTVAWRMPEEDNKIDHFILEHRKTNFDGLPRVKDERCWEIIDNIKGTEYTLSGLKFDSKYMNFRVRACNKAVAGEYSDPVTLETKALNFNLDNSSSHLNLKVEDTCVEWDPTGGKGQESKIKGKENKGSGTPSPKRTSVGSRPPAVRGSRDRFTGESYTVLGDTAIESGQHYWEVKAQKDCKSYSVGVAYKTLGKFDQLGKTNTSWCIHVNNWLQNTFAAKHNNKVKALDVTVPEKIGVFCDFDGGQLSFYDANSKQLLYSFKTKFTQPVLPGFMVWCGGLSLSTGMQVPSAVRTLQKSENGMTGSASSLNNVVTQ

SEQ ID NO: 64716 - protein, 304 aa, Homo sapiens
MSEYIRVTEDENDEPIEIPSEDDGTVLLSTVTAQFPGACGLRYRNPVSQCMRGVRLVEGILHAPDAGWGNLVYVVNYPKDNKRKMDETDASSAVKVKRAVQKTSDLIVLGLPWKTTEQDLKEYFSTFGEVLMVQVKKDLKTGHSKGFGFVRFTEYETQVKVMSQRHMIDGRWCDCKLPNSKQSQDEPLRSRKVFVGRCTEDMTEDELREFFSQYGDVMDVFIPKPFRAFAFVTFADDQIAQSLCGEDLIIKGISVHISNAEPKHNSNRQLERSGRFGGNPGGFGNQVHLISNVYGRSTSLKVVL

SEQ ID NO: 64717 - protein, 395 aa, Homo sapiens
MPRVKAAQAGRQSSAKRHLAEQFAVGEIITDMAKKEWKVGLPIGQGGFGCIYLADMNSSESVGSDAPCVVKEPSDNGPLFTELKFYQRAAKPEQIQKWIRTRKLKYLGVPKYWGSGLHDKNGKSYRFMIMDRFGSDLQKIYEANAKRFSRKTVLQLSLRILDILEYIHEHEYVHGDIKASNLLLNYKNPDQVYLVDYGLAYRYCPEGVHKEYKEDPKRCHDGTIEFTSIDAHNGVAPSRRGDLEILGYCMIQWLTGHLPWEDNLKDPKYVRDSKIRYRENIASLMDKCFPEKNKPGEIAKYMETVKLLDYTEKPLYENLRDILLQGLKAIGSKDDGKLDLSVVENGGLKAKTITKKRKKEIEESKEPGVEDTEWSNTQTEEAIQTRSRTRKRVQK

SEQ ID NO: 64718 - protein, 80 aa, Homo sapiens
MNGDQNSDVYAQEKQDFVQHFSQIVRVLTEDEMGHPEIGDAIARLKESLALSPGLECDGVISACCNLHLLGSSDSPASAF

SEQ ID NO: 64719 - protein, 72 aa, Homo sapiens
MEQKPSKVECGSDPEENSARSPDGKRKRKNGQCSLKTSMSGYIPSYLDKDEQCVVCGDKATGYHYRCITCEG

SEQ ID NO: 64720 - protein, 183 aa, Homo sapiens
MAAAPALKHWRTTLERVEKFVSPLYFTDCNLRGSFLTPERLPYQEAVQRDFRPAQVGDSFGPTWWTCWFRVELTIPEAWVGQEVHLCWESDGEGLVWRDGEPVQGLTKEGEKTSYVLTDRLGERDPRSLTLYVEVACNGLLGAGKGSMIAAPDPEKMFQLSRAELAVFHRDVHMLLVDLELLL

SEQ ID NO: 64721 - protein, 362 aa, Homo sapiens
MSYKSRPKHSGTHSIVQEFQVPDYVPWQQSKQETKPSTLPPVQQANSLHTSKMKTLTRVQPVFHFKPTTVVTSCQPKNPRELHRRRKLDPGKMHAKIWLMKTSLRSGRAALRELRSRENFLSKLNRELIETIQEMENSTTLHVRALLQQQDTLATIIDILEYSNKKRLQQLKSELQEWEEKKKCKMSYLEQQAEQLNAKIEKTQEEVNFLSTYMDHEYSIKSVQISTLMRQLQQVKDSQQDELDDLGEMRRKVLESLSDKIQKKKKKILSSVVAETQRPYEEALLQKMWESQDFLKCMQRFREIIDQFEENMPVLRAEVEELQAQTREPREVIFEDVLLRRPKCTPDMDVILNIPVEEPLPF

SEQ ID NO: 64722 - protein, 320 aa, Homo sapiens
  MOD_RES (1)..(1): Any amino acid
XATTEVEIKKKGPGSLLVSMDQLASYGRKDRINSIMSVVTNTLVEELEESQRKCPPCWYKFANTFLIWECHPYWIKLKEIVNLIVMDPFVDLAITICIVLNTLFMAMEHHPMTPQFEHVLAVGNLVFTGIFTAEMFLKLIAMDPYYYFQEGWNIFDGFIVSLSLMELSLADVEGLSVLRSFRLLRVFKLAKSWPTLNMLIKIIGNSVGALGNLTLVLAIIVFIFAVVGMQLFGKSYKECVCKINQDCELPRWHMHDFFHSFLIVFRVLCGEWIETMWDCMEVAGQAMCLIVFMMVMVIGNLVYDKVRTKCKSRSEHLSHS

SEQ ID NO: 64723 - protein, 204 aa, Homo sapiens
  MOD_RES (1)..(1): Any amino acid
XGLAFHHEEGASAWHEDVRLYTARDAASGEVVGKFYLDLYPREGKYGHAACFGLQPGCLRQDGSRQIAIAAMVANFTKPTADAPSLLQHDEVETYFHEFGHVMHQLCSQAEFAMFSGTHVERDFVEAPSQMLENWVWEQEPLLRMSRHYRTGSAVPRELLEKLIESRQANTGLFNLRQIGLVFVALTRLLSGKRPLSGDGSSLK

SEQ ID NO: 64724 - protein, 47 aa, Homo sapiens
MVQYLKSVDIPENRVILITPTPLCETAWEEQCIIQGCKLNRLNSVVG

SEQ ID NO: 64725 - protein, 132 aa, Homo sapiens
MTMESGAENQQSGDAAVTEAENQQMTVQAQPQIATLAQVSMPAAHATSSAPTVTLVQLPNGQTVQVHGVIQAAQPSVIQSPQVQTVQSSCKDLKRLFSGTQISTIAESEDSQESVDSVTDSQKRREILSRRP

SEQ ID NO: 64726 - protein, 103 aa, Homo sapiens
MELLTFRDVTIEFSLEEWEFLNPAQQSLYRKVMLENYRNLVSLGLTVSKPELISRLEQRQEPWNVKRHETIAKPPDYSLTILCKKKSNILISFPSIIYVFSLH

SEQ ID NO: 64727 - protein, 44 aa, Homo sapiens
MDPLGPAKPQWSWRCCLTTLLFQLLMAVCFFSYLRVSQDDPTVY

SEQ ID NO: 64728 - protein, 35 aa, Homo sapiens
MVALRGLGSGLQPWCPLDLRLEWVDTVWELDFTET

SEQ ID NO: 64729 - protein, 30 aa, Homo sapiens
MGKQNSKLRPEVLQDLRENTEFTDHELQEW

SEQ ID NO: 64730 - protein, 338 aa, Homo sapiens
MSLHFLYYCSEPTLDVKIAFCQGFDKQVDVSYIAKHYNMSKSKVDNQFYSVEVGDSTFTVLKRYQNLKPIGSGAQGIVCAAYDAVLDRNVAIKKLSRPFQNQTHAKRAYRELVLMKCVNHKNIISLLNVFTPQKTLEEFQDVYLVMELMDANLCQVIQMELDHERMSYLLYQMLCGIKHLHSAGIIHRDLKPSNIVVKSDCTLKILDFGLARTAGTSFMMTPYVVTRYYRAPEVILGMGYKENVDIWSVGCIMGEMVRHKILFPGRDYIDQWNKVIEQLGTPCPEFMKKLQPTVRNYVENRPKYAGLTFPKLFPDSLFPADSEHNKLKAKPGTCCQRC

SEQ ID NO: 64731 - protein, 87 aa, Homo sapiens
MSFICGLQSAARNHVFFRFNSLSNWRKCNTLASTSRGCHQVQVNHIVNKYQGLGVNQCDRWSFLPGNFHFYSTFNNKRTGGLSSTKS

SEQ ID NO: 64732 - protein, 526 aa, Homo sapiens
LGGRSSCEDPGCPRDEERAPRMGCMKSKFLQVGGNTFSKTETSASPHCPVYVPDPTSTIKPGPNSHNSNTPGIREAGSEDIIVVALYDYEAIHHEDLSFQKGDQMVVLEESGEWWKARSLATRKEGYIPSNYVARVDSLETEEWFFKGISRKDAERQLLAPGNMLGSFMIRDSETTKGSYSLSVRDYDPRQGDTVKHYKIRTLDNGGFYISPRSTFSTLQELVDHYKKGNDGLCQKLSVPCMSSKPQKPWEKDAWEIPRESLKLEKKLGAGQFGEVWMATYNKHTKVAVKTMKPGSMSVEAFLAEANVMKTLQHDKLVKLHAVVTKEPIYIITEFMAKGSLLDFLKSDEGSKQPLPKLIDFSAQIAEGMAFIEQRNYIHRDLRAANILVSASLVCKIADFGLARVIEDNEYTAREGAKFPIKWTAPEAINFGSFTIKSDVWSFGILLMEIVTYGRIPYPGMSNPEVIRALERGYRMPRPENCPEELYNIMMRCWKNRPEERPTFEYIQSVLDDFYTATESQYQQQP

SEQ ID NO: 64733 - protein, 617 aa, Homo sapiens
TGDLASAQLGGAPNRWEVLSATPTTIKDEAGNLVQIPSAATSSGQYVLPLQNLQNQQIFSVAPGSDSSNGTVSSVQYQVIPQIQSADGQQVQIGFTGSSDNGGINQESSQIQIIPGSNQTLLASGTPSANIQNLIPQTGQVQVQGVAIGGSSFPGQTQVVANVPLGLPGNITFVPINSVDLDSLGLSGSSQTMTAGINADGHLINTGQAMDSSDNSERTGERVSPDINETNTDTDLFVPTSSSSQLPVTIDSTGILQQNTNSLTTSSGQVHSSDLQGNYIQSPVSEETQAQNIQVSTAQPVVQHLQLQESQQPTSQAQIVQGITPQTIHGVQASGQNISQQALQNLQLQLNPGTFLIQAQTVTPSGQVTWQTFQVQGVQNLQNLQIQNTAAQQITLTPVQTLTLGQVAAGGAFTSTPVSLSTGQLPNLQTVTVNSIDSAGIQLHPGENADSPADIRIKEEEPDPEEWQLSGDSTLNTNDLTHLRVQVVDEEGDQQHQEGKRLRRVACTCPNCKEGGGRGTNLGKKKQHICHIPGCGKVYGKTSHLRAHLRWHSGERPFVCNWMYCGKRFTRSDELQRHRRTHTGEKKFVCPECSKRFMRSDHLAKHIKTHQNKKGPV

SEQ ID NO: 64734 - protein, 41 aa, Homo sapiens
MGRGSGTFERLLDKATSQLLLETDWESILQICDLIRQGDTQ

SEQ ID NO: 64735 - protein, 101 aa, Homo sapiens
MSRFPAVAGRAPRRQEEGERSRDLQEERLSAVCIADREEKGCTSQEGGTTPTFPIQKQRKKIIQAVRDNSFLIVTGNTGSGKTTQLPKYLYEAGDSNQIYD

SEQ ID NO: 64736 - protein, 106 aa, Homo sapiens
MRPRGLPPLLVVLLGCWASVSAQTDATPAVTTEGLNSTEAALATFGTFPSTRPPGTPRAPGPSSGPRPTPVTDGHATCRYRSRRLTVSGELDGKLQVASGSVGGEE

SEQ ID NO: 64737 - protein, 198 aa, Homo sapiens
  MOD_RES (1)..(1): Any amino acid
XFFALSLITQKPLPVSLHVRTSDCAYFILVDRYLSWFLPTEGSVPPPLSSSPGGTSPSPPPRTPAIPFASYGLHHTSLLKRHISHQTSVNADPASHEIWRSETLLQVFVEMWLHHYSLEMYQKMQSPHAKESFTPTEEHVLVVRLLLKHLHAFANSLKPEQASPSAHSHATSPLEEFKRIALATGPWTHRSELSWRCG

SEQ ID NO: 64738 - protein, 49 aa, Homo sapiens
MDEDVLTTLKILIIGESGVGKSSLLLRFTDDTFDPELAATIVGEEMTAL

SEQ ID NO: 64739 - protein, 423 aa, Homo sapiens
MSDHGDVSLPPEDRVRALSQLGSAVEVNEDIPPRRYFRSGVEIIRMASIYSEEGNIEHAFILYNKYITLFIEKLPKHRDYKSAVIPEKKDTVKKLKEIAFPKAEELKAELLKRYTKEYTEYNEEKKEAEELARNMAIQQELEKEKQRVAQQKQQQLEQEQFHAFEEMIRNQELEKERLKIVQEFGKVDPGLGGPLVPDLEKPSLDVFPTLTVSSIQPSDCHTTVRPAKPPVVDRSLKPGALSNSESIPTIDGLRHVVVPGRLCPQFLQLASANTARGVETCGILCGKLMRNEFTITHVLIPKQSAGSDYCNTENEEELFLIQDQQGLITLGWIHTHPTQTAFLSSVDLHTHCSYQMMLPESVAIVCSPKFQETGFFKLTDHGLEEISSCRQKGFHPHSKDPPLFCSCSHVTVVDRAVTITDLR

SEQ ID NO: 64740 - protein, 38 aa, Homo sapiens
MIKDCGATWVVLGHSERRHVFGESDELIGQKVAHALAE

SEQ ID NO: 64741 - protein, 228 aa, Homo sapiens
  MOD_RES (1)..(1): Any amino acid
XARPRAAGVPCSGLACCSSGTPSPRKCDVLNRGFSGYNTRWAKIILPRLIRKGNSLDIPVAVTIFFGANDSALKDENPKQHIPLEEYAANLKSMVQYLKSVDIPENRVILITPTPLCETAWEEQCIIQGCKLNRLNSVVGEYANACLQVAQDCGTDVLDLWTLMQDSQDFSSYLSDGLHLSPKGNEFLFSHLWPLIEKKVSSLPLLLPYWRDVAEAKPELSLLGDGDH

SEQ ID NO: 64742 - protein, 443 aa, Homo sapiens [sequence omitted]

SEQ ID NO: 64743 - protein, 237 aa, Homo sapiens
MFQAFPGDYDSGSRCSSSPSAESQYLSSVDSFGSPPTAAASQECAGLGEMPGSFVPTVTAITTSQDLQWLVQPTLISSMAQSQGQPLASQPPVVDPYDMPGTSYSTPGMSGYSSGGASGSGGPSTSGTTSGPGPARPARARPRRPREETLTPEEEEKRRVRRERNKLAAAKCRNRRRELTDRLQAETDQLEEEKAELESEIAELQKEKERLEFVLVAHKPGCKIPYEEGPGPGPLAE

SEQ ID NO: 64744 - protein, 116 aa, Homo sapiens
LYRNGYHGDLNETFFVGEVDDGARKLVQTTYECLMQAIDAENKAVGVMKSGHVFTIEPMICEGGWQDETWPDGWTAVTRDGKRSAQFEHTLLVTDTGCEILTRRLDSARPHFMSQF

SEQ ID NO: 64745 - protein, 61 aa, Homo sapiens
MPVQLSEHPEWNESMHSLRISVGGLPVLASMTKAADPRFRPRWKVILTFFVGAAILWLLCS

SEQ ID NO: 64746 - protein, 403 aa, Homo sapiens
MKYLFFSWLVVFVGSWIIYVQYSTYTELCRGKDCKKIICDKYKTGVIDGPACNSLCVTETLYFGKCLSTKPNNQMYLGIWDNLPGVVKCQMEQALHLDFGTELEPRKEIVLFDKPTRGTTVQKFKEMVYSLFKAKLGDQGNLSELVNLILTVADGDKDGQVSLGEAKSAWALLQLNEFLLMVILQDKEHTPKLMGFCGDLYVMESVEYTSLYGISLPWVIELFIPSGFRRSMDQLFTPSWPRKAKIAIGLLEFVEDVFHGPYGNFLMCDTSAKNLGYNDKYDLKMVDMRKIVPETNLKELIKDRHCESDLDCVYGTDCRTSCDQSTMKCTSEVIQPNLAKACQLLKDYLLRGAPSEIREELEKQLYSCIALKVTANQMEMEHSLILNNLKTLLWKKISYTNDS

SEQ ID NO: 64747 - protein, 141 aa, Homo sapiens
MRSIPIATACTIYHKFFCETNLDAYDPYLIAMSSIYLAGKVEEQHLRTRDIINVSNRYFNPSGEPLELDSRFWELRDSIVQCELLMLRVLRFQVSFQHPHKYLLHYLVSLQNWLNRHSWQRTPVAVTAWALLRDSYHGALC

SEQ ID NO: 64748 - protein, 237 aa, Homo sapiens
METGVRIQILLKAFLPRFPAPLAPVMAKQYDVLFRLLLIGDSGVGKTCLLCRFTDNEFHSSHISTIGVDFKMKTIEVDGIKVRIQIWDTAGQERYQTITKQYYRRAQGIFLVYDISSERSYQHIMKWVSDVDEYAPEGVQKILIGNKADEEQKRQVGREQGQQLAKEYGMDFYETSACTNLNIKESFTRLTELVLQAHRKELEGLRMRASNELALAELEEEEGKPEGPANSSKTCWC

SEQ ID NO: 64749 - protein, 268 aa, Homo sapiens
MLHTTQLYQHVPETRWPIVYSPRYNITFMGLEKLHPFDAGKWGKVINFLKEEKLLSDSMLVEAREASEEDLLVVHTRRYLNELKFLFERVEGISRATIIDLDAHQGNGHERDFMDDKRVYIMDVYNRHIYPGDRFAKQAIRRKVELEWGTEDDEYLDKVERNIKKSLQEHLPDVVVYNAGTDILEGDRLGGLSISPAGIVKRDELVFRMVRGRRVPILMVTSGGYQKRTARIIADSILNLFGLGLIGPESPSVSAQNSDTPLLPPAVP

SEQ ID NO: 64750 - protein, 84 aa, Homo sapiens
QQILSLKVVPRVGNGTLCPNSTSLCSFPGGEYSEDDVNELVKEDEVDGEEQTQKTQGKKRKAQSIPARKRRQGGLSLEEEEEED

SEQ ID NO: 64751 - protein, 85 aa, Homo sapiens
MVTNLDDSNWAAAFSSQRSGLFTNTEPHSITEDVTISAVMLREDDPGEAASMSMFSDFLQSFLKHSSSTVFDLVEEYENICGSQV

SEQ ID NO: 64752 - protein, 122 aa, Homo sapiens
MAKQPSDVSSECDREGRQLQPAERPPQLRPGAPTSLQTEPQGNPEGNHGGEGDSCPHGSPQGPLAPPASPGPFATRSPLFIFMRRSSLLSRSSSGYFSFDTDRSPAPMSCDKSTQTPSPPCQ

SEQ ID NO: 64753 - protein, 150 aa, Homo sapiens
MGAGPSLLLAALLLLLSGDGAVRCDTPANCTYLDLLGTWVFQVGSSGSQRDVNCSVMGPQEKKVVVYLQKLDTAYDDLGNSGHFTIIYNQGFEIVLNDYKWFAFFKDVTDFISHLFMQLGTVGIYDLPHLRNKLEVRYEKGNWEQVLKAP

SEQ ID NO: 64754 - protein, 322 aa, Homo sapiens
MVAEAGSMPAASSVKKPFGLRSKMGKWCRHCFPWCRGSGKSNVGTSGDHDDSAMKTLRSKMGKWCRHCFPWCRGSGKSNVGTSGDHDDSAMKTLRSKMGKWCCHCFPCCRGSGKSKVGPWGDYDDSAFMEPRYHVRREDLDKLHRAAWWGKVPRKDLIVMLKDTDMNKKDKQKRTALHLASANGNSEVVKLLLDRRCQLNILDNKKRTALTKAVQCQEDECALMLLEHGTDPNIPDEYGNTALHYAIYNEDKLMAKALLLYGADIESKNKIESHSVSQAGVQWCDHSSLQPRPPEAQMVLQPQPQFFFSFFLFIFIFIFIFF

SEQ ID NO: 64755 - protein, 163 aa, Homo sapiens
KFIATIPLVMYLSGFLSSFLMKPINKCIGRNMTYFSGLLVILAFAAWVALAEGLGVAVYAAAVLLGAGCATILVTSLAMTADLIGPHTNSGAFVYGSMSFLDKVANGLAVMAIQSLHPCPSELCCRACVSFYHWAMVAVTGGVGVAAALCLCSLLLWPTRLRR

SEQ ID NO: 64756 - protein, 178 aa, Homo sapiens
MASFLVWPLRTALRGGKSWAGPGVGCGGDGARGGGELSLSNLDLPGAGEAGLEHHPLLGHLFISAVPRWPHLSSQSGVEPPDRWTGTPGWPSRDQEAPGSMMPPAAAQPSAHGALVPPATAHEPVDHPALHWLACCCCLSLPGQLPLAIRLGWDLDLEAGPSSGKLCPRARRWQPLPS

SEQ ID NO: 64757 - protein, 371 aa, Homo sapiens
MAVMAPRTLVLLLSGALALTQTWAGSHSMRYFFTSVSRPGRGEPRFIAVGYVDDTQFVRFDSDAASQRMEPRAPWIEQEGPEYWDGETRKVKAHSQTHRVDLGTLRGYYNQSEAGSHTVQRMYGCDVGSDWRFLRGYHQYAYDGKDYIALKEDLRSWTAADMAAQTTKHKWEAAHVAEQLRAYLEGTCVEWLRRYLENGKETLQRTDAPKTHMTHHAVSDHEATLRCWALSFYPAEITLTWQRDGEDQTQDTELVETRPAGDGTFQKWAAVVVPSGQEQRYTCHVQHEGLPKPLTLRWEPSSQPTIPIVGIIAGLVLFGAVITGAVVAAVMWRRKSSGGEGVKDRKGGSYSQAASSDSAQGSDVSLTACKV

SEQ ID NO: 64758 - protein, 994 aa, Homo sapiens
MAEARKRRELLPLIYHHLLRAGYVRAAREVKEQSGQKCFLAQPVTLLDIYTHWQQTSELGRKRKAEEDAALQAKKTRVSDPISTSESSEEEEEAEAETAKATPRLASTNSSVLGADLPSSMKEKAKAETEKAGKTGNSMPHPATGKTVANLLSGKSPRKSAEPSANTTLVSETEEEGSVPAFGAAAKPGMVSAGQADSSSEDTSSSSDETDVEGKPSVKPAQVKASSVSTKESPARKAAPAPGKVGDVTPQVKGGALPPAKRAKKPEEESESSEEGSESEEEAPAGTRSQVKASEKILQVRAASAPAKGTPGKGATPAPPGKAGAVASQTKAGKPEEDSESSSEESSDSEEETPAAKALLQAKASGKTSQVGAASAPAKESPRKGAAPAPPGKTGPAVAKAQAGKREEDSQSSSEESDSEEEAPAQAKPSGKAPQVRAASAPAKESPRKGAAPAPPRKTGPAAAQVQVGKQEEDSRSSSEESDSDREALAAMNAAQVKPLGKSPQVKPASTMGMGPLGKGAGPVPPGKVGPATPSAQVGKWEEDSESSSEESSDSSDGEVPTAVAPAQEKSLGNILQAKPTSSPAKGPPQKAGPVAVQVKAEKPMDNSESSEESSDSADSEEAPAAMTAAQAKPALKIPQTKACPKKTNTTASAKVAPVRVGTQAPRKAGTATSPAGSSPAVAGGTQRPAEDSSSSEESDSEEEKTGLAVTVGQAKSVGKGLQVKAASVPVKGSLGQGTAPVLPGKTGPTVTQVKAEKQEDSESSEEESDSEEAAASPAQVKTSVKKTQAKANPAAARAPSAKGTISAPGKVVTAAAQAKQRSPSKVKPPVRNPQNSTVLARGPASVPSVGKAVATAAQAQTGPEEDSGSSEEESDSEEEAETLAQVKPSGKTHQIRAALAPAKESPRKGAAPTPPGKTGPSAAQAGKQDDSGSSSEESDSDGEAPAAVTSAQDSNSKPARSKTLAPAPPERNTEGSSESSEEELPLTQDQESS

SEQ ID NO: 64759 - protein, 59 aa, Homo sapiens
MLWFQGNSMQLARSSFGLFLRNCSASKTTLPVLTLFTKDPCPLCDEAKEVLKPYENRVI

SEQ ID NO: 64760 - protein, 204 aa, Homo sapiens
  MOD_RES (1)..(1): Any amino acid
XIKKSRGGLTFIGEWKNGHLEKKMGHLACFAGGMFALGADGSRADKAGHYLELGAEIARTCHESYDRTALKLGPESFKFDGAVEAVAVRQAEKYYILRPEVIETYWYLWRFTHDPRYRQWGWEAALAIEKYCRVNGGFSGVKDVYSSTPTHDDVQQSFFLAETLKYLYLLFSGDDLLPLDHWVFNTEAHPLPVLHLANTTLSES

SEQ ID NO: 64761 - protein, 280 aa, Homo sapiens
MSLLMISENVKLAREYALLGNYDSAMVYYQGVLDQMNKYLYSVKDTYLQQKWQQVWQEINVEAKHVKDIMKTLESFKLDSTPLKAAQHDLPASEGEVWSMPVPVERRPSPGPRKRQSSQYSDPKSHGNRPSTTVRVHRSSAQNVHNDRGKAVRCREKKEQNKGREEKNKSPAAVTEPETNKFDSTGYDKDLVEALERDIISQNPNVRWDDIADLVEAKKLLKEAVVLPMWMPEFFKGIRRPWKGVLMVGPPGTGKTLLAKAVATECKTTFFNVSSSTLTS

SEQ ID NO: 64762 - protein, 1311 aa, Homo sapiens
MLLFYLLVVLSIDSTKASALTNPNVALFLLADDCDDPLVSALPQASFSSSSELSSSHGPGFARLNRRDGAGGWSPLVSNKYQWLQIDLGERMEVTAVATQGGYGSSNWVTSYLLMFSDSGWNWKQYRQEDSIWGFSGNANADSVVYYRLQPSIKARFLRFIPLEWNPKGRIGMRIEVFGCAYRSEVVDLDGKSSLLYRFDQKSLSPIKDIISLKFKTMQSDGILLHREGPNGDHITLQLRRARLFLLINSGEAKLPSTSTLVNLTLGSLLDDQHWHSVLIQRLGKQVNFTVDEHRHHFHARGEFNLMNLDYEISFGGIPAPGKSVSFPHRNFHGCLENLYYNGVDIIDLAKQQKPQIIAMGNVSFSCSQPQSMPVTFLSSRSYLALPDFSGEEEVSATFQFRTWNKAGLLLFSELQLISGGILLFLSDGKLKSNLYQPGKLPSDITAGVELNDGQWHSVSLSAKKNHLSVAVDGQMASAAPLLGPEQIYSGGTYYFGGCPDKSFGSKCKSPLGGFQGCMRLISISGKVVDLISVQQGSLGNFSDLQIDSCGISDRCLPNYCEHGGECSQSWSTFHCNCTNTGYRGATCHNSIYEQSCEAYKHRGNTSGFYYIDSDGSGPLEPFLLYCNMTETAWTIIQHNGSDLTRVRNTNPENPYAGFFEYVASMEQLQATINRAEHCEQEFTYYCKKSRLVNKQDGTPLSWWVGRTNETQTYWGGSSPDLQKCTCGLEGNCIDSQYYCNCDADRNEWTNDTGLLAYKEHLPVTKIVITDTGRLHSEAAYKLGPLLCQGDRSFWNSASFDTEASYLHFPTFHGELSADVSFFFKTTASSGVFLENLGIADFIRIELRSPTVVTFSFDVGNGPFEISVQSPTHFNDNQWHHVRVERNMKEASLQVDQLTPKTQPAPADGHVLLQLNSQLFVGGTATRQRGFLGCIRSLQLNGMTLDLEERAQVTPEVQPGCRGHCSSYGKLCRNGGKCRERPIGFFCDCTFSAYTGPFCSNEISAYFGSGSSVIYNFQENYLLSKNSSSHAASFHGDMKLSREMIKFSFRTTRTPSLLLFVSSFYKEYLSVIIAKNGSLQIRYKLNKYQEPDVVNFDFKNMADGQLHHIMINREEGVVFIEIDDNRRRQVHLSSGTEFSAVKSLVLGRILEHSDVDQDTALAGAQGFTGCLSAVQLSHVAPLKAALHPSHPDPVTVTGHVTESSCMAQPGTDATSRERTHSFADHSGTIDDREPLANAIKSDSAVIGGLIAVVIFILLCITAIAVRIYQQKRLYKRSEAKRSENVDSAEAVLKSELNIQNAVNENQKEYFF

SEQ ID NO: 64763 - protein, 286 aa, Homo sapiens
MLSSFPHRKTWRKSKKTVKVTRSYPTFPSLNAWEEFRGLLPVDGEPNPGAGLGVEEGLLCRVVHSPEFNLFLDSVVFESNFIQVKRGRNWRDVYKASNTMALGVTSSVPCLPLPNILLMASVKWHQGQNQTWNRPSIAPNIFLKRILPLRFVELQVCDHYQRILQLRTVTEKIYYLKLHPDHPETVFHFWIRLVQILQKGLSITTKDPRILVTHCLVPKNCSSPSGDSKLVQKKLQASQPSESLIQLMTKGESEALSQIFADLHQQNQLRNQLDQQFRGRTNSLSF

SEQ ID NO: 64764 - protein, 137 aa, Homo sapiens
MPDSNFAERSEEQVSGAKVIAQALKTQDVEYIFGIVGIPVTEIAIAAQQLGIKYIGMRNEQAACYAASAIGYLTSRPGVCLVVSGPGLIHALGGMANANMNCWPLLVIGGSSERNQETMGAFQEFPQVHGTLHVTSY

SEQ ID NO: 64765 - protein, 130 aa, Homo sapiens
MENEIFTPLLEQFMTSPLVTWVKTFGPLAAGNGTNLDEYVALVDGVFLNQVMLQINPKLESQRVNKKVNNDASLRMHNLSILVRQIKFYYQETLQQLIMMSLPNVLIIGKNPFSEHEFAFGCSLCQNVPR

SEQ ID NO: 64766 - protein, 464 aa, Homo sapiens
MQLPRWWELGDPCAWTGQGRGTRRMSPATTGTFLLTAFLLSCADGINGTVNWKTRQANNFIISRKMAAGMKDVYSIFSKVHSDRNVYPSAGVLFVHVLEREYFKGEFPPYPKPGEISNDPITFNTNLMGYPDRPGWLRYIQRTPYSDGVLYGSPTAENVGKPTIIEITAYNRRTFETARHNLIINIMSAEDFPLPYQAEFFIKNMNVEEMLASEVLGDFLGAVKNVWQPERLNAINITSALDRGGRVPLPINDLKEGVYVMVGADVPFSSCLREVENPQNQLRCSQEMEPVITCDKKFRTQFYIDWCKISLVDKTKQVSTYQEVIRGEGILPDGGEYKPPSDSLKSRDYYTDFLITLAVPSAVALVLFLILAYIMCCRREGVIQLVHHSAIQKSTKELRDMSKNREIAWPLSTLPVFHPVTGEIIPPLHTDNYDSTNMPLMQTQQNLPHQTQIPQQQTTGKWYP

SEQ ID NO: 64767 - protein, 397 aa, Homo sapiens
MKAQTALSFFLILITSLSGSQGIFPLAFFIYVPMNEQIVIGRLDEDIILPSSFERGSEVVIHWKYQDSYKVHSYYKGSDHLESQDPRYANRTSLFYNEIQNGNASLFFRRVSLLDEGIYTCYVGTAIQVITNKVVLKVGVFLTPVMKYEKRNTNSFLICSVLSVYPRPIITWKMDNTPISENNMEETGSLDSFSINSPLNITGSNSSYECTIENSLLKQTWTGRWTMKDGLHKMQSEHVSLSCQPVNDYFSPNQDFKVTWSRMKSGTFSVLAYYLSSSQNTIINESRFSWNKELINQSDFSMNLMDLNLSDSGEYLCNISSDEYTLLTIHTVHVEPSQETASHNKGLWILVPSAILAAFLLIWSVKCCRERCCVPPGERCPSAPDNGEENVPLSGKV

SEQ ID NO: 64768 - protein, 55 aa, Homo sapiens
MERASCLLLLLLPLVHVSATTPEPCELDDEDFRCVCNFSEPQPDWSEAFQCVSAV

SEQ ID NO: 64769 - protein, 64 aa, Homo sapiens
MAAPPKAPIRVRNLTIRAGALTGKENNMLQPETHIFTAPEEGSSQGALLLGQAPEPLSLPCTPV

SEQ ID NO: 64770 - protein, 350 aa, Homo sapiens
MEEPEEPADSGQSLVPVYIYSPEYVSMCDSLAKIPKRASMVHSLIEAYALHKQMRIVKPKVASMEEMATFHTDAYLQHLQKVSQEGDDDHPDSIEYGLGYDCPATEGIFDYAAAIGGATITAAQCLIDGMCKVAINWSGGWHHAKKDEASGFCYLNDAVLGILRLRRKFERILYVDLDLHHGDGVEDAFSFTSKVMTVSLHKFSPGFFPGTGDVSDVGLGKGRYYSVNVPIQDGIQDEKYYQICESVLKEVYQAFNPKAVVLQLGADTIAGDPMCSFNMTPVGIGKCLKYILQWQLATLILGGGGYNLANTARCWTYLTGVILGKTLSSEIPDHEVSKALTSPLFFKGKS

SEQ ID NO: 64771 - protein, 225 aa, Homo sapiens
MHICDIINTTQDGPKDAVKALKKRISKNYNHKEIQLTLSLIDMCVQNCGPSFQSLIVKKEFVKENLVKLLNPRYNLPLDIQNRILNFIKTWSQGFPGGVDVSEVKEVYLDLVKKGVQFPPSEAEAETARQETAQISSNPPTSVPTAPALSSVIAPKNSTVTLVPEQIGKLHSELDMVKMNVRVMSAILMENTPGSENHEDIELLQVLYDFRDYQSKCLLKLFSKL

SEQ ID NO: 64772 - protein, 53 aa, Homo sapiens
MSPAPDAAPAPASISLFDLSADAPVFQGLSLVSHAPGEALARAPRTSCSEGTL

SEQ ID NO: 64773 - protein, 129 aa, Homo sapiens
  MOD_RES (1)..(1): Any amino acid
XAGISTFGEVEFTSLETYKQVAEVNLWGTVRMTKSFLPLIRRAKGEWERELPPAPEPAPRVHLCSEWKYLSQQLQCPQLSRGRVVNISSMLGRMANPARSPYCITKFGVEAFSDCLRYEMYPLGVKVSV

SEQ ID NO: 64774 - protein, 177 aa, Homo sapiens
MKPKLMYQELKVPAEEPANELPMNEIEAWKAAEKKARWVLLVLILAVVGFGALMTQLFLWEYGDLHLFGPNQRPAPCYDPCEAVLVESIPEGLDFPNASTGNPSTSQAWLGLLAGAHSSLDIASFYWTLTNNDTHTQEPSAQQGEEVLRQLQTLAPKGVNVRIAVSKPSGPQPQADL

SEQ ID NO: 64775 - protein, 542 aa, Homo sapiens
MHCKVSLLDDTVYECVVEKHAKGQDLLKRVCEHLNLLEEDYFGLAIWDNATSKTWLDSAKEIKKQVRGVPWNFTFNVKFYPPDPAQLTEDITRYYLCLQLRQDIVAGRLPCSFATLALLGSYTIQSELGDYDPELHGVDYVSDFKLAPNQTKELEEKVMELHKSYRSMTPAQADLEFLENAKKLSMYGVDLHKAKDLEGVDIILGVCSSGLLVYKDKLRINRFPWPKVLKISYKRSSFFIKIRPGEQEQYESTIGFKLPSYRAAKKLWKVCVEHHTFFRLTSTDTIPKSKFLALGSKFRYSGRTQAQTRQASALIDRPAPHFERTASKRASRSLDGAAAVDSADRSPRPTSAPAITQGQVAEGGVLDASAKKTVVPKAQKETVKAEVKKEDEPPEQAEPEPTEAWKPPLVKTQTVTISDNANAVKSEIPTKDVPIVHTETKTITYEAAQTDDNSGDLDPGVLLTAQTITSETPSSTTTTQITKTVKGGISETRIEKRIVITGDADIDHDQVLVQAIKEAKEQHPDMSVTKVVVHQETEIADE

SEQ ID NO: 64776 - protein, 460 aa, Homo sapiens
MAATDLERFSNAEPEPRSLSLGGHVGFDSLPDQLVSKSVTQGFSFNILCVGETGIGKSTLMNTLFNTTFETEEASHHEACVRLRPQTYDLQESNVQLKLTIVDAVGFGDQINKDERPIVDYIDAQFENYLQEELKIRRSLFDYHDTRIHVCLYFITPTGHSLKSLDLVTMKKLDSKVNIIPIIAKADTISKSELHKFKIKIMGELVSNGVQIYQFPTDDEAVAEINAVMNAHLPFAVVGSTEEVKVGNKLVRARQYPWGVVQVENENHCDFVKLREMLIRVNMEDLREQTHSRHYELYRRCKLEEMGFQDSDGDSQPFSLQETYEAKRKEFLSELQRKEEEMRQMFVNKVKETELELKEKERELHEKFEHLKRVHQEEKRKVEEKRRELEEETNAFNRRKAAVEALQSQALHATSQQPLRKDKDKKKGLSWISSQNPAHIHSHLVKQQMSSSSSPKAWDA

SEQ ID NO: 64777 - protein, 35 aa, Homo sapiens
ESMIPITRSLQKALHHLSRLRDLVDDTNGERSPKM

SEQ ID NO: 64778 - protein, 148 aa, Homo sapiens
EVSKEILLEMFKYNKFKCRILNEKVNTATTTVYRCGPLIDLCKGPHVRHTGKIKTIKIFKNSSTYWEGNPEMETLQRIYGISFPDNKMMRDWEKFQEEAKNRDHRKIGKEQELFFFHDLSPGSCFFLPRGAFIYNTLTDFIRMQDRCG

SEQ ID NO: 64779 - protein, 74 aa, Homo sapiens
MMDIYVCLKRPSWMVDNKRMRTASNFQWLLSTFILLYLMNQVNSQKKGAPHDLKCVTNNLQVWNCSWKAPSGTG

SEQ ID NO: 64780 - protein, 218 aa, Homo sapiens
MAVCARLCGVGPSRGCRRRQQRRGPAETAAADSEPDTDPEEERIEASAGVGGGLCAGPSPPPPRCSLLELPPELLVEIFASLPGTDLPSLAQVCTKFRRILHTDTIWRRRCREEYGVCENLRKLEITGVSCRDVYAKRINPRVKSGRFVKILPDYEHMAYRDVYTCLLHRYRHILGLWQPDIGPYGGLLNVVVDGLFIIGWMYLPPHDPHVDDPMRFK

SEQ ID NO: 64781 - protein, 60 aa, Homo sapiens
MDSFGQPRPEDNQSVVRRMQKKYWKTKQVFIKATGKKEDEHLVASDAELDAKLERHALNF

SEQ ID NO: 64782 - protein, 79 aa, Homo sapiens
MNNLPHLQVVGLTWGHISWDLLALPPQDIILASDVFFEPEDFEDILATIYFLMHKNPKVQLWSTYQVRRQVWMTLTFYM

SEQ ID NO: 64783 - protein, 113 aa, Homo sapiens
MLETKWSLLQQQKTARSNMDNMFESYINNLRRQLETLGQEKLKLEAELGNMQGLVEDFKNKYEDEINKRTEMENEFVLIKKDVDEAYMNKVELESRLEGLTDEINFLRQLYEE

SEQ ID NO: 64784 - protein, 46 aa, Homo sapiens
MPLTPTVQGFQWTLRGPDVETSPFGAPRAASHGVGRHQELRDPTEM

SEQ ID NO: 64785 - protein, 1066 aa, Homo sapiens
FYFLYGFVWIQDMMERAIIDTFVGHDVVEPGSYVQMFPYPCYTRDDFLFVIEHMMPLCMVISWVYSVAMTIQHIVAEKEHRLKEVMKTMGLNNAVHWVAWFITGFVQLSISVTALTAILKYGQVLMHSHVVIIWLFLAVYAVATIMFCFLVSVLYSKAKLASACGGIIYFLSYVPYMYVAIREEVAHDKITAFEKCIASLMSTTAFGLGSKYFALYEVAGVGIQWHTFSQSPVEGDDFNLLLAVTMLMVDAVVYGILTWYIEAVHPGMYGLPRPWYFPLQKSYWLGSGRTEAWEWSWPWARTPRLSVMEEDQACAMESRRFEETRGMEEEPTHLPLVVCVDKLTKVYKDDKKLALNKLSLNLYENQVVSFLGHNGAGKTTTMSILTGLFPPTSGSATIYGHDIRTEMDEIRKNLGMCPQHNVLFDRLTVEEHLWFYSRLKSMAQEEIRREMDKMIEDLELSNKRHSLVQTLSGGMKRKLSVAIAFVGGSRAIILDEPTAGVDPYARRAIWDLILKYKPGRTILLSTHHMDEADLLGDRIAIISHGKLKCCGSPLFLKGTYGDGYRLTLVKRPAEPGGPQEPGLASSPPGRAPLSSCSELQVSQFIRKHVASCLLVSDTSTELSYILPSEAAKKGAFERLFQHLERSLDALHLSSFGLMDTTLEEVFLKVSEEDQSLENSEADVKESRKDVLPGAEGPASGEGHAGNLARCSELTQSQASLQSASSVGSARGDEGAGYTDVYGDYRPLFDNPQDPDNVSLQEVEAEALSRVGQGSRKLDGGWLKVRQFHGLLVKRFHCARRNSKALFSQILLPAFFVCVAMTVALSVPEIGDLPPLVLSPSQYHNYTQPRGNFIPYANEERREYRLRLSPDASPQQLVSTFRLPSGVGATCVLKSPANGSLGPTLNLSSGESRLLAARFFDSMCLESFTQGLPLSNFVPPPPSPAPSDSPASPDEDLQAWNVSLPPTAGPEMWTSAPSLPRLVREPVRCTCSAQGTGFSCPSSVGGHPPQMRVVTGDILTDITGHNVSEYLLFTSDRFRLHRLTACLASPPLPPACPGMGPSPLETS

SEQ ID NO: 64786 - protein, 53 aa, Homo sapiens
MEAQEYIANVTSSSSAKFEAALTWILSSNKDVGIWLKGEDQSELVTTVDKVVC

SEQ ID NO: 64787 - protein, 156 aa, Homo sapiens
MQRAGSKTAGPPCQWSRMASEGTNIPSPVVRQIDKQFLICSICLERYKNPKVLPCLHTFCERCLQNYIPAHSLTLSCPVCRQTSILPEKGVAALQNNFFITNLMDVLQRTPGSNAEESSILETVTAVAAGKPLSCPNHDGNVPKEEIKESLQIFRG

SEQ ID NO: 64788 - protein, 109 aa, Homo sapiens
MVGQLAARRAAGVVLEMIREGKIAGRAVLIAGQPGTGKTAIAMGMAQALGPDTPFTAIAGSEIFSLEMSKTEALTQAFRRSIGVRIKEETEIIEGEVVEIQIDRPATGT

SEQ ID NO: 64789 - protein, 105 aa, Homo sapiens
GQLGVPHGPRRCVVPQAIELHKEKVVCIAAGLRHAVAATASGIVFQWGTGLASCGRRLCPGQTLPLFFTAKEPSRVTGLENSKAMCVLAGSDHSASLTGLLWLRA

SEQ ID NO: 64790 - protein, 111 aa, Homo sapiens
MPRQFPKLNISEVDEQVRLLAEKVFAKVLREEDSKDALSLFTVPEDCPIGQKEAKERELQKELAEQKSVETAKRKKSFKMIRSQSLSLQMPPQQDWKGPPAASPAMSPTTP

SEQ ID NO: 64791 - protein, 821 aa, Homo sapiens
MYVCVEIITFIDCLIKITEHLGSTAALLKKEEKEICNLCGMHDECTPQQTMSSIQDTKAADIAARGELNVIETATVSPTNGEESHYTNQVQLEKNKTHMSSALVEKENNTSLNGRVLGQEESQNKMFPDNAENEDDKQIEHMTVENINGNREETHGIIQTTETEIQETSESPREEMTTSSIICDISKKYINSTLPNDSENIKHKNNIMEKEYLDVLSDVTGPQVSCYITAPSYVLQQLECRIINHMSSLIVGDNEELVSNVITIECSDKEKRVPFPIGIAIPFTARYRGNYRDIMVKVCDINLQSSYLNPNSLEGMKGGYKGTCASVKVYKLGIFSVVSCLKKESFTVTKKGLALKSSMDSRISLNYPPGVFTSPVLVQLKIQPVDPALVAHLKAQQDTFYSVQSTSPLIHIQHPSTYPFQKPVTLFLPCSPYLDKNNLGSEIDHKRRASATINRITPSYFNRTKIASIRKPRKNASECLKLLGFRSQDSGWCGLDDVVKTIQSGLVSVELYEHLERFIVLHLSSTMDNSHLVTFVKSLEEAMLSTTACIVLSHQKDNPHRIAVLVVPSKDLSQVLKDLHLEGFGGPPEPSRHFQVREGEQLLLRFTGNIFASSNGKDYGKDYTLIFHLQRKPRLELQIKEVDEFGNYSCPHYKGTIVVYKVPKGKIVPNLNQSLVINENHSQLPICKLPLKLPKHKKLINRPQSTKRVSKDPVEALWDNLLHWLAEELSEENAESLSSTLPLRRSTIQLIKLKNPDDLTEQIHEFLCFWKKSLPTFTDKLRLLARHLRKIGRSDLAEELKFKWENKVFTEPQQCFDVAPE

SEQ ID NO: 64792 - protein, 169 aa, Homo sapiens
MDLSGVKKKSLLGVKENNKKSSTRAPSPTKRKDRSDEKSKDRSKDKGATKESSEKDRGRDKTRKRRSASSGSSSTRSRSSSTSSSGSSTSTGSSSGSSSSSASSRSGSSSTSRSSSSSSSSGSPSPSRRRHDNRRRSRSKSKPPKRDEKERKRRSPSPKPTKVHIGRLT

SEQ ID NO: 64793 - protein, 239 aa, Homo sapiens
MWPPGSASQPPPSPAAATGLHPAARPVSLQCRLSMCPARSLLLVATLVLLDHLSLARNLPVATPDPGMFPCLHHSQNLLRAVSNMLQKARQTLEFYPCTSEEIDHEDITKDKTSTVEACLPLELTKNGSCLASRKTSFMMALCLSSIYEDLKMYQVEFKTMNAKLLMDPKRQIFLDQNMLAVIDELMQALNFNSETVPQKSSLEEPDFYKTKIKLCILLHAFRIRAVTIDRVMSYLNAS

SEQ ID NO: 64794 - protein, 193 aa, Homo sapiens
  MOD_RES (1)..(1): Any amino acid
XKFDDLDGTHALMSRMVQNEIPYFIWTTRRDVLDCRFLSKDQMINHYARAGSFTTKVGLCLNLRNLPWFDEVDANSFFPRCYCLGAEDDKKAFIGDKQPKKQEKNPVLVSPEFVDEALCACEEYLSNLAHMDIDKDLEAPLYLTPEGWSLFLQRYYQVVHEGAELRHLDTQVQRCEDILQQLQAVVPQIDMEG

SEQ ID NO: 64795 - protein, 166 aa, Homo sapiens
MGMVISHDMLLGRWRLSLELFGRVFMEDVGAEPGSILTELGGFEVKESKFRREMEKLRNQQSRDLSLEVDRDRDLLIQQTMRQLNNHFGRRCATTPMAVHRVKVTFKDEPGEGSGVARSFYTAIAQAFLSNEKLPNLECIQNANKGTHTSLMQRLRNRGERDRERE

SEQ ID NO: 64796 - protein, 653 aa, Homo sapiens
SGSPLNLNSMVSNINQPLEITAISSPETSLKSSPVPYQDHDQPPVLKKERPLSQTNGAHYSPLTSDEEPGSEDEPSSARIERKIATISLESKSPPKTLENGGGLAGRKPAPAGEPVNSSKWKSTFSPISDIGLAKSADSPLQASSALSQNSLFTFRPALEEPSADAKLAAHPRKGFPGSLSGADGLSPGTNPANGCTFGGGLAADLSLHSFSDGASLPHKGPEAAGLSSPLSFPSQRGKEGSDANPFLSKRQLDGLAGLKGEGSRGKEAGEGGLPLCGPTDKTPLLSGKAAKARDREVDLKNGHNLFISAAAVPPGSLLSGPGLAPAASSAGGAASSAQTHRSFLGPFPPGPQFALGPMSLQANLGSVAGSSVLQSLFSSVPAAAGLVHVSSAATRLTNSHAMGSFSGVAGGTVGEGHRAQGHQSITFSRGGHLLGVAARALARLWELVLGVFNHAVPSASAHPFGARVGRGAACGSATLGPSPLQAAASASASSFQAPASVETRPPPPPPPPPPPLPPPAHLGRSPAGPPVLHAPPPPNAALPPPPTLLASNPEPALLQSLASLPPNQAFLPPTSAASLPPANASLSIKLTSLPHKGARPSFTVHHQPLPRLALAQAAPGIPQASATGPSAVWVSLGMPPPYAAHLSGVKPR

SEQ ID NO: 64797 - protein, 85 aa, Homo sapiens
NLMTTLPSQDASLPPQQPYIAGQQPMYQWHPLAVPPSSSPPWPSNRRHRGRRHRAARPSSFHSTDPGHAHVRSNTTYSSPETPRL

SEQ ID NO: 64798 - protein, 118 aa, Homo sapiens
  MOD_RES (1)..(1): Any amino acid
XFGMGVDKANVRFVAHWNIAKSMAGYYQESGRAGRDGKPSWCRLYYSRNDRDQVSFLIRKEVAKLQEKRGNKASDKATIMAFDALVTFCEELGRWGRGHGKSLRAAWCSQVVSRHAEL

SEQ ID NO: 64799 - protein, 42 aa, Homo sapiens
MAIPITVLDCDLLLYGRGHRTLDRFKLDDVTDEYLMSMYGFP

SEQ ID NO: 64800 - protein, 161 aa, Homo sapiens
MLLVTPRPERGGRGTELGEFCGTPLLFSSYFCYDNPAALQTQVKRDMQVNTTKFMLLYAWYSWPNVVLCFFGGFLIDRVFGIRWGTIIFSCFVCIGQVVFALGGIFNAFWLMEFGRFVFGIGGESLAVAQNTYAVSWFKGKELNLVFGLQLSMARIGSTVN

SEQ ID NO: 64801 - protein, 286 aa, Homo sapiens
MGRKKIQISRILDQRNRQVTFTKRKFGLMKKAYELSVLCDCEIALIIFNSANRLFQYASTDMDRVLLKYTEYSEPHESRTNTDILETLKRRGIGLDGPELEPDEGPEEPGEKFRRLAGEGGDPALPRPRLYPAAPAMPSPDVVYGALPPPGCDPSGLGEALPAQSRPSPFRPAAPKAGPPEKPLQWPAEPLLHCNSRTPTGELPLPPRRPPSGGRSLGEEGPPTRGASPPTPPVSIKSERLSPAPGGPGDFPKTFPYPLLLARSLAEPLRPGPALRRLPLADGWPR

SEQ ID NO: 64802 - protein, 716 aa, Homo sapiens
MKALFAQNQLDTQKPLVTESVKRAVVSTARDTWEVYFSRIFPATGSVGTGVQLLAVSHVGIKLLRMVKGGQEAGGQLRVLRAYSFADILFVTMPSQNMLEFNLASEKVILFSARAHQVKTLVDDFILELKKDSDYVVAVRNFLPEDPALLAFHKGDIIHLQPLEPPRVGYSAGCVVRRKVVYLEELRRRGPDFGWRFGTIHGRVGRFPSELVQPAAAPDFLQLPTEPGRGRAAAVAAAVASAAAAQEVGRRREGPPVRARSADHGEDALALPPYTMLEFAQKYFRDPQRRPQDGLRLKSKEPRESRTLEDMLCFTKTPLQESLIELSDSSLSKMATDMFLAVMRFMGDAPLKGQSDLDVLCNLLKLCGDHEVMRDECYCQVVKQITDNTSSKQDSCQRGWRLLYIVTAYHSCSEVLHPHLTRFLQDVSRTPGLPFQGIAKACEQNLQKTLRFGGRLELPSSIELRAMLAGRSSKRQLFLLPGGLERHLKIKTCTVALDVVEEICAEMALTRPEAFNEYVIFVVTNRGQHVCPLSRRAYILDVASEMEQVDGGYMLWFRRVLWDQPLKFENELYVTMHYNQVLPDYLKGLFSSVPASRPSEQLLQQVSKLASLQHRAKDHFYLPSVREVQEYIPAQLYRTTAGSTWLNLVSQHRQQTQALSPHQARAQFLELQQHCCASPLHPCHQPQWPQLSQHRDSWTGTVSCGGRARGEPAQCP

SEQ ID NO: 64803 - protein, 222 aa, Homo sapiens
MADTTPNGPQGAGAVQFMMTNKLDTAMWLSRLFTVYCSALFVLPLLGLHEAASFYQRALLANALTSALRLHQRLPHFQLSRAFLAQALLEDSCHYLLYSLIFVNSYPVTMSIFPVLLFSLLHAATYTKKVLDARGSNSLPLLRSVLDKLSANQQNILKFIACNEIFLMPATVFMLFSGQGSLLQPFIYYRFLTLRYSSRRNPYCRTLFNELRIVVEHIIMKP

SEQ ID NO: 64804 - protein, 198 aa, Homo sapiens
  MOD_RES (1)..(1): Any amino acid
XRPEVDPLPFPGPFPAGPLAVAGGPRKTGFSSLSLSDQMSVLQSVWMEVLVLGVAQRSLPLQDELAFAEDLVLDEEGARAAGLGELGAALLQLVRRLQALRLEREEYVLLKALALANSDSVHIEDAEAVEQLREALHEALLEYEAGRAGPGGGAERRRAGRLLLTLPLLRQTAGKVLAHFYGVKLEGKVPMHKLFLEM

SEQ ID NO: 64805 - protein, 496 aa, Homo sapiens
MAAASSSDSDACGAESNEANSKWLDAHYDPMANIHTFSACLALADLHGDGEYKLVVGDLGPGGQQPRLKVLKGPLVMTESPLPALPAAAATFLMEQHEPRTPALALASGPCVYVYKNLRPYFKFSLPQLPPNPLEQDLWNQAKEMSLPSVPVFLEVSGQFDVEFRLAAACRNGNIYILRRDSKHPKYCIELSAQPVGLIRVHKVLVVGSTQDSLHGFTHKGKKLWTVQMPAAILTMNLLEQHSRGLQAVMAGLANGEVRIYRDKALLNVIHTPDAVTSLCFGRYGREDNTLIMTTRGGGLIIKILKRTAVFVEGGSEVGPPPAQAMKLNVPRKTRLYVDQTLREREAGTAMHRAFQTDLYLLRLRAARAYLQALESSLSPLSTTAREPLKLHAVVQGLGPTFKLTLHLQNTSTTRPVLGLLVCFLYNEALYSLPRAFFKVPLLVPGLNYPLETFVESLSNKGISDIIKVLVLREGQSAPLLSAHVNMPGSEGLAAA

SEQ ID NO: 64806 - protein, 47 aa, Homo sapiens
RVFFRTNDAKVGTLVGEDKYGNKYYEDNKQFFDEETEAQGSIFTKET

SEQ ID NO: 64807 - protein, 608 aa, Homo sapiens
MALITLRKNLYRLSDFQMHRALAALKNKPLNHVHKVVKERLCPWLCSRQPEPFGVKFHHAHCKKFHSKNGNDLHPLGGPVFSQVSDCDRLEQNVKNEESQMFYRRLSNLTSSEEVLSFISTMETLPDTMAAGALQRICEVEKKDGDQGLPKEILENSIFQALCFQFEKEPSQLSNTSLVTALQALILLHVDPQSSLLLNLVAECQNRLRKGGMEVRNLCILGESLITLHSSGCVTLELIINQLQGEKLETFTPEDIVALYRILQACTEKVDEHQTFLNKINNFSLSIVSNLSPKLISQMLTALVVLDQSQAFPLIIKLGKYVVRHVPHFTNEELRRVLEAFIYFGHHDTFFTKALEHRVAAVCLTLDPEVVCRVMEYCSRELILSKPILNAVAETFVCQTEKFSPRQISALMEPFGKLNYLPPNASALFRKLENVLFTHFNYFPPKSLLKLLHSCSLNECHPVNFLAKIFKPLFLQRLQGKESHLDTLSRAQLTQLFLASVLECPFYKGPKLLPKYQVKSFLTPCCSLETPVDSQLYRYVKIGLTNLLGARLYFAPKVLTPYCYTIAFSPIDQCKVEGIKAKQRNEYRKIVFVRVSHEEFFLSSLTRC

SEQ ID NO: 64808 - protein, 54 aa, Homo sapiens
MALSRGLPRELAEAVAGGRVLVVGAGGIGCELLKNLVLTGFSHIDLPPGSHYFA

SEQ ID NO: 64809 - protein, 123 aa, Homo sapiens
MGKCRGLRTARKLRSHRRDQKWHDKQYKKAHLGTALKANPFGGASHAKGIVLEKVGVEAKQPNSAIRKCVRVQLIKNGKKITAFVPNDGCLNFIEVSISTLSYLLFLGWPPSHFYLMQGSFLT

SEQ ID NO: 64810 - protein, 3876 aa, Homo sapiens
MEDEERQKKLEAGKAKLAQFRQRKAQSDGQSPSKKQKKKRKTSSSKHDVSAHHDLNIDQSQCNEMYINSSQRVESTVIPESTIMRTLHSGEITSHEQGFSVELESEISTTADDCSSEVNGCSFVMRTGKPTNLLREEEFGVDDSYSEQGAQDSPTHLEMMESELAGKQHEIEELNRELEEMRVTYGTEGLQQLQEFEAAIKQRDGIITQLTANLQQARREKDETMREFLELTEQSQKLQIQFQQLQASETLRNSTHSSTAADLLQAKQQILTHQQQLEEQDHLLEDYQKKKEDFTMQISFLQEKIKVYEMEQDKKVENSNKEEIQEKETIIEELNTKIIEEEKKTLELKDKLTTADKLLGELQEQIVQKNQEIKNMKLELTNSKQKERQSSEEIKQLMGTVEELQKRNHKDSQFETDIVQRMEQETQRKLEQLRAELDEMYGQQIVQMKQELIRQHMAQMEEMKTRHKGEMENALRSYSNITVNEDQIKLMNVAINELNIKLQDTNSQKEKLKEELGLILEEKCALQRQLEDLVEELSFSREQIQRARQTIAEQESKLNEAHKSLSTVEDLKAEIVSASESRKELELKHEAEVTNYKIKLEMLEKEKNAVLDRMAESQEAELERLRTQLLFSHEEELSKLKEDLEIEHRINIEKLKDNLGIHYKQQIDGLQNEMSQKIETMQFEKDNLITKQNQLILEISKLKDLQQSLVNSKSEEMTLQINELQKEIEILRQEEKEKGTLEQEVQELQLKTELLEKQMKEKENDLQEKFAQLEAENSILKDEKKTLEDMLKIHTPVSQEERLIFLDSIKSKSKDSVWEKEIEILIEENEDLKQQCIQLNEEIEKQRNTFSFAEKNFEVNYQELQEEYACLLKVKDDLEDSKNKQELEYKSKLKALNEELHLQRINPTTVKMKSSVFDEDKTFVAETLEMGEVVEKDTTELMEKLEVTKREKLELSQRLSDLSEQLKQKHGEISFLNEEVKSLKQEKEQVSLRCRELEIIINHNRAENVQSCDTQVSSLLDGVVTMTSRGAEGSVSKVNKSFGEESKIMVEDKVSFENMTVGEESKQEQLILDHLPSVTKESSLRATQPSENDKLQKELNVLKSEQNDLRLQMEAQRICLSLVYSTHVDQVREYMENEKDKALCSLKEELIFAQEEKIKELQKIHQLELQTMKTQETGDEGKPLHLLIGKLQKAVSEECSYFLQTLCSVLGEYYTPALKCEVNAEDKENSGDYISENEDPELQDYRYEVQDFQENMHTLLNKVTEEYNKLLVLQTRLSKIWGQQTDGMKLEFGEENLPKEETEFLSIHSQMTNLEDIDVNHKSKLSSLQDLEKTKLEEQVQELESLISSLQQQLKETEQNYEAEIHCLQKRLQAVSESTVPPSLPVDSVVITESDAQRTMYPGSCVKKNIDGTIEVIVSMSIAFAQQTELSRISGGKENTASSKQAHAVCQQEQHYFNEMKLSQDQIGFQTFETVDVKFKEEFKPLSKELGEHGKEILLSNSDPHDIPESKDCVLTISEEMFSKDKTFIVRQSIHDEISVSSMDASRQLMLNEEQLEDMRQELVRQYQEHQQATELLRQAHMRQMERQREDQEQLQEEIKRLNRQLAQRSSIDNENLVSERERVLLEELEALKQLSLAGREKLCCELRNSSTQTQNGNENQGEVEEQTFKEKELDRKPEDVPPEILSNERYALQKANNRLLKILLEVVKTTAAVEETIGRHVLGILDRSSKSQSSASLIWRSEAEASVKSCVHEEHTRVTDESIPSYSGSDMPRNDINMWSKVTEEGTELSQRLVRSGFAGTEIDPENEELMLNISSRLQAAVEKLLEAISETSSQLEHAKVTQTELMRESFRQKQEATESLKCQEELRERLHEESRAREQLAVELSKAEGVIDGYADEKTLFERQIQEKTDIIDRLEQELLCASNRLQELEAEQQQIQEERELLSRQKEAMKAEAGPVEQQLLQETEKLMKEKLEVQCQAEKVRDDLQKQVKALEIDVEEQVSRFIELEQEKNTELMDLRQQNQALEKQLEKMRKFLDEQAIDREHERDVFQQEIQKLEQQLKVVPRFQPISEHQTREVEQLANHLKEKTDKCSELLLSKEQLQRDIQERNEEIEKLEFRVRELEQALLVSADTFQKVEDRKHFGAVEAKPELSLEVQLQAERDAIDRKEKEITNLEEQLEQFREELENKNEEVQQLHMQLEIQKKESTTRLQELEQENKLFKDDMEKLGLAIKESDAMSTQDQHVLFGKFAQIIQEKEVEIDQLNEQVTKLQQQLKITTDNKVIEEKNELIRDLETQIECLMSDQECVKRNREEEIEQLNEVIEKLQQELANIGQKTSMNAHSLSEEADSLKHQLDVVIAEKLALEQQVETANEEMTFMKNVLKETNFKMNQLTQELFSLKRERESVEKIQSIPENSVNVAIDHLSKDKPELEVVLTEDALKSLENQTYFKSFEENGKGSIINLETRLLQLESTVSAKDLELTQCYKQIKDMQEQGQFETEMLQKKIVNLQKIVEEKVAAALVSQIQLEAVQEYAKFCQDNQTISSEPERTNIQNLNQLREDELGSDISALTLRISELESQVVEMHTSLILEKEQVEIAEKNVLEKEKKLLELQKLLEGNEKKQREKEKKRSPQDVEVLKTTTELFHSNEESGFFNELEALRAESVATKAELASYKEKAEKLQEELLVKETNMTSLQKDLSQVRDHLAEAKEKLSILEKEDETEVQESKKACMFEPLPIKLSKSIASQTDGTLKISSSNQTPQILVKNAGIQINLQSECSSEEVTEIISQFTEKIEKMQELHAAEILDMESRHISETETLKREHYVAVQLLKEECGTLKAVIQCLRSKEGSSIPELAHSDAYQTREICSSDSGSDWGQGIYLTHSQGFDIASEGRGEESESATDSFPKKIKGLLRAVHNEGMQVLSLTESPYSDGEDHSIQQVSEPWLEERKAYINTISSLKDLITKMQLQREAEVYDSSQSHESFSDWRGELLLALQQVFLEERSVLLAAFRTELTALGTTDAVGLLNCLEQRIQEQGVEYQAAMECLQKADRRSLLSEIQALHAQMNGRKITLKREQESEKPSQELLEYNIQQKQSQMLEMQVELSSMKDRATELQEQLSSEKMVVAELKSELAQTKLELETTLKAQHKHLKELEAFRLEVKDKTDEVHLLNDTLASEQKKSRELQWALEKEKAKLGRSEERDKEELEDLKFSLESQKQRNLQLNLLLEQQKQLLNESQQKIESQRMLYDAQLSEEQGRNLELQVLLESEKVRIREMSSTLDRERELHAQLQSSDGTGQSRPPLPSEDLLKELQKQLEEKHSRIVELLNETEKYKLDSLQTRQQMEKDRQVHRKTLQTEQEANTEGQKKMHELQSKVEDLQRQLEEKRQQVYKLDLEGQRLQGIMQEFQKQELEREEKRESRRILYQNLNEPTTWSLTSDRTRNWVLQQKIEGETKESNYAKLIEMNGGGTGCNHELEMIRQKLQCVASKLQVLPQKASERLQFETADDEDFIWVQENIDEIILQLQKLTGQQGEEPSLVSPSTSCGSLTERLLRQNAELTGHISQLTEEKNDLRNMVMKLEEQIRWYRQTGAGRDNSSRFSLNGGANIEAIIASEKEVWNREKLTLQKSLKRAEAEVYKLKAELRNDSLLQTLSPDSEHVTLKRIYGKYLRAESFRKALIYQKKYLLLLLGGFQECEDATLALLARMGGQPAFTDLEVITNRPKGFTRFRSAVRVSIAISRMKFLVRRWHRVTGSVSININRDGFGLNQGAEKTDSFYHSSGGLELYGEPRHTTYRSRSDLDYIRSPLPFQNRYPGTPADFNPGSLACSQLQNYDPDRALTDYITRLEALQRRLGTIQSGSTTQFHAGMRR

SEQ ID NO: 64811 - protein, 142 aa, Homo sapiens
MEGGAAAATPTALPYYVAFSQLLGLTLVAMTGAWLGLYRGGIAWESDLQFNAHPLCMVIGLIFLQGNALLVYRVFRNEAKRTTKVLHGLLHIFALVIALVGEFPGAAFPATCLPLQAWWRCSTTTGRRATLTCTAYTAGAGS

SEQ ID NO: 64812 - protein, 133 aa, Homo sapiens
SLNTFRSEKRYSRSLTIAEFKCKLELLVGSPASCMELELYGVDDKFYSKLDQEDALLGSYPVDDGCRIHSLALSPRLACSGMISAHCNLRLPGSSDSPASASRVGGITDARHYTRVIDHSGARLGEYEDVSRV

SEQ ID NO: 64813 - protein, 180 aa, Homo sapiens
MYGSSFDLDYDFQRDYYDRMYSYPARVPPPPPIARAVVPSKRQRVSGNTSRRGKSGFNSKSGQRGSSKSGKLKGDDLQAIKKELTQIKQKVDSLLENLEKIEKEQSKQAVEMKNDKSEEEQSSSSVKKDETNVKMESEGGADDSAEEGDLLDDDDNEDRGDDQLELIKDDEKEAEEGEDD

SEQ ID NO: 64814 - protein, 115 aa, Homo sapiens
MATSRYEPVAEIGVGAYGTVYKARDPHSGHFVALKSVRVPNGGGGGGGLPISTVREVALLRRLEAFEHPNVVRLMDVCATSRTDREIKVTLVFEHVDQDLRTYLDKAPPPGLPAE

SEQ ID NO: 64815 - protein, 46 aa, Homo sapiens
MDMDPFLHCVIPNFIQSQDFLEGLQKELMNLDFHEKYNDLYKFQQS

SEQ ID NO: 64816 - protein, 191 aa, Homo sapiens
  MOD_RES (1)..(1): Any amino acid
XFSTHGSHLDSSSSSVSFHALGILYFPSLGGYESSREMLYWTCKNGRPCPIILWDASLSSASNDTHSSVKLTWGTYQQLLKQKCWQNGRVPKPESGCTEIHHHEWSKMALFDFLLQIYNRLDTNCCGFRPRKEDACVQNGLRPKCDDQGSAALAHIIQRKHDPRHLVFIDNKGFFDRSEDNLNFKLLEGIK

SEQ ID NO: 64817 - protein, 1020 aa, Homo sapiens
MSCLGIFIPKKHRARFDEVVSQGLLGKLCRARRAQGAQRLRRSRSEERPERLLVSTRASAPPRRPDEPPPRRASLLVGGLAGPGGARRTVRVYKGNKSFGFTLRGHGPVWIESVLPGSPADNAALKSGDRILFLNGLDMRNCSHDKVVSMLQGSGAMPTLVVEEGLVPFASDSDSLDSPNPSSALTSLQWVAEILPSSIRVQGRTFSQQLEHLLTPPERYGVCRALESFFQHRNIDTLIVDVYPVLDTPAKQVLWQFIYQLLTYEEQELCQEKIACFLGYTAMTEPEPELDLESEPTPEPQPRSSLRASSMCRRSLRSQGLEAGLSCGPSECPEMPLPLIPGERQAGDGTSLPETPNPKMMSAVYAELESRLNSSFKGKMGTVSKSRASPPGPSPAVTTGPRTLSGVSWPSERLLPSPCYHPLCSGGLASPSSSESHPYASLDSSRAPSPQPGPGPICPDSPPSPDPTRPPSRRKLFTFSHPVRSRDTDRFLDVLSEQLGPRVTIVDDFLTPENDYEEMSFHDDQGSFVTNERSSASDCISSSEEGSSLTYSSISDHIPPPPLSPPPPPPLPFHDAKPSSRSSDGSRGPAQALAKPLTQLSHPVPPPPPPPLPPPVPCAPPMLSRGLGHRRSETSHMSVKRLRWEQVENSEGTIWGQLGEDSDYDKLSDMVKYLDLELHFGTQKPAKPVPGPEPFRKKEVVEILSHKKAYNTSILLAHLKLSPAELRQVLMSMEPRRLEPAHLAQLLLFAPDADEEQRYQAFREAPGRLSEPDQFVLQMLSVPEYKTRLRSLHFQATLQEKTEEIRGSLECLRQASLELKNSRKLAKILEFVLAMGNYLNDGQPKTNKTTGFKINFLTELNSTKTVDGKSTFLHILAKSLSQHFPELLGFAQDLPTVPLAAKVNQRALTSDLADLHGTISEIQDACQSISPSSEDKFAMVMSSFLETAQPALRALDGLQREAMEELGKALAFFGEDSKATTSEAFFGIFAEFMSKFERALSDLQAGEGLRSSGMVSPLAW

SEQ ID NO: 64818 - protein, 68 aa, Homo sapiens
MTTRQATKDPLLRGVSPTPSKIPVRSQKRTPFPTVTSCAVDQENQDPRQNVISPGAMACTCNHSYSGG

SEQ ID NO: 64819 - protein, 63 aa, Homo sapiens
MDLNSASTVVLQVLTQATSQDTAVLKPAEEQLKQWETQPGFYSVLLNIFTNHTLDINVRWLAV

SEQ ID NO: 64820 - protein, 87 aa, Homo sapiens
  MOD_RES (1)..(1): Any amino acid
XGKTTTVVEIILQAVKQGLKVLCCAPSNIAVDNLVERLALCKQRILRLGHPARLLESIQQHSLDAVLARSDSAQIVADIRKDIDQVF

SEQ ID NO: 64821 - protein, 49 aa, Homo sapiens
MKRSLNENSARSTAGCLPVPLFNQKKRNRQPLTSNPLKDDSDWAWEAVN

SEQ ID NO: 64822 - protein, 216 aa, Homo sapiens
GPLNSWIPPFSGILQQQQQAQIPGLSQFSLSALDQFAGLLPNQIPLTGEASFAQGAQAGQVDPLQLQTPPQTQPGPSHVMPYVFSFKMPQEQGQMFQYYPVYMVLPWEQPQQTVPRSPQQTRQQQYEEQAISGGQQQLAFDPQLGTAPEIAVMSTGEEIPYLQKEAINFRHDSAGVFMPSTSPKPSTTNVFTSAVDQTITPELPEEKDKTDSLREP

SEQ ID NO: 64823 - protein, 235 aa, Homo sapiens
MAEEQEFTQLCKLPAQPSHPHCVNNTYRSAQHSQALLRGLLALRDSGILFDVVLVVEGRHIEAHRILLAASCDYFRGMFAGGLKEMEQEEVLIHGVSYNAMCQILHFIYTSELELSLSNVQETLVAACQLQIPEIIHFCCDFLMSWVDEENILDVYRLAELFDLSRLTEQLDTYILKNFVAFSRTDKYRQLPLEKVYSLLSSNRLEVSCETEVYEGALLYHYSLEQVQADQISLH

SEQ ID NO: 64824 - protein, 127 aa, Homo sapiens
  MOD_RES (1)..(1): Any amino acid
XNVVAARDVPEGMQNLAPNDLPLLAMEYCQGGDLRKYLNQFENCCGLREGAILTLLSDIASALRYLHENRIIHRDLKPENIVLQQGEQRLIHKIIDLGYAKELDQGSLCTSFVGTLQYLAFKSAAEE

SEQ ID NO: 64825 - protein, 49 aa, Homo sapiens
MTPQSLLQTTLFLLSLLFLVQGAHGRGHREDFRFCSQRNQTHRSSLHYK

SEQ ID NO: 64826 - protein, 1486 aa, Homo sapiens
MERSAPRVGVRASGRHHLHLPAILDKMPAPGALILLAAVSASGCLASPAHPDGFALGRAPLAPPYAVVLISCSGLLAFIFLLLTCLCCKRGDVGFKEFENPEGEDCSGEYTPPAEETSSSQSLPDVYILPLAEVSLPMPAPQPSHSDMTTPLGLSRQHLSYLQEIGSGWFGKVILGEIFSDYTPAQVVVKELRASAGPLEQRKFISEAQPYRSLQHPNVLQCLGLCVETLPFLLIMEFCQLGDLKRYLRAQRPPEGLSPELPPRDLRTLQRMGLEIARGLAHLHSHNYVHSDLALRNCLLTSDLTVRIGDYGLAHSNYKEDYYLTPERLWIPLRWAAPELLGELHGTFMVVDQSRESNIWSLGVTLWELFEFGAQPYRHLSDEEVLAFVVRQQHVKLARPRLKLPYADYWYDILQSCWRPPAQRPSASDLQLQLTYLLSERPPRPPPPPPPPRDGPFPWPWPPAHSAPRPGTLSSPFPLLDGFPGADPDDVLTVTESSRGLNLECLWEKARRGAGRGGGAPAWQPASAPPAPHANPSNPFYEALSTPSVLPVISARSPSVSSEYYIRLEEHGSPPEPLFPNDWDPLDPGVPAPQAPQAPSEVPQLVSETWASPLFPAPRPFPAQSSASGSFLLSGWDPEGRGAGETLAGDPAEVLGERGTAPWVEEEEEEEEGSSPGEDSSSLGGGPSRRGPLPCPLCSREGACSCLPLERGDAVAGWGGHPALGCPHPPEDDSSLRAERGSLADLPMAPPASAPPEFLDPLMGAAAPQYPGRGPPPAPPPPPPPPRAPADPAASPDPPSAVASPGSGLSSPGPKPGDSGYETETPFSPEGAFPGGGAAEEEGVPRPRAPPEPPDPGAPRPPPDPGPLPLPGPREKPTFVVQVSTEQLLMSLREDVTRNLLGEKGATARETGPRKAGRGPGNREKVPGLNRDPTVLGNGKQAPSLSLPVNGVTVLENGDQRAPGIEEKAAENGALGSPEREEKVLENGELTPPRREEKALENGELRSPEAGEKVLVNGGLTPPKSEDKVSENGGLRFPRNTERPPETGPWRAPGPWEKTPESWGPAPTIGEPAPETSLERAPAPSAVVSSRNGGETAPGPLGPAPKNGTLEPGTERRAPETGGAPRAPGAGRLDLGSGGRAPVGTGTAPGGGPGSGVDAKAGWVDNTRPQPPPPPLPPPPEAQPRRLEPAPPRARPEVAPEGEPGAPDSRAGGDTALSGDGDPPKPERKGPEMPRLFLDLGPPQGNSEQIKARLSRLSLALPPLTLTPFPGPGPRRPPWEGADAGAAGGEAGGAGAPGPAEEDGEDEDEDEEEDEEAAAPGAAAGPRGPGRARAAPVPVVVSSADADAARPLRGLLKSPRGADEPEDSELERKRKMVSFHGDVTVYLFDQETPTNELSVQAPPEGDTDPSTPPAPPTPPHPATPGDGFPSNDSGFGGSFEWAEDFPLLPPPGPPLCFSRFSVSPALETPGPPARAPDARPAGPVEN

SEQ ID NO: 64827 - protein, 208 aa, Homo sapiens
MALLLCLVCLTAALAHGCLHCHSNFSKKFSFYRHHVNFKSWWVGDIPVSGALLTDWSDDTMKELHLAIPAKITREKLDQVATAVYQMMDQLYQGKMYFPGYFPNELRNIFREQVHLIQNAIIESRIDCQHRCGIFQYETISCNNCTDSHVACFGYNCESSAQWKSAVQGLLNYINNWHNLVSPALRCLEPPHLANLTLEDAAECLKQH

SEQ ID NO: 64828 - protein, 29 aa, Homo sapiens
ASVIAKYPHKIKSGAEAKKLSICCKEVCR

SEQ ID NO: 64829 - protein, 267 aa, Homo sapiens
MSSKYPRSVRRCLPLCALTLEAALILLFYFFTHYDASLEDQKGLVASYQVGQDLTVMAALGLGFLTSNFRRHSWSSVAFNLFMLALGVQWAILLDGFLSQFPPGKVVITLFSIRLATMSAMSVLISAGAVLGKVNLAQLVVMVLVEVTALGTLRMVISNIFNTYVHSAVLAGGVAVGTSCHLIPSPWLAMVLGLVAGLISIGGAKCLPVCCNRVLGIHHISVMHSIFSLLGLLGEITYIVLLVLHTVWNGNGMFAPKSQNMESTSCG

SEQ ID NO: 64830 - protein, 257 aa, Homo sapiens
MAVWLAQWLGPLLLVSLWGLLAPASLLRRLGEHIQQFQESSAQGLGLSLGPGAAALPKVGWLEQLLDPFNVSDRRSFLQIVLHSLGQKCLSFSRAETVAQLRSTEPQLSGVGDRQWLYQTCTEFGFYVTCENPRCPFSQLPALPSQLDLCEQVFGLSALSVAQAVAQTNSYYGGQTPGANKVLFVNGDTDPWHVLSVTQALGSSESTLLIRTGSHCLDMAPERPSDSPSLRLGRQNIFQQLQTWLKLAKESQIKGEV

SEQ ID NO: 64831 - protein, 1089 aa, Homo sapiens
  MOD_RES (1)..(1): Any amino acid
XTSVKRRLSCLRSRVTRQKEKGKSPAHLKDKGQDARERRECVNGHQLLQGTFSGPSSCPLCGKPFLSSASLKEHPRGTLLSDGSPALSRNVGMTVSQKGGPQPTPSPAGPGTQLGPITGEMDEADSAFLKFKQTADDSLSLTSPNTESIFVEDPYTASLRSEIESDGHEFEAESWSLAVDAAYAKKQKREVVKRQDVLYELMQTEVHHVRTLKIMLKVYSRALQEELQFSSKAIGRLFPCADDLLETHSHFLARLKERRQESLEEGSDRNYVIQKIGDLLVQQFSGENGERMKEKYGVFCSGHNEAVSHYKLLLQQNKKFQNLIKKIGNFSIVRRLGVQECILLVTQRITKYPVLVERIIQNTEAGTEDYEDLTQALNLIKDIISQVDAKVSECEKGQRLREIAGKMDLKSSSKLKNGLTFRKEDMLQRQLHLEGMLCWKTTSGRLKDILAILLTDVLLLLQEKDQKYVFASVDSKPPVISLQKLIVREVANEEKAMFLISASLQGPEMYEIYTSSKEDRNAWMAHIQRAVESCPDEEEGPFSLPEEERKVVEARATRLRDFQERLSMKDQLIAQSLLEKQQIYLEMAEMGGLEDLPQPRGLFRGGDPSETLQGELILKSAMSEIEGIQSLICRQLGSANGQAEDGGSSTGPPRRAETFAGYDCTNSPTKNGSFKKKVSSTDPRPRDWRGPPNSPDLKLSDSDIPGSSEESPQVVEAPGTESDPRLPTVLESELVQRIQTLSQLLLNLQAVIAHQDSYVETQRAAIQEREKQFRLQSTRGNLLLEQERQRNFEKQREERAALEKLQSQLRHEQQRWERERQWQHQELERAGARLQEREGEARQLRERLEQERAELERQRQAYQHDLERLREAQRAVERERERLELLRRLKKQNTAPGALPPDTLAEAQPPSHPPSFNGEGLEGPRVSMLPSGVGPEYAERPEVARRDSAPTENRLAKSDVPIQLLSATNQFQRQAAVQQQIPTKLAASTKGGKDKGGKSRGSQRWESSASFDLKQQLLLNKLMGKDESTSRNRRSLSPILPGRHSPAPPPDPGFPAPSPPPADSPSEGFSLKAGGTALLPGPPAPSPLP

SEQ ID NO: 64832 - protein, 116 aa, Homo sapiens
MALPKDAIPSLSECQCGICMEILVEPVTLPCNHTLCKPCFQSTVEKASLCCPFCRRRVSSWTRYHTRRNSLVNVELWTIIQKHYPRECKLRASGQESEEVGGGRATGQRGRRKQSQ

SEQ ID NO: 64833 - protein, 38 aa, Homo sapiens
MKLNPQQAPLYGDCVVTVLLAEEDKAEDDVVFYLVFLG

SEQ ID NO: 64834 - protein, 258 aa, Homo sapiens
MPGCPCPGCGMAGPRLLFLTALALELLERAGGSQPALRSRGTATACRLDNKESESWGALLSGERLDTWICSLLGSLMVGLSGVFPLLVIPLEMGTMLRSEAGAWRLKQLLSFALGGLLGNVFLHLLPEAWAYTCSASPGGEGQSLQQQQQLGLWVIAGILTFLALEKMFLDSKEEGTSQVSGYLNLLANTIDNFTHGLAVAASFLVSKKIGLLTTMAILLHEIPHEVGDFAILLRAGFDRWSAAKLQLSTALGGLLGA

SEQ ID NO: 64835 - protein, 174 aa, Homo sapiens
  MOD_RES (1)..(1): Any amino acid
XTFLSSATTALSMQNNSVFGDLKSDEMELLYSAYGDETGVQCALSLQEFVKDAGSYSKKVVDDLLDQITGGDHSRTLFQLKQRRNVPMKPPDEAKVGDTLGDSSSSVLEFMSMKSYPDVSVDISMLSSLVSFRACHLSRDAVLKSDRNLVSYYHGVCFVNLQISVLKLMLVSCA

SEQ ID NO: 64836 - protein, 50 aa, Homo sapiens
MQRRSRGINTGLILLLSQIFHVGINNIPPVTLATLALNIWFFLNPQKPLY

SEQ ID NO: 64837 - protein, 62 aa, Homo sapiens
MEVVPAEIAKKPRTPTSGPVITKLIFAKPINSKAVTGQTTQVSPPVIAGFFHSLLPELHQRP

SEQ ID NO: 64838 - protein, 116 aa, Homo sapiens
MEAPAQLLFLLLLWLPDTTGEIVMTQSPATLSLSPGERATLSCRASQSVSSSYLSWYQQKPGQAPRLLIYGASTRATGIPARFSGSGSGTDFTLTISSLQPEDFAVYYCQQDYNLP

SEQ ID NO: 64839 - protein, 123 aa, Homo sapiens
MFGAEGVLPGERALGLQRAEMTMTANKNSSITHGAGGTKAPRGTLSRSQSVSPPPVLSPPRSPIYPLSDSETSACRYPSHSSSRVLLKDRHPPAPSPQNPQDPSPDTSPPTCPFKTASFGYLD

SEQ ID NO: 64840 - protein, 325 aa, Homo sapiens
MLRNFIQTEAVVSKPFSLFDLSSVGLFGAETQQSKVAPSSAASRPVLSSRSDQSQKNEVFLDVVERLSVLIASNGSLLKVDVQGEIRLKSFLPSGSEMRIGLTEEFCVGKSELRGYGPGIRVDEVSFHSSVNLDEFESHRILRLQPPQGELTVMRYQLSDDLPSPLPFRLFPSVQWDRGSGRLQVYLKLRCDLLSKSQALNVRLHLPLPRGVVSLSQELSSPEQKAELAEGALRWDLPRVQGGSQLSGLFQMDVPGPPGPPSHGLSTSASPLGLGPASLSFELPRHTCSGLQVRFLRLAFRPCGNANPHKWVRHLSHSDAYVIRI

SEQ ID NO: 64841 - protein, 1453 aa, Homo sapiens
MKSCGVSLATAAAAAAAFGDEEKKMAAGKASGESEEASPSLTAEEREALGGLDSRLFGFVRFHEDGARTKALLGKAVRCYESLILKAEGKVESDFFCQLGHFNLLLEDYPKALSAYQRYYSLQSDYWKNAAFLYGLGLVYFHYNAFQWAIKAFQEVLYVDPSFCRAKEIHLRLGLMFKVNTDYESSLKHFQLALVDCNPCTLSNAEIQFHIAHLYETQRKYHSAKEAYEQLLQTENLSAQVKATVLQQLGWMHHTVDLLGDKATKESYAIQYLQKSLEADPNSGQSWYFLGRCYSSIGKVQDAFISYRQSIDKSEASADTWCSIGVLYQQQNQPMDALQAYICAVQLDHGHAAAWMDLGTLYESCNQPQDAIKCYLNATRSKSCSNTSALAARIKYLQAQLCNLPQGSLQNKTKLLPSIEEAWSLPIPAELTSRQGAMNTAQQACKPHHPNTEPVLGLSQTPISQQSLPLHMIPSSQVDDLSSPAKRKRTSSPTKNTSDNWSGGHAVSHPPVQQQAHSWCLTPQKLQHLEQLRANRNNLNPAQKLMLEQLESQFVLMQQHQMRPTGVAQVRSTGIPNGPTADSSLPTNSVSGQQPQLALTRVPSVSQPGVRPACPGQPLANGPFSAGHVPCSTSRTLGSTDTILIGNNHITGSGSNGNVPYLQRNALTLPHNRTNLTSSAEEPWKNQLSNSTQGLHKGQSSHSAGPNGERPLSSTGPSQHLQAAGSGIQNQNGHPTLPSNSVTQGAALNHLSSHTATSGGQQGITLTKESKPSGNILTVPETSRHTGETPNSTASVEGLPNHVHQMTADAVCSPSHGDSKSPGLLSSDNPQLSALLMGKANNNVGTGTCDKVNNIHPAVHTKTDNSVASSPSSAISTATPSPKSTEQTTTNSVTSLNSPHSGLHTINGEGMEESQSPMKTDLLLVNHKPSPQIIPSMSVSIYPSSAEVLKACRNLGKNGLSNSSILLDKCPPPRPPSSPYPPLPKDKLNPPTPSIYLENKRDAFFPPLHQFCTNPNNPVTVIRGLAGALKLDLGLFSTKTLVEANNEHMVEVRTQLLQPADENWDPTGTKKIWHCESNRSHTTIAKYAQYQASSFQESLREENEKRSHHKDHSDSESTSSDNSGRRRKGPFKTIKFGTNIDLSDDKKWKLQLHELTKLPAFVRVVSAGNLLSHVGHTILGMNTVQLYMKVPGSRTPGHQENNNFCSVNINIGPGDCEWFVVPEGYWGVLNDFCEKNNLNFLMGSWWPNLEDLYEANVPVYRFIQRPGDLVWINAGTVHWVQAIGWCNNIAWNVGPLTACQYKLAVERYEWNKLQSVKSIVPMVHLSWNMARNIKVSDPKLFEMIKYCLLRTLKQCQTLREALIAAGKEIIWHGRTKEEPAHYCSICEVEVFDLLFVTNESNSRKTYIVHCQDCARKTSGNLENFVVLEQYKMEDLMQVYDQFTLAPPLPSASS

SEQ ID NO: 64842 - protein, 2131 aa, Homo sapiens
MPLSPPAQGDPGEPSPCRPPKKHTTFHLWRSKKKQQPAPPDCGVFVPHPLPAPAGEARALDVVDGKYVVRDSQEFPLHCGESQFFHTTSEALGSLLLESGIFKKSRAQPPEDNRRKPVLGKLGTLFTAGRRRNSRNGLESPTRSNAKPLSPKDVVASPKLPERESERSRSQSSQLKQTDTSEEGSPRENPREAEGELPESGGPAAPPDAELSPRWSSSAAAVAVQQCHENDSPQLEPLEAEGEPFPDATTTAKQLHSSPGNSSRQENAETPARSPGEDASPGAGHEQEAFLGVRGAPGSPTQERPAGGLGEAPNGAPSVCAEEGSLGPRNARSQPPKGASDLPGEPPAEGAAHTASSAQADCTARPKGHAHPAKVLTLDIYLSKTEGAQVDEPVVITPRAEDCGDWDDMEKRSSGRRSGRRRGSQKSTDSPGADAELPESAARDDAVFDDEVAPNAASDNASAEKKVKSPRAALDGGVASAASPESKPSPGTKGQLRGESDRSKQPPPASSPTKRKGRSRALEAVPAPPASGPRAPAKESPPKRVPDPSPVTKGTAAESGEEAARAIPRELPVKSSSLLPEIKPEHKRGPLPNHFNGRAEGGRSRELGRAAGAPGASDADGLKPRNHFGVGRSTVTTKVTLPAKPKHVELNLKTPKNLDSLGNEHNPFSQPVHKGNTATKISLFENKRTNSSPRHTDIRGQRNTPASSKTFVGRAKLNLAKKAKEMEQPEKKVMPNSPQNGVLVKETAIETKVTVSEEEILPATRGMNGDSSENQALGPQPNQDDKADVQTDAGCLSEPVASALIPVKDHKLLEKEDSEAADSKSLVLENVTDTAQDIPTTVDTKDLPPTAMPKPQHTFSDSQSPAESSPGPSLSLSAPAPGDVPKDTCVQSPISSFPCTDLKVSENHKGCVLPVSRQNNEKMPLLELGGETTPPLSTERSPEAVGSECPSRVLVQVRSFVLPVESTQDVSSQVIPESSEVREVQLPTCHSNEPEVVSVASCAPPQEEVLGNEHSHCTAELAAKSGPQVIPPASEKTLPIQAQSQGSRTPLMAESSPTNSPSSGNHLATPQRPDQTVTNGQDSPASLLNISAGSDDSVFDSSSDMEKFTEIIKQMDSAVCMPMKRKKARMPNSPAPHFAMPPIHEDHLEKVFDPKVFTFGLGKKKESQPEMSPALHLMQNLDTKSKLRPKRASAEQSVLFKSLHTNTNGNSEPLVMPEINDKENRDVTNGGIKRSRLEKSALFSSLLSSLPQDKIFSPSVTSVNTMTTAFSTSQNGSLSQSSVSQPTTEGAPPCGLNKEQSNLLPDNSLKVFNFNSSSTSHSSLKSPSHMEKYPQKEKTKEDLDSRSNLHLPETKFSELSKLKNDDMEKANHIESVIKSNLPNCANSDTDFMGLFKSSRYDPSISFSGMSLSDTMTLRGSVQNKLNPRPGKVVIYSEPDVSEKCIEVFSDIQDCSSWSLSPVILIKVVRGCWILYEQPNFEGHSIPLEEGELELSGLWGIEDILERHEEAESDKPVVIGSIRHVVQDYRVSHIDLFTEPEGLGILSSYFDDTEEMQGFGVMQKTCSMKVHWGTWLIYEEPGFQGVPFILEPGEYPDLSFWDTEEAYIGSMRPLKMGGRKVEFPTDPKVVVYEKPFFEGKCVELETGMCSFVMEGGETEEATGDDHLPFTSVGSMKVLRGIWVAYEKPGFTGHQYLLEEGEYRDWKAWGGYNGELQSLRPILGDFSNAHMIMYSEKNFGSKGSSIDVLGIVANLKETGYGVKTQSINVLSGVWVAYENPDFTGEQYILDKGFYTSFEDWGGKNCKISSVQPICLDSFTGPRRRNQIHLFSEPQFQGHSQSFEETTSQIDDSFSTKSCRVSGGSWVVYDGENFTGNQYVLEEGHYPCLSAMGCPPGATFKSLRFIDVEFSEPTIILFEREDFKGKKIELNAETVNLRSLGFNTQIRSVQVIGGIWVTYEYGSYRGRQFLLSPAEVPNWYEFSGCRQIGSLRPFVQKRIYFRLRNKATGLFMSTNGNLEDLKLLRIQVMEDVGADDQIWIYQEGCIKCRIAEDCCLTIVGSLVTSGSKLGLALDQNADSQFWSLKSDGRIYSKLKPNLVLDIKGGTQYDQNHIILNTVSKEKFTQVWEAMVLYT

SEQ ID NO: 64843 - protein, 138 aa, Homo sapiens
EDEGNGAQYRGILEASLELFKFTIGMGELAFQEQLHFRGMVLLLLLAYVLLTYILLLNMLIALMSETVNSVATDSWSIWKLQKAISVLEMENGYWWCRKKQRAGVMLTVGTKPDGSPDERWCFRNSREPCPGFPSQGG

SEQ ID NO: 64844 - protein, 111 aa, Homo sapiens
MLIPKPPPKTDILKSLDTMDDPDTVGSIPVFKTEWIMTHEEHHAAKTLGIGKAIAVLTSGGDAQGMNAAVRAVVRVGIFTGARVFFVHEGYQGLVDGGDHIKEATWESVSM

SEQ ID NO: 64845 - protein, 486 aa, Homo sapiens
MPLPVQVFNLQGAVEPMQIDVDPQEDPQNAPDVNYVVENPSLDLEQYAASYSGLMRIERLQFIADHCPTLRVEALKMALSFVQRTFNVDMYEEIHRKLSEATRELQNAPDAIPESGVEPPALDTAWVEATRKKALLKLEKLDTDLKNYKGNSIKESIRRGHDDLGDHYLDCGDLSNALKCYSRARDYCTSAKHVINMCLNVIKVSVYLQNWSHVLSYVSKAESTPEIAERGERDSQTQAILTKLKCAAGLAELAARKYKQAAKCLLLASFDHCDFPELLSPSNVAIYGGLCALATFDRQELQRNVISSSSFKLFLELEPQVRDIIFKFYESKYASCLKMLDEMKDNLLLDMYLAPHVRTLYTQIRNRALIQYFSPYVSADMHRMAAAFNTTVAALEDELTQLILEGLISARVDSHSKILYARDVDQRSTTFEKSLLMGKEFQRRAKAMMLRAAVLRNQIHVKSPPREGSQGELTPANSQSRMSTNM

SEQ ID NO: 64846 - protein, 84 aa, Homo sapiens
MGSGHCLRSTRGSKMVSWSVIAKIQEILQRKMVREFLAEFMSTYVMMREGDDWFGVGEESTCLRGLWKTESGRLCQQKMWAKRR

SEQ ID NO: 64847 - protein, 895 aa, Homo sapiens
MVPWVRTMGQKLKQRLRLDVGREICRQYPLFCFLLLCLSAASLLLNRYIHILMIFWSFVAGVVTFYCSLGPDSLLPNIFFTIKYKPKLGLQELFPQGHSCAVCGKVKCKRHRPSLLLENYQPWLDLKISSKVDASLSEVLELVLENFVYPWYRDVTDDESFVDELRITLRFFASVLIRRIHKVDIPSIITKKLLKAAMKHIEVIVKARQKVKNTEFLQQAALEEYGPELHVALRSRRDELHYLRKLTELLFPYILPPKATDCRSLTLLIREILSGSVFLPSLDFLADPDTVNHLLIIFIDDSPPEKATEPASPLVPFLQKFAEPRNKKPSVLKLELKQIREQQDLLFRFMNFLKQEGAVHVLQFCLTVEEFNDRILRPELSNDEMLSLHEELQKIYKTYCLDESIDKIRFDPFIVEEIQRIAEGPYIDVVKLQTMRCLFEAYEHVLSLLENVFTPMFCHSDEYFRQLLRGAESPTRNSKLNRGSLSLDDFRNTQKRGESFGISRIGSKIKGVFKSTTMEGAMLPNYGVAEGEDDFIEEGIVVMEDDSPVEAVSTPNTPRNLAAWKISIPYVDFFEDPSSERKEKKERIPVFCIDVERNDRRAVGHEPEHWSVYRRYLEFYVLESKLTEFHGAFPDAQLPSKRIIGPKNYEFLKSKREEFQEYLQKLLQHPELSNSQLLADFLSPNGGETQFLDKILPDVNLGKIIKSVPGKLMKEKGQHLEPFIMNFINSCESPKPKPSRPELTILSPTSENNKKLFNDLFKNNANRAENTERKQNQNYFMEVMTVEGVYDYLMYVGRVVFQVPDWLHHLLMGTRILFKNTLEMYTDYYLQCKLEQLFQEHRLVSLITLLRDAIFCENTEPRSLQDKQKGAKQTFEEMMNYIPAFLRVCIMPCAL

SEQ ID NO: 64848 - protein, 94 aa, Homo sapiens
MAKERGLISPSDFAQLQKYMESSSVALSSVLLRCAHDWKWEEWEMGRCQKKIRIYHSLTGLHCARSRLSTHLRYTWTACSSSQRRGVKSDSTKK

SEQ ID NO: 64849 - protein, 55 aa, Homo sapiens
MSNKDRHIDSSCSSFIKTEPSSPASLTDSVNHHSPGGSSDASGSYSSTMNGHQNG

SEQ ID NO: 64850 - protein, 77 aa, Homo sapiens
MITGVFSMRLWTPVGVLTSLAYCLHQRRVALAELQEADGQCPVDRSLLKLKMVQVVFRHGARSPLKPLPLEEQYSFH

SEQ ID NO: 64851 - protein, 136 aa, Homo sapiens
MAEPSAATQSHSISSSSFGAEPSAPGGGGSPGACPALGTKSCSSSCADSFVSSSSSQPVSLFSTSQASFPEHPAFLSKKIGQVEEQIDKETKNPNGVSSREAKTALDADDRFTLLTAQKPPTEYSKVEGIYTYSLS

SEQ ID NO: 64852 - protein, 1433 aa, Homo sapiens
MYQPEDDNNSDVTSDDDMTRNRRESSPPHSVHSFSGDRDWDRRGRSRDMEPRDRWSHTRNPRSRMPPRDLSLPVVAKTSFEMDREDDRDSRAYESRSQDAESYQNVVDLAEDRKPHNTIQDNMENYRKLLSLGLKTMPEAKKSTHRRGICEDESSHGVIMEKFIKDVSRSSKSGRARESSDRSQRFPRMSDDNWKDISLNKRESVIQQRVYEGNAFRGGFRFNSTLVSRKRVLERKRRYHFDTDGKGSIHDQKGCPRKKPFECGSEMRKAMSVSSLSSLSSPSFTESQPIDFGAMPYVCDECGRSFSVISEFVEHQIMHTRENLYEYGESFIHSVAVSEVQKSQVGGKRFECKDCGETFNKSAALAEHRKIHARGYLVECKNQECEEAFMPSPTFSELQKIYGKDKFYECRVCKETFLHSSALIEHQKIHFGDDKDNEREHERERERERGETFRPSPALNEFQKMYGKEKMYECKVCGETFLHSSSLKEHQKIHTRGNPFENKGKVCEETFIPGQSLKRRQKTYNKEKLCDFTDGRDAFMQSSELSEHQKIHSRKNLFEGRGYEKSVIHSGPFTESQKSHTITRPLESDEDEKAFTISSNPYENQKIPTKENVYEAKSYERSVIHSLASVEAQKSHSVAGPSKPKVMAESTIQSFDAINHQRVRAGGNTSEGREYSRSVIHSLVASKPPRSHNGNELVESNEKGESSIYISDLNDKRQKIPARENPCEGGSKNRNYEDSVIQSVFRAKPQKSVPGEGSGEFKKDGEFSVPSSNVREYQKARAKKKYIEHRSNETSVIHSLPFGEQTFRPRGMLYECQECGECFAHSSDLTEHQKIHDREKPSGSRNYEWSVIRSLAPTDPQTSYAQEQYAKEQARNKCKDFRQFFATSEDLNTNQKIYDQEKSHGEESQGENTDGEETHSEETHGQETIEDPVIQGSDMEDPQKDDPDDKIYECEDCGLGFVDLTDLTDHQKVHSRKCLVDSREYTHSVIHTHSISEYQRDYTGEQLYECPKCGESFIHSSFLFEHQRIHEQDQLYSMKGCDDGFIALLPMKPRRNRAAERNPALAGSAIRCLLCGQGFIHSSALNEHMRLHREDDLLEQSQMAEEAIIPGLALTEFQRSQTEERLFECAVCGESFVNPAELADHVTVHKNEPYEYGSSYTHTSFLTEPLKGAIPFYECKDCGKSFIHSTVLTKHKELHLEEEEEDEAAAAAAAAAQEVEANVHVPQVVLRIQGLNVEAAEPEVEAAEPEVEAAEPEVEAAEPNGEAEGPDGEAAEPIGEAGQPNGEAEQPNGDADEPDGAGIEDPEERAEEPEGKAEEPEGDADEPDGVGIEDPEEGEDQEIQVEEPYYDCHECTETFTSSTAFSEHLKTHASMIIFEPANAFGECSGYIERASTSTGGANQADEKYFKCDVCGQLFNDRLSLARHQNTHTG

SEQ ID NO: 64853 - protein, 218 aa, Homo sapiens
MAAKVFESIGKFGLALAVAGGVVNSALYNDLQNVNITLRILFRPVASQLPRIFTSIGEDYDERVLPSITTEILKSVVARFDAGELITQRELVSRQVSDDLTERAATFGLILDDVSLTHLTFGKEFTEAVEAKQVAQQEAERARFVVEKAEQQKKAAIISAEGDSKAAELIANSLATAGDGLIELRKLEAAEDIAYQLSRSRNITYLPAGQSVLLQLPQ

SEQ ID NO: 64854 - protein, 116 aa, Homo sapiens
MGFERDSEGDSLGARPGLPYGLSDDESGGGRALSAESEVEEPARGPGEARGERPGPACQLCGGPTGEGPCCGAGGPGGGPLLPPRLLYSCRLCTFVSHYSSHLKRHMQTHSGEKPF

SEQ ID NO: 64855 - protein, 520 aa, Homo sapiens
MFGASRKKFVEGVDSDYHDENMYYSQSSMFPHRSEKDMLASPSTSGQLSQFGASLYGQQSALGLPMRGMSNNTPQLNRSLSQGTQLPSHVTPTTGVPTMSLHTPPSPSRGILPMNPRNMMNHSQVGQGIGIPSRTNSMSSSGLGSPNRSSPSIICMPKQQPSRQPFTVNSMSGFGMNRNQAFGMNNSLSSNIFNGTDGSENVTGLDLSDFPALADRNRREGSGNPTPLINPLAGRAPYVGMVTKPANEQSQDFSIHNEDFPALPGSSYKDPTSSNDDSKSNLNTSGKTTSSTDGPKFPGDKSSTTQNNNQQKKGIQVLPDGRVTNIPQGMVTDQFGMIGLLTFIRAAETDPGMVHLALGSDLTTLGLNLNSPENLYPKFASPWASSPCRPQDIDFHVPSEYLTNIHIRDKLAAIKLGRYGEDLLFYLYYMNGGDVLQLLAAVELFNRDWRYHKEERVWITRAPGMEPTMKTNTYERGTYYFFDCLNWRKVAKEFHLEYDKLEERPHLPSTFNYNPAQQAF

SEQ ID NO: 64856 - protein, 1284 aa, Homo sapiens
MSYAPFRDVRGPSMHRTQYVHSPYDRPGWNPRFCIISGNQLLMLDEDEIHPLLIRDRRSESSRNKLLRRTVSVPVEGRPHGEHEYHLGRSRRKSVPGGKQYSMEGAPAAPFRPSQGFLSRRLKSSIKRTKSQPKLDRTSSFRQILPRFRSADHDRARLMQSFKESHSHESLLSPSSAAEALELNLDEDSIIKPVHSSILGQEFCFEVTTSSGTKCFACRSAAERDKWIENLQRAVKPNKDNSRRVDNVLKLWIIEARELPPKKRYYCELCLDDMLYARTTSKPRSASGDTVFWGEHFEFNNLPAVRALRLHLYRDSDKKRKKDKAGYVGLVTVPVATLAGRHFTEQWYPVTLPTGSGGSGGMGSGGGGGSGGGSGGKGKGGCPAVRLKARYQTMSILPMELYKEFAEYVTNHYRMLCAVLEPALNVKGKEEVASALVHILQSTGKAKDFLSDMAMSEVDRFMEREHLIFRENTLATKAIEEYMRLIGQKYLKDAIGEFIRALYESEENCEVDPIKCTASSLAEHQANLRMCCELALCKVVNSHCVFPRELKEVFASWRLRCAERGREDIADRLISASLFLRFLCPAIMSPSLFGLMQEYPDEQTSRTLTLIAKVIQNLANFSKFTSKEDFLGFMNEFLELEWGSMQQFLYEISNLDTLTNSSSFEGYIDLGRELSTLHALLWEVLPQLSKEALLKLGPLPRLLNDISTALRNPNIQRQPSRQSERPRPQPVVLRGPSAEMQGYMMRDLNSSIDLQSFMARGLNSSMDMARLPSPTKEKPPPPPPGGGKDLFYVSRPPLARSSPAYCTSSSDITEPEQKMLSVNKSVSMLDLQGDGPGGRLNSSSVSNLAAVGDLLHSSQASLTAALGLRPAPAGRLSQGSGSSITAAGMRLSQMGVTTDGVPAQQLRIPLSFQNPLFHMAADGPGPPGGHGGGGGHGPPSSHHHHHHHHHHRGGEPPGDTFAPFHGYSKSEDLSSGVPKPPAASILHSHSYSDEFGPSGTDFTRRQLSLQDNLQHMLSPPQITIGPQRPAPSGPGGGSGGGSGGGGGGQPPPLQRGKSQQLTVSAAQKPRPSSGNLLQSPEPSYGPARPRQQSLSKEGSIGGSGGSGGGGGGGLKPSITKQHSQTPSTLNPTMPASERTVAWVSNMPHLSADIESAHIEREEYKLKEYSKSMDESRLDRVKEYEEEIHSLKERLHMSNRKLEEYERRLLSQEEQTSKILMQYQARLEQSEKRLRQQQAEKDSQIKSIIGRLMLVEEELRRDHPAMAEPLPEPKKRLLDAQLLIR

SEQ ID NO: 64857 - protein, 105 aa, Homo sapiens
GMVMVSPEMNPTICSVFEAEIVLLFHATTFRRGFQVTVHVGNVRQTAVVEKIHAKDKLRTGEKAVVRFRFLKHPEYLKVQSSSIVTKYCGLFSVVQVSRILRPFT

SEQ ID NO: 64858 - protein, 129 aa, Homo sapiens
MIFWSFVAGVVTFYCSLGPDSLLPNIFFTIKYKPKQLGLQELFPQGHSCAVCGKVKCKRHRPSLLLENYQPWLDLKISSKVDASLSEVLELVLENFVYPWYSKKYRVFTASCFRRIWSRASCCFEKSKR

SEQ ID NO: 64859 - protein, 175 aa, Homo sapiens
  MOD_RES (1)..(1): Any amino acid
XLGSRDSALLWQLLVLLCRQNGSMVGSDIAELLMQDCKKLEKYKRQPPVANLINLTDEDWPVLSSGTPNLLTGEIPPSVETPAQIVEKFTRLLYYGRKKCCGEKQWGDWRPHLAVILSNQAGDPELYQRAIVAIGDTLAGKGLVEAAHFCYLMAHVPFGHYTVKTDHLVLLGSSH

SEQ ID NO: 64860 - protein, 132 aa, Homo sapiens
MSKCRKTPVQQLASPASFSPDILADIFELFAKNFSYGKPLNNEWQLPDPSEIFTCDHTELNAFLDLKNSLNEVKNLLSDKKLDEWHEHTAFTNKAGKIISHVRKSVNAELCTQAWCKFHEILCSFPLIPQEA

SEQ ID NO: 64861 - protein, 123 aa, Homo sapiens
MQEMSDMSLTMAPQSLPSSRMAPLGMLLGLLMAACFTFCLSHQNLKEFALTNPEKSSTKETERKETKAEEELDAEVLEVFHPTHEWQALQPGQAVPAGSHVRLNLQTGEREAKLQYEDKFRNN

SEQ ID NO: 64862 - protein, 2383 aa, Homo sapiens
MGNVCGCVRAEKEEQYVDPAKTPLNPEKYSPGRKYFRRKPIKKTGGDKESVGANNENEGKKKSSSQPSKEQPAPLSRGLVQQESVTLNSALGDGIQQKKTEVVADSVKQKLLPSAVSSWSDCVNTSPAKDSETEVKVSELDERISEKDSTPYCAKRKKHLDDVNTSEITFQEKTDVFSFRKAASLSSIPSGIERSLEKSGFPEDPPKSYSSIQEKQNTERFCPHATQHFQFKKKRCHSLYTSMSSVSKDTDGNEISDIHVTGESEDMSAKERLLLWTQQATEGYAGIRCENFTTCWRDGKLFNAIIHKYRPDLIDMNTVAVQSNLANLEHAFYVAEKIGVIRLLDPEDVDVSSPDEKSVITYVSSLYDAFPKVPEGGEGIGANDVEVKWIEYQNMVNYLIQWIRHHVTTMSERTFPNNPVELKALYNQYLQFKETEIPPKETEKSKIKRLYKLLEIWIEFGRIKLLQGYHPNDIEKEWGKLIIAMLEREKALRPEVERLEMLQQIANRVQRDSVICEDKLILAGNALQSDSKRLESGVQFQNEAEIAGYILECENLLRQHVIDVQILIDGKYYQADQLVQRVAKLRDEIMALRNECSSVYSKGRILTTEQTKLMISGITQSLNSGFAQTLHPSLTSGLTQSLTPSLTSSSMTSGLSSGMTSRLTPSVTPAYTPGFPSGLVPNFSSGVEPNSLQTLKLMQIRKPLLKSSLLDQNLTEEEINMKFVQDLLNWVDEMQVQLDRTEWGSDLPSVESHLENHKNVHRAIEEFESSLKEAKISEIQMTAPLKLTYAEKLHRLESQYAKLLNTSRNQERHLDTLHNFVSRATNELIWLNEKEEEEVAYDWSERNTNIARKKDYHAELMRELDQKEENIKSVQEIAEQLLLENHPARLTIEAYRAAMQTQWSWILQLCQCVEQHIKENTAYFEFFNDAKEATDYLRNLKDAIQRKYSCDRSSSIHKLEDLVQESMEEKEELLQYKSTIANLMGKAKTIIQLKPRNSDCPLKTSIPIKAICDYRQIEITIYKDDECVLANNSHRAKWKVISPTGNEAMVPSVCFTVPPPNKEAVDLANRIEQQYQNVLTLWHESHINMKSVVSWHYLINEIDRIRASNVASIKTMLPGEHQQVLSNLQSRFEDFLEDSQESQVFSGSDITQLEKEVNVCKQYYQELLKSAEREEQEESVYNLYISEVRNIRLRLENCEDRLIRQIRTPLERDDLHESVFRITEQEKLKKELERLKDDLGTITNKCEEFFSQAAASSSVPTLRSELNVVLQNMNQVYSMSSTYIDKLKTVNLVLKNTQAAEALVKLYETKLCEEEAVIADKNNIENLISTLKQWRSEVDEKRQVFHALEDELQKAKAISDEMFKTYKERDLDFDWHKEKADQLVERWQNVHVQIDNRLRDLEGIGKSLKYYRDTYHPLDDWIQQVETTQRKIQENQPENSKTLATQLNQQKMLVSEIEMKQSKMDECQKYAEQYSATVKDYELQTMTYRAMVDSQQKSPVKRRRMQSSADLIIQEFMDLRTRYTALVTLMTQYIKFAGDSLKRLEEEEKSLEEEKKEHVEKAKELQKWVSNISKTLKDAEKAGKPPFSKQKISSEEISTKKEQLSEALQTIQLFLAKHGDKMTDEERNELEKQVKTLQESYNLLFSESLKQLQESQTSGDVKVEEKIVAERQQEYKEKLQGICDLLTQTENRLIGHQEAFMIGDGTVELKKYQSKQEELQKDMQGSAQALAEVVKNTENFLKENGEKLSQEDKALIEQKLNEAKIKCEQLNLKAEQSKKELDKVVTTAIKEETEKVAAVKQLEESKTKIENLLDWLSNVDKDSERAGTKHKQVIEQNGTHFQEGDGKSAIGEEDEVNGNLLETDVDGQVGTTQENLNQQYQKVKAQHEKIISQHQAVIIATQSAQVLLEKQGQYLSPEEKEKLQKNMKELKVHYETALAESEKKMKLTHSLQEELEKFDADYTEFEHWLQQSEQELENLEAGADDINGLMTKLKRQKSFSEDVISHKGDLRYITISGNRVLEAAKSCSKRDGGKVDTSATHREVQRKLDHATDRFRSLYSKCNVLGNNLKDLVDKYQHYEDASCGLLAGLQACEATASKHLSEPIAVDPKNLQRQLEETKALQGQISSQQVAVEKLKKTAEVLLDARGSLLPAKNDIQKTLDDIVGRYEDLSKSVNERNEKLQITLTRSLSVQDGLDEMLDWMGNVESSLKEQGQVPLNSTALQDIISKNIMLEQDIAGRQSSINAMNEKVKKFMETTDPSTASSLQAKMKDLSARFSEASHKHKETLAKMEELKTKVELFENLSEKLQTFLETKTQALTEVDVPGKDVTELSQYMQESTSEFLEHKKHLEVLHSLLKEISSHGLPSDKALVLEKTNNLSKKF

SEQ ID NO: 64863 - protein, 35 aa, Homo sapiens
MLLAVLLLLGCCGGQPAGSRGVGLVNASALFLLLL

SEQ ID NO: 64864 - protein, 119 aa, Homo sapiens
  MOD_RES (1)..(1): Any amino acid
XGPRISPYVLQLLLATLQAALPLAGLAGRVGTARGAPLPSYLLLASVLESLAGACGLWLLVVERSQARQRLAMGIWIKFRHSPGLLLLWTVAFAAENLALVSWNSPQWWWARADLGQQP

SEQ ID NO: 64865 - protein, 310 aa, Homo sapiens
MATESTPSEIIERERKKLLEILQHDPDSILDTLTSRRLISEEEYETLENVTDLLKKSRKLLILVQKKGEATCQHFLKCLFSTFPQSAAICGLRHEVLKHENTVPPQSMGASSNSEDAFSPGIKQPEAPEITVFFSEKEHLDLETSEFFRDKKTSYRETALSARKNEKEYDTPEVTLSYSVEKVGCEVPATITYIKDGQRYEELDDSLYLGKEEYLGSVDTPEDAEATVEEEVYDDPEHVGYDGEEDFENSETTEFSGEEPSYEGSETSLSLEEEQEKSIEGWSRTHGLKRSSHVGLPKCWDYRREPPCLA

SEQ ID NO: 64866 - protein, 47 aa, Homo sapiens
MALDPAGTGAGSGVCRGASPRVSRRGPCGLDADLGKTSISDMSKKMF

SEQ ID NO: 64867 - protein, 254 aa, Homo sapiens
MDADKEKDLQKFLKNVDEISNLIQEMNSDDPVVQQKAVLETEKRLLLMEEDQEEDECRTTLNKTMISPPQTAMKSAEEINSEAFLASVEKDAKERAKRRRENKVLADALKEKGNEAFAEGNYETAILRYSEGLEKLKDMKVLYTNRAQSRECYKKILEINPKLQTQVKGYLNQVDLQEKADLQEKEAHELLDSGKNTAVTTKNLLETLSKPDQIPLFYAGGIEILTEMINECTEQTLFRMHNGFSIISDNEVIR

SEQ ID NO: 64868 - protein, 221 aa, Homo sapiens
MDLLKQEAEHGALKVLYLSKYVLNMMALLCAPVRDEAVQKLENITDPVWLLRGIFQVLGRMKMDMVNYTIQSLQPHLQEHSIQYERAKFQELLNKQPSLLNHTTKWLTQAAGDLTMSPPTCPDTSDSSSVAGPSPNEAANNPEPLSPTMVLCQGFLNLLLWDLENEEFPETLLMDRTRLQELKSQLHQLTVMASVLLVASSFSGSVLFGSPQFVDKLKRIT

SEQ ID NO: 64869 - protein, 100 aa, Homo sapiens
MWCIVLFSLLAWVYAEPTMYGEILSPNYPQAYPSEVEKSWDIEVPEGYGIHLYFTHLDIELSENCAYDSVQIISGDTEEGRLCGQRSSNNPHSPIVEEFQ

SEQ ID NO: 64870 - protein, 279 aa, Homo sapiens
MEEKQILCVGLVVLDVISLVDKYPKEDSEIRCLSQRWQRGGNASNSCTVLSLLGAPCAFMGSMAPGHVADFVLDDLRRYSVDLRYTVFQTTGSVPIATVIINEASGSRTILYYDSFLVADFRRRGVDVSQVAWQSKGDTPSSCCIINNSNGNRTIVLHDTSLPDVSATDFEKVDLTQFKWIHIEGRNASEQVKMLQRIDAHNTRQPPEQKIRVSVEVEKPREELFQLFGYGDVVFVSKDVAKHLGFQSAEEALRGLYGRVRKGAVLVCAWAEEGADALG

SEQ ID NO: 64871 - protein, 681 aa, Homo sapiens
MGFSSELCSPQGHGVLQQMQEAELRLLEGMRKWMAQRVKSDREYAGLLHHMSLQDSGGQSRAISPDSPISQTHSQDIEKLKSQYRALARDSAQAKRKYQEASKDKDRDKAKDKYVRSLWKLFAHHNRYVLGVRAAQLHHQHHHQLLLPGLLRSLQDLHEEMACILKEILQEYLEISSLVQDEVVAIHREMAAAAARIQPEAEYQGFLRQYGSAPDVPPCVTFDESLLEEGEPLEPGELQLNELTVESVQHTLTSVTDELAVATEMVFRRQEMVTQLQQELRNEEENTHPRERVQLLGKRQVLQEALQGLQVALCSQAKLQAQQELLQTKLEHLGPGEPPPVLLLQDDRHSTSSSEQEREGGRTPTLEILKSHISGIFRPKFSNLYRLEGEGFPSIPLLIDHLLSTQQPLTKKSGVVLHRAVPKDKWVLNHEDLVLGEQIGRGNFGEVFSGRLRADNTLVAVKSCRETLPPDLKAKFLQEARSSPSTSSWSLCRGSSPPAGGDFLTFLRTEGARLRVKTLLQMVGDAAAGMEYLESKCCIHRDLAARNCLVTEKNVLKISDFGMSREEADGVYAASGGLRQVPVKWTAPEALNYGRYSSESDVWSFGILLWETFSLGASPYPNLSNQQTREFVEKGGRLPCPELCPDAVFRLMEQCWAYEPGQRPSFSTIYQELQSIRKRHR

SEQ ID NO: 64872 - protein, 38 aa, Homo sapiens
MGRKKIQITRIMDERNRQVTFTKRKFGLMKKAYELSVL

SEQ ID NO: 64873 - protein, 93 aa, Homo sapiens
MQIFVKTLTGKTITLEVEPSDTIENVKAKIQDKEGIPPDQQRLIFAGKQLEDGRTLSDYNIQKESTLHLVLRLRGGMQIFVKTLTGKTITLEV

SEQ ID NO: 64874 - protein, 118 aa, Homo sapiens
MLRRALLCLAVAALVRADAPEEEDHVLVLRKSNFAEALAAHKYLLVEFYAPWCGHCKALAPEYAKAAGKLKAEGSEIRLAKVDATEESDLAQQYGVRGYPTIKFFRNGDTASPKEYTV

SEQ ID NO: 64875 - protein, 75 aa, Homo sapiens
MMEAIKKKMQMLKLDKENALDRAEQAEAEQKQAEERSKQLEDELAAMQKKLKGTEDELDKYSEALKDAQEKLELA

SEQ ID NO: 64876 - protein, 185 aa, Homo sapiens
MEEPEEPADSGQSLVPVYIYSPEYVSMCDSLAKIPKRASMVHSLIEAYALHKQMRIVKPKVASMEEMATFHTDAYLQHLQKVSQEGDDDHPDSIEYGLGYDCPATEGIFDYAAAIGGATITAAQCLIDGMCKVAINWSGGWHHAKKDEASGFCYLNDAVLGILRLRRKFERILYVDLDLHHGDVY

SEQ ID NO: 64877 - protein, 56 aa, Homo sapiens
MRSLPVRSHEAEGIAVCCTQGTPAPQPLSSWDYPVVLENHVVTDEDEPALKRQRLE

SEQ ID NO: 64878 - protein, 112 aa, Homo sapiens
MNRLRNAKIYVERAVKQKKIFTIQGCYPVIRCLLRRRGWVEKKMVHRSGPTLLPPQKDLDSSAMGDSDTTEDEDEDEDEEFQPSQLFDFDDLLKFDDLDGTHALMSRMVQNE

SEQ ID NO: 64879 - protein, 1892 aa, Homo sapiens
MVDKNIYIIQGEINIVVGAIKRNARWSTHTPLDEERDPLLHSFGHLKEVLNSITELSEIEPNVFLRPFLEVIRSEDTTGPITGLALTSVNKFLSYALIDPTHEGTAEGMENMADAVTHARFVGTDPASDEVVLMKILQVLRTLLLTPVGAHLTNESVCEIMQSCFRICFEMRLSELLRKSAEHTLVDMVQLLFTRLPQFKEEPKNYVGTNMKKISPCLLNKLELSSGEQTKALNQLERVLLFKNLKLKMRAGGMSDSSKWKKQKRSPRPPRHMTKVTPGSELPTPNGTTLSSNLTGGMPFIDVPTPISSASSEAASAVVSPSTDSGLEFSSQTTSKEDLTDLEQPGSPGYSTATEPGSSELGVPEQPDLQEGTHVEKSQSASVESIPEVLEECTSPADHSDSASVHDMDYVNPRGVRFTQSSQKEGTALVPYGLPCIRELFRFLISLTNPHDRHNSEVMIHMGLHLLTVALESAPVAQCQTLLGLIKDEMCRHLFQLLSIERLNLYAASLRVCFLLFESMREHLKFQMEMYIKKLMEIITVENPKMPYEMKEMALEAIVQLWRIPSFVTELYINYDCDYYCSNLFEELTKLLSKNAFPVSGQLYTTHLLSLDALLTVIDSTEAHCQAKVLNSLTQQEKKETARPSCEIVDGTREASNTERTASDGKAVGMASDIPGLHLPGGGRLPPEHGKSGCSDLEEAVDSGADKKFARKPPRFSCLLPDPRELIEIKNKKKLLITGTEQFNQKPKKGIQFLQEKGLLTIPMDNTEVAQWLRENPRLDKKMIGEFVSDRKNIDLLESFVSTFSFQGLRLDEALRLYLEAFRLPGEAPVIQRLLEAFTERWMNCNGSPFANSDACFSLAYAVIMLNTDQHNHNVRKQNAPMTLEEFRKNLKGVNGGKDFEQDILEDMYHAIKNEEIVMPEEQTGLVRENYVWNVLLHRGATPEGIFLRVPTASYDLDLFTMTWGPTIAALSYVFDKSLEETIIQKAISGFRKCAMISAHYGLSDVFDNLIISLCKFTALSSESIENLPSVFGSNPKAHIAAKTVFHLAHRHGDILREGWKNIMEAMLQLFRAQLLPKAMIEVEDFVDPNGKISLQREETPSNRGESTVLSFVSWLTLSGPEQSSVRGPSTENQEAKRVALECIKQCDPEKMITESKFLQLESLQELMKALVSVTPDEETYDEEDAAFCLEMLLRIVLENRDRVGCVWQTVRDHLYHLCVQAQDFCFLVERAVVGLLRLAIRLLRREEISAQVLLSLRILLLMKPSVLSRVSHQVAYGLHELLKTNAANIHSGDDWATLFTLLECIGSGVKPPAALQATARADAPDAGAQSDSELPSYHQNDVSLDRGYTSDSEVYTDHGRPGKIHRSATDADVVNSGWLVVGKDDVDNSKPGPSRPGPSPLINQYSLTVGLDLGPHDTKSLLKCVESLSFIVRDAAHITPDNFELCVKTLRIFVEASLNGGCKSQEKRGKSHKYDSKGNRFKKKSKEGSMLRRPRTSSQHASRGGQSDDDEDEGVPASYHTVSLQVSQDLLDLMHTLHTRAASIYSSWAEEQRHLETGGQKIEADSRTLWAHCWCPLLQGIACLCCDARRQVRMQALTYLQRALLVHDLQKLDALEWESCFNKVLFPLLTKLLENISPADVGGMEETRMRASTLLSKVFLQHLSPLLSLSTFAALWLTILDFMDKYMHAGSSDLLSEAIPESLKNMLLVMDTAEIFHSADARGGGPSALWEITWERIDCFLPHLRDELFKQTVIQDPMPMEPQGQKPLASAHLTSAAGDTRTPGHPPPPEIPSELGACDFEKPESPRAASSSSPGSPVASSPSRLSPTPDGPPPLAQPPLILQPLASPLQVGVPPMTLPIILNPALIEATSPVPLLATPRPTDPIPTSEVN

SEQ ID NO: 64880 - protein, 227 aa, Homo sapiens
MAGITTIEAVKRKIQVLQQQADDAEERAERLQREVEGERRAREQAEAEVASLNRRIQLVEEELDRAQERLATALQKLEEAEKAADESERGMKVIENRALKDEEKMELQEIQLKEAKHIAEEADRKYEEVARKLVIIEGDLERTEERAELAESRCREMDEQIRLMDQNLKCLSAAEEKAETRAEFAERSVAKLEKTIDDLEDKLKCTKEEHLCTQRMLDQTLLDLNEM

SEQ ID NO: 64881 - protein, 51 aa, Homo sapiens
MAAAYLDPNLNHTPNSSTKTHLGTGMERSPGAMERVLKVFHYFESNSEPTT

SEQ ID NO: 64882 - protein, 179 aa, Homo sapiens
MLACLPGPGDLSFQLLSHTQMNTGLQKWDTTQKMRTAHYPTPAELDAYAKKVANNPLTIKIFPNSVKVPQRKHVRRTVNGLDTSAQRYSPYPTQAATKAGLLAIVKVPAKSILKDFDGTRARLLPEAIMNPPVAPYATVAPSTLAHPQAQALARQQALQHAQTLAHAPPQTLQHPQGIP

SEQ ID NO: 64883 - protein, 330 aa, Homo sapiens
MIPVSLVVVVVGGWTVVYLTDLVLKSSVYFKHSYEDWLENNGLSISPFHIRWQTAVFNRAFYSWGRRKARMLYQWFNFGMVFGVIAMFSSFFLLGKTLMQTLAQMMADSPSSYSSSSSSSSSSSSSSSSSSSSSSSLHNEQVLQVVVPGINLPVNQLTYFFTAVLISGVVHEIGHGIAAIREQVRFNGFGIFLFIIYPGAFVDLFTTHLQLISPVQQLRIFCAGIWHNFVLALLGILALVLLPVILLPFYYTGVGVLITEVAEDSPAIGPRGLFVGDLVTHLQDCPVTNVQDWNECLDTIAYEPQIGYCISASTLQQLSFPVRGVYISSI

SEQ ID NO: 64884 - protein, 23 aa, Homo sapiens
MSTEKVDQKEEAGEKEVCGDQIK

SEQ ID NO: 64885 - protein, 1606 aa, Homo sapiens
MYSAHRPLMPASSAASRGLGMFVWTNVEPRSVAVFPWHSLVPFLAPSQPDPSVQPSEAQQPASHPVASNQSKEPAESAAVAHERPPGGTGSADPERPPGATCPESPGPGPPHPLGVVESGKGPPPTTEEEASGPPGEPRLDSETESDHDDAFLSIMSPEIQLPLPPGKRRTQSLSALPKERDSSSEKDGRSPNKREKDHIRRPMNAFMIFSKRHRALVHQRHPNQDNRTVSKILGEWWYALGPKEKQKYHDLAFQVKEAHFKAHPDWKWCNKDRKKSSSEAKPTSLGLAGGHKETRERSMSETGTAAAPGVSSELLSVAAQTLLSSDTKAPGSSSCGAERLHTVGGPGSARPRAFSHSGVHSLDGGEVDSQALQELTQMVSGPASYSGPKPSTQYGAPGPFAAPGEGGALAATGRPPLLPTRASRSQRAASEDMTSDEERMVICEEEGDDDVIADDGFGTTDIDLKCKERVTDSESGDSSGEDPEGNKGFGRKVFSPVIRSSFTHCRPPLDPEPPGPPDPPVAFGKGYGSAPSSSASSPASSSASAATSFSLGSGTFKAQESGQGSTAGPLRPPPPGAGGPATPSKATRFLPMDPATFRRKRPESVGGLEPPGPSVIAAPPSGGGNILQTLVLPPNKEEQEGGGARVPSAPAPSLAYGAPAAPLSRPAATMVTNVVRPVSSTPVPIASKPFPTSGRAEASPNDTAGARTEMGTGSRVPGGSPLGVSLVYSDKKSAAATSPAPHLVAGPLLGTVGKAPATVTNLLVGTPGYGAPAPPAVQFIAQGAPGGGTTAGSGAGAGSGPNGPVPLGILQPGALGKAGGITQVQYILPTLPQQLQVAPAPAPAPGTKAAAPSGPAPTTSIRFTLPPGTSTNGKVLAATAPTPGIPILQSVPSAPPPKAQSVSPVQAPPPGGSAQLLPGKVLVPLAAPSMSVRGGGAGQPLPLVSPPFSVPVQNGAQPPSKIIQLTPVPVSTPSGLVPPLSPATLPGPTSQPQKVLLPSSTRITYVQSAGGHALPLGTSPASSQAGTVTSYGPTSSVALGFTSLGPSGPAFVQPLLSGQAPLLAPGQVGVSPVPSPQLPPACAAPGGPVITAFYSGSPAPTSSAPLAQPSQAPPSLVYTVATSTTPPAATILPKGPPAPATATPAPTSPFPSATGSMTYSLVAPKAQRPSPKAPQKVKAAIASIPVGSFEAGASGRPGPAPRQPLEPGPVREPTAPESELEGQPTPPAPPPLPETWTPTARSSPPLPPPAEERTSAKGPETMASKFPSSSSDWRVPGQGLENRGEPPTPPSPAPAPAVAPGGSSESSSGRAAGDTPERKEAAGTGKKVKVRPPPLKKTFDSVDNRVLSEVDFEERFAELPEFRPEEVLPSPTLQSLATSPRAILGSYRKKRKNSTDLDSAPEDPTSPKRKMRRRSSCSSEPNTPKSAKCEGDIFTFDRTGTEAEDVLGELEYDKVPYSSLRRTLDQRRALVMQLFQDHGFFPSAQATAAFQARYADIFPSKVCLQLKIREVRQKIMQAATPTEQPPGAEAPLPVPPPTGTAAAPAPTPSPAGGPDPTSPSSDSGTAQAAPPLPPPPESGPGQPGWEGAPQPSPPPPGPSTAATGR

SEQ ID NO: 64886 - protein, 47 aa, Homo sapiens
MSSVSEVNVDIKDFLMSINLEQYLLHFHESGFTTVKDCAAINDSLLQ

SEQ ID NO: 64887 - protein, 248 aa, Homo sapiens
MMLRGNLKQVRIEKNPARLRALESAVGESEPAAAAAMALALAGEPAPPAPAPPEDHPDEEMGFTIDIKSFLKPGEKTYTQRCRLFVGNLPTDITEEDFKRLFERYGEPSEVFINRDRGFGFIRLESRTLAEIAKAELDGTILKSRPLRIRFATHGAALTVKNLSPVVSNELLEQAFSQFGPVEKAVVVVDDRGRATGKGFVEFAAKPPARKALERCGDGAFLLTTTPRPVIVEPMEQFDDEDGLPEKL

SEQ ID NO: 64888 - protein, 246 aa, Homo sapiens
MAPKPGAEWSTALSHLVLGVVSLHAAVSTAECTNGHLMCAGCFIHLLADARLKEEQATCPNCRCEISKSLCCRNLAVEKAVSELPSECGFCLRQFPRSLLERHQKEECQDRVTQCKYKRIGCPWHGPFHELTVHEAACAHPTKTGSELMEILDGMDQSHRKEMQLYNSIFSLLSFEKIGYTEVQFRPYRTDDFITRLYYETPRFTVLNQTWVLKARVNDSERNPNLSCKRTLSFQLLLKSKVTAPL

SEQ ID NO: 64889 - protein, 50 aa, Homo sapiens
MSSFLPEGGCYELLTVIGKGFEDLMTVNLARYKPTGEYVTVRRINLEACS

SEQ ID NO: 64890 - protein, 193 aa, Homo sapiens
  MOD_RES (1)..(1): Any amino acid
XNKPYDVFGCWLTETSLISGNLHRIGDITSCSVLWLNNAFQDVESENVNVVKRLFKIQNLNASTVRTVMVADCSRFDSPDLLLEAGDPATSPCRIFDLGSDNEEVVAGPAPAHAKEGLRHFLDRVLEGRAQPQLSERMLETKVAELLAQGHTKPPERSATGAKSKYLIFTTGCLTYSPHQIGTPLPPCCPPRS

SEQ ID NO: 64891 - protein, 155 aa, Homo sapiens
MHPGRTTGKGPSTHTQIDQQPPRLLIVHIALPSWADICTNLCEALQNFFSLACSLMGPSRMSLFSLYMVQDQHECILPFVQVKGNFARLQTCISELRMLQREGCFRSQGASLRLAVEDGLQQFKQYSRHVTTRAALTYTSLERVLFWELTLTFRL

SEQ ID NO: 64892 - protein, 503 aa, Homo sapiens
MSGALLWPLLPLLLLLLSARDGVRAAQPQAPGYLIAAPSVFRAGVEEVISVTIFNSPREVTVQAQLVAQGEPVVQSQGAILDKGTIKLKVPTGLRGQALLKVWGRGWQAEEGPLFHNQTSVTVDGRGASVFIQTDKPVYRPQHRVLISIFTVSPNLRPVNEKLEAYILDPRGSRMIEWRHLKPFCCGITNMSFPLSDQPVLGEWFIFVEMQGHAYNKSFEVQKYVLPKFELLIDPPRYIQDLDACETGTVRARYTFGKPVAGALMINMTVNGVGYYSHEVGRPVLRTTKILGSRDFDICVRDMIPADVPEHFRGRVSIWAMVTSVDGSQQVAFDDSTPVQRQLVDIRYSKDTRKQFKPGLAYVGKVELSYPDGSPAEGVTVQIKAELTPKDNIYTSEVVSQRGLVGFEIPSIPTSAQHVWLEVFQELEDYDVSDSFGVSREDGPFWWAGLTAQRRRRSSVFPWPWGITKDSGFAFTVRRGNGTGGDDRPSEPEPPAGRWPLHR

SEQ ID NO: 64893 - protein, 248 aa, Homo sapiens
MDKQNSQMNASHPETNLPVGYPPQYPPTAFQGPPGYSGYPGPQVSYPPPPAGHSGPGPAGFPVPNQPVYNQPVYNQPVGAAGVPWMPAPQPPLNCPPGLEYLSQIDQILIHQQIELLEAEDTDCCTRNCCGPSRPFTLRIIDNMGQEVITLERPLRCSSCCCPCCLQEIEIQAPPGVPIGYVIQTWHPCLPKFTIQNEKREDVLKISGPCVVCSCCGDVDFEIKSLDEQCVVGKISKHWTGILREAFT

SEQ ID NO: 64894 - protein, 33 aa, Homo sapiens
  MOD_RES (1)..(1): Any amino acid
XTDPQGFFFYWTDQNKVRNEETELLDLSLVKDA

SEQ ID NO: 64895 - protein, 559 aa, Homo sapiens
  MOD_RES (1)..(1): Any amino acid
XVEEGAGCLGGCGTRLLLSPGHTCPPPPPSGIQAPVFEIDVPRGTPAPLQCFLGPVGGTPTGTPRGLLQCGLCVHWSPEEVPAVTSVHSRRPSRSRLLAWVLWLQAWQVAAPCPGACVCYNEPKVTTSCPQQGLQAVPVGIPAASQRIFLHGNRISHVPAASFRACRNLTILWLHSNVLARIDAAAFTGLALLEQLDLSDNAQLRSVDPATFHGLGRLHTLHLDRCGLQELGPGLFRGLAALQYLYLQDNALQALPDDTFRDLGNLTHLFLHGNRISSVPERAFRGLHSLDRLLLHQNRVAHVHPHAFRDLGRLMTLYLFANNLSALPTEALAPLRALQYLRLNDNPWVCDCRARPLWAWLQKFRGSSSEVPCSLPQRLAGRDLKRLAANDLQGCAVATGPYHPIWTGRATDEEPLGLPKCCQPDAADKASVLEPGRPASAGNALKGRVPPGDSPPGNGSGPRHINDSPFGTLPGSAEPPLTAVRPEGSEPPGFPTSGPRRRPGCSRKNRTRSHCRLGQAGSGGGGTGDSEGSGALPSLTCSLTPLGLALVLWTVLGPC

SEQ ID NO: 64896 - protein, 180 aa, Homo sapiens
MATGALLPCSRPCPMSRLDFLKASHFSLGPDLRLHEGTMRTTSHRDFAYPAATREPPSLQPPPALLFPMDPRWDREERVSEAHRAFPPPSTPPWELLQAQARERTLAMQAGNLHLHEDAHAGIGLSNAHAAYGWPELPARTRERIRGARLIFDRDSLPPGDRDKLRIPPTTHQALFPPHD

SEQ ID NO: 64897 - protein, 612 aa, Homo sapiens
MMQESGTETKSNGSAIQNGSGGSNHLLECGGLREGRSNGETPAVDIGAADLAHAQQQQQQALQVARQLLLQQQQQQQVSGLKSPKRNDKQPALQVPVSVAMMTPQVITPQQMQQILQQQVLSPQQLQVLLQQQQALMLQQQLQEFYKKQQEQLQLQLLQQQHAGKQPKEQQQVATQQLAFQQQLLQMQQLQQQHLLSLQRQGLLTIQPGQPALPLQPLAQGMIPTELQQLWKEVTSAHTAEETTGNNHSSLDLTTTCVSSSAPSKTSLIMNPHASTNGQLSVHTPKRESLSHEEHPHSHPLYGHGVCKWPGCEAVCEDFQSFLKHLNSEHALDDRSTAQCRVQMQVVQQLELQLAKDKERLQAMMTHLHVKSTEPKAAPQPLNLVSSVTLSKSASEASPQSLPHTPTTPTAPLTPVTQGPSVITTTSMHTVGPIRRRYSDKYNVPISSADIAQNQEFYKNAEVRPPFTYASLIRQAILESPEKQLTLNEIYNWFTRMFAYFRRNAATWKASMAENSIPLYTTASMGNPTLGNLASAIREELNGAMEHTNSNESDSSPGRSPMQAVHPVHVKEEPLDPEEAEGPLSLVTTANHSPDFDHDRDYEDEPVNEDME

SEQ ID NO: 64898 - protein, 141 aa, Homo sapiens
MAAARLLPVPAGPQAKLTFEDVAVLLSQDEWDRLCPAQRGLYRNVMMETYGNVVSLGLPGSKPDIISQLERGEDPWVLDRKGAKKSQGLWSDYSDNLKYDHTTACTQQDSLSCPWECETKGESQNTDLSPKPLISEQTVIL

SEQ ID NO: 64899 - protein, 160 aa, Homo sapiens
  MOD_RES (1)..(1): Any amino acid
XLDSDDEFVPYDMSGDRELKSSKAPAYVRDCVEALTTSEDIERWEAALRALEGLVYRSPTATREVADYLTSQFYALNYSLRQRMDILDVLTLAAQELSRPGCLGRTPQPGSPSPNTPCLPEAAVSQPGSAVASDWRVVVEERIRSKTQRLSKGGPRQGPA

SEQ ID NO: 64900 - protein, 772 aa, Homo sapiens
MASGADSKGDDLSTAILKQKNRPNRLIVDEAINEDNSVVSLSQPKMDELQLFRGDTVLLKGKKRREAVCIVLSDDTCSDEKIRMNRVVRNNLRVRLGDVISIQPCPDVKYGKRIHVLPIDDTVEGITGNLFEVYLKPYFLEAYRPIRKGDIFLVRGGMRAVEFKVVETDPSPYCIVAPDTVIHCEGEPIKREDEEESLNEVGYDDIGGCRKQLAQIKEMVELPLRHPALFKAIGVKPPRGILLYGPPGTGKTLIARAVANETGAFFFLINGPEIMSKLAGESESNLRKAFEEAEKNAPAIIFIDELDAIAPKREKTHGEVERRIVSQLLTLMDGLKQRAHVIVMAATNRPNSIDPALRRFGRFDREVDIGIPDATGRLEILQIHTKNMKLADDVDLEQVANETHGHVGADLAALCSEAALQAIRKKMDLIDLEDETIDAEVMNSLAVTMDDFRWALSQSNPSALRETVVEVPQVTWEDIGGLEDVKRELQELVQYPVEHPDKFLKFGMTPSKGVLFYGPPGCGKTLLAKAIANECQANFISIKGPELLTMWFGESEANVREIFDKARQAAPCVLFFDELDSIAKARGGNIGDGGGAADRVINQILTEMDGMSTKKNVFIIGATNRPDIIDPAILRPGRLDQLIYIPLPDEKSRVAILKANLRKSPVAKDVDLEFLAKMTNGFSGADLTEICQRACKLAIRESIESEIRRERERQTNPSAMEVEEDDPVPEIRRDHFEEAMRFARRSVSDNDIRKYEMFAQTLQQSRGFGSFR

SEQ ID NO: 64901 - protein, 183 aa, Homo sapiens
  MOD_RES (1)..(1): Any amino acid
XAKLRKVSKQEEASGGPTAPKAESGRSGGGGLMEEMNAMLARRRKATQVGEKTPKDESANQEEPEARVPAQSESVRRPWEKNSTTLPRMKSSSSVTTSETQPCTPSSSDYSDLQRVKQMSALNSFRTLTQLSITNWSWQEAGMRLPTLVLDVLQYFSGSKDPEFSPRILQSLCDLDSDVMVSM

SEQ ID NO: 64902 - protein, 173 aa, Homo sapiens
  MOD_RES (1)..(1): Any amino acid
XDGTQSDSENAGAHRRCSKRATLEEHLRRHHSEHKKLQKVQATEKHQDQAVVFGVDDNQDYNRPVINEKHKDLIKDWALSSAAAVMEERKPLTTSGFHHSEEGTSSSGSKRWVSQWASLAANHTRHDQEERIMEFSAPLPLENGILFLSFILYPFFLLFLHFSLFLLLFSAFL

SEQ ID NO: 64903 - protein, 124 aa, Homo sapiens
MLTTLKPFGSVSVESKMNNKAGSFFWNLRQFSTLVSTSRTMRLCCLGLCKPKIVHSNWNILNNFHNRMQSTDIIRYLFQDAFIFKSDVGFQTKGISTLTALRIERLLYAKRLFFDSKQSLVPVD

SEQ ID NO: 64904 - protein, 559 aa, Homo sapiens
MVSNPVHGLPFLPGTSFKDSTKTAFHRSQTLSYRNGYAIVRRPTVGIGGDRLQFNQLSQAELDELASKAPVLTYGQPKQAPPADFIPAHVAFDKKVLKFDAYFQEDVPMSTEEQYRIRQVNIYYYLEDDSMSVIEPVVENSGILQGKLIKRQRLAKNDRGDHYHWKDLNRGINITIYGKTFRVVDCDQFTQVFLESQGIELNPPEKMALDPYTELRKQPLRKYVTPSDFDQLKQFLTFDKQVLRFYAIWDDTDSMYGECRTYIIHYYLMDDTVEIREVHERNDGRDPFPLLMNRQRVPKVLVENAKNFPQCVLEISDQEVLEWYTAKDFIVGKSLTILGRTFFIYDCDPFTRRYYKEKFGITDLPRIDVSKREPPPVKQELPPYNGFGLVEDSAQNCFALIPKAPKKDVIKMLVNDNKVLRYLAVLESPIPEDKDRRFVFSYFLATDMISIFEPPVRNSGIIGGKYLGRTKVVKPYSTVDNPVYYGPSDFFIGAVIEVFGHRFIILDTDEYVLKYMESNAAQYSPEALASIQNHVRKREAPAPEAERISLCTQAGMQCQ

SEQ ID NO: 64905 - protein, 320 aa, Homo sapiens
MRAHAQRGRGCTRRSAAVLMARHGLPLLPLLSLLVGAWLKLGNGQATSMVQLQGGRFLMGTNSPDSRDGDGPVREATVKPFAIDIFPVTNKDFRDFVREKKYRTEAEMFGWSFVFEDFVSDELRNKATQPMKSVLWWLPVEKAFWRQPAGPGSGIRERLEHPVLHVSWNDARAYCAWRGKRLPTEEEWEFAARGGLKGQVYPWGNWFQPNRTNLWQGKFPKGDKAEDGFHGVSPVNAFPAQNNYGLYDLLGNVWEWTASPYQAAEQDMRVLRGASWIDTADGSANHRARVTTRMGNTPDSASDNLGFRCAADAGRPPGEL

SEQ ID NO: 64906 - protein, 1346 aa, Homo sapiens
MRNLKLFRTLEFRDIQGPGNPQCFSLRTEQGTVLIGSEHGLIEVDPVSREVKNEVSLVAEGFLPEDGSGRIVGVQDLLDQESVCVATASGDVILCSLSTQQLECVGSVASGISVMSWSPDQELVLLATGQQTLIMMTKDFEPILEQQIHQDDFGESKFITVGWGRKETQFHGSEGRQAAFQMQMHESALPWDDHRPQVTWRGDGQFFAVSVVCPETGARKVRVWNREFALQSTSEPVAGLGPALAWKPSGSLIASTQDKPNQQDIVFFEKNGLLHGHFTLPFLKDEVKVNDLLWNADSSVLAVWLEDLQREESSIPKTCVQLWTVGNYHWYLKQSLSFSTCGKSKIVSLMWDPVTPYRLHVLCQGWHYLAYDWHWTTDRSVGDNSSDLSNVAVIDGNRVLVTVFRQTVVPPPMCTYQLLFPHPVNQVTFLAHPQKSNDLAVLDASNQISVYKCGDCPSADPTVKLGAVGGSGFKVCLRTPHLEKRYKIQFENNEDQDVNPLKLGLLTWIEEDVFLAVSHSEFSPRSVIHHLTAASSEMDEEHGQLNVSSSAAVDGVIISLCCNSKTKSVVLQLADGQIFKYLWESPSLAIKPWKNSGGFPVRFPYPCTQTELAMIGEEECVLGLTDRCRFFINDIEVASNITSFAVYDEFLLLTTHSHTCQCFCLRDASFKTLQAGLSSNHVSHGEVLRKVERGSRIVTVVPQDTKLVLQMPRGNLEVVHHRALVLAQIRKWLDKLMFKEAFECMRKLRINLNLIYDHNPKVFLGNVETFIKQIDSVNHINLFFTELKEEDVTKTMYPAPVTSSVYLSRDPDGNKIDLVCDAMRAVMESINPHKYCLSILTSHVKKTTPELEIVLQKVHELQGNAPSDPDAVSAEEALKYLLHLVDVNELYDHSLGTYDFDLVLMVAEKSQKDPKEYLPFLNTLKKMETNYQRFTIDKYLKRYEKAIGHLSKCGPEYFPECLNLIKDKNLYNEALKLYSPSSQQYQDISIAYGEHLMQEHMYEPAGLMFARCGAHEKALSAFLTCGNWKQALCVAAQLNFTKDQLVGLGRTLAGKLVEQRKHIDAAMVLEECAQDYEEAVLLLLEGAAWEEALRLVYKYNRLDIIETNVKPSILEGEGSILDRIPHLEEAQKNYMAFLDSQTATFSRHKKRLLVVRELKEQAQQAGLDDEVPHGQESDLFSETSSVVSGSEMSGKYSHSNSRISARSSKNRRKAERKKHSLKEGSPLEDLALLEALSEVVQNTENLKDEVYHILKVLFLFEFDEQGRELQKAFEDTLQLMERSLPEIWTLTYQQNSATPVLGPNSTANSIMASYQQQKTSVPVLDAELFIPPKINRRTQWKLSLLD

SEQ ID NO: 64907 - protein, 210 aa, Homo sapiens
MEGGAAAATPTALPYYVAFSQLLGLTLVAMTGAWLGLYRGGIAWESDLQFNAHPLCMVIGLIFLQGNALLVYRVFRNEAKRTTKVLHGLLHIFALVIALVGLVAVFDYHRKKGYADLYSLHSWCGILVFVLYFVQWLVGFSFFLFPGASFSLRSRYRPQHIFFGATIFLLSVGTALLGLKEALLFNLGKSGWSQNNYSHPPWCLHITPAP

SEQ ID NO: 64908 - protein, 15 aa, Homo sapiens
  MOD_RES (1)..(1): Any amino acid
XSSAFQKHLQREEVK

SEQ ID NO: 64909 - protein, 251 aa, Homo sapiens
MCSPHMGEQDWTCRDPGWEQNLRQLRVLWEGNGFIAAFRFYFCTFAFYLPVVLLTGPRSGAVSGHFWEPWTALERRQELPRKELNSVASELSARQEESEHSHKHLIELRREFKKNVPEEIREMVAPVLKSFQAEVVALSKRSQEAEAAFLSVYKQLIEAPDPVPVFEAARSLDDRLQPPSFDPSGQPRRDLHTSWKRNPELLSPKEQREGTSPAGPTLTEGSRLPGIPGKALLTETLLQRNEAEKQKGLQE

SEQ ID NO: 64910 - protein, 159 aa, Homo sapiens
TFERFRHAQLLDAAKAGGEFLLRYARVAPPGKKCAFVLTRDGRPVKVQRTIFSECFYTMAMNELWRATGEVRYQEDASGLGRPQLQGAPAAEPMAVPMMLLNLVEQLGEADEELAGKYAELGDWCARRILQHVQATRWKPAGFCSVIAFGKATPNFEPT

SEQ ID NO: 64911 - protein, 215 aa, Homo sapiens
MAVEGGMKCVKFLLYVLLLAFCACAVGLIAVGVGAQLVLSQTIIQGATPGSLLPVVIIAVGVFLFLVAFVGCCGACKENYCLMITFAIFLSLIMLVEVAAAIAGYVFRDKVMSEFNNNFRQQMENYPKNNHTASILDRMQADFKCCGAANYTDWEKIPSMSKNRVPDSCCINVTVGCGINFNEKAIHKEGCVEKIGGWLRKNVLVVAAAALGIAF

SEQ ID NO: 64912 - protein, 108 aa, Homo sapiens
MPQAFLLGSIHEPAGALMEPQPCPGSLAESFLEEELRLNAELSQLQFSEPVGIIYNPVEYAWEPHRNYVTRYCQGPKEVLFLGMNPGPFGMAQTGVPFGEVSMVRDWL

SEQ ID NO: 64913 - protein, 153 aa, Homo sapiens
MAWPNVFQRGSLLSQFSHHHVVVFLLTFFSYSLLHASRKTFSNVKVSISEQWTPSAFNTSVELPVEIWSSNHLFPSAEKATLFLGTLDTIFLFSYAVGLFISGIVGDRLNLRWVLSFGMCSSALVYAFLVTASVQFAGGIVIFFGLLVSPEEI

SEQ ID NO: 64914 - protein, 63 aa, Homo sapiens
  MOD_RES (1)..(1): Any amino acid
XELIAYELTRREAEANRRPLPELVRAKIPFSACLQAFSEPENVDDFWSSALQAKSAGVNIRHR

SEQ ID NO: 64915 - protein, 375 aa, Homo sapiens
MRVYIFLCLMCWVRSDNKRPCLEFSQLSVKDSFRDLFIPRIETILMMYTRNNLNCAEPLFEQNNSLNVNFNTQKKTVWLIHGYRPVGSIPLWLQNFVRILLNEEDMNVIVVDWSRGATTFIYNRAVKNTRKVAVSLSVHIKNLLKHGASLDNFHFIGVSLGAHISGFVGKIFHGQLGRITGLDPAGPRFSRKPPYSRLDYTDAKFVDVIHSDSNGLGIQEPLGHIDFYPNGGNKQPGCPKSIFSGIQFIKCNHQRAVHLFMASLETNCNFISFPCRSYKDYKTSLCVDCDCFKEKSCPRLGYQAKLFKGVLKERMEGRPLRTTVFLDTSGTYPFCNHHFAGIILYLKTERKCFLIQTHVHQRTHKMPSSIKCTCL

SEQ ID NO: 64916 - protein, 185 aa, Homo sapiens
MASELCKTISVARLEKHKNLFLNYRNLHHFPLELLKDEGLQYLERLYMKRNSLTSLYLTVDRNRLWYVPRHLCQLPSLNELSMAGNRLAFLPLDLGRSRELQYVYVDNNIHLKGLPSYLYNKVIGCSGCGAPIQVSEVKLLSFSSGQRTVFLPAEVKAIGTEHDHVLPLQELAMRGLYHTYHSLL

SEQ ID NO: 64917 - protein, 93 aa, Homo sapiens
MVRDSMAAAFRPSNRVLLQALQILVYPGVGGSGSVSCRCPLGAKRYLLTDNVVKLKEFQQKKVAVACNLSGTKGTMQRTKISLWGSINLDRFL

SEQ ID NO: 64918 - protein, 76 aa, Homo sapiens
MAAVGSLLGRLRQSTVKATGPALRRLHTSSWRADSSRASLTRVHRQAYARLYPVLLVKQDGSTIHIRYREPRRMLA

SEQ ID NO: 64919 - protein, 33 aa, Homo sapiens
  MOD_RES (1)..(1): Any amino acid
XTCNECKHHVETRWHCTVCEFLNAAVFISFCEH

SEQ ID NO: 64920 - protein, 159 aa, Homo sapiens
MGTRKKVHAFVRVKPTDDFAHEMIRYGDDKRSIDIHLKKDIRRGVVNNQQTDWSFKLDGVLHDASQDLVYETVAKDVVSQALDGYNGTIMCYGQTGAGKTYTMMGATENYKHRGILPRALQQGETNRIIASHTMNKNSSRSHCIFTIYLEAHSRTLSEE

SEQ ID NO: 64921 - protein, 95 aa, Homo sapiens
MESEMLQSPLLGLGEEDEADLTDWNLPLAFMKKRHCEKIEGSKSLAQSWRMKDRMKTVSVALVLCLNVGVDPPDVVKTTPCARLECWIGPVQAEP

SEQ ID NO: 64922 - protein, 91 aa, Homo sapiens
  MOD_RES (1)..(1): Any amino acid
XCAPASSSVPAEAELAGEGISVNTGPKGVINDWRRFKQLETEQREEQCREMERLIKKLSMTCRSHLDEEEEQQKQKDLQEKISGKKSWAIL

SEQ ID NO: 64923 - protein, 253 aa, Homo sapiens
MPQASEHRLGRTREPPVNIQPRVGSKLPFAPRARSKERRNPASGPNPMLRPLPPRPGLPDERLKKLELGRGRTSGPRPRGPLRADHGVPLPGSPPPTVALPLPSRTNLARSKSVSSGDLRPMGIALGGHRGTGELGAALSRLALRPEPPTLRRSTSLRRLGGFPGPPTLFSIRTEPPASHGSFHMISARSSEPFYSDDKMAHHTLLLGSGHVGLRNLGNTCFLNAVLQCLSSTRPLRDFCLRRDFRQEVPGGG

SEQ ID NO: 64924 - protein, 86 aa, Homo sapiens
MNWFGSNFFRCPEDLSLLNIYSPLLSHMSSEDEHFISNLRGHVPASAVVKQPVRGASGRTTITAIVQTGGGWSTGLFSVCRDRRIL

SEQ ID NO: 64925 - protein, 95 aa, Homo sapiens
MAFWGWRAAAALRLWGRVVERVEAGGGVGPFQACGCRLVLGGRDDVSAGLRGSHGARGEPLDPARPLQRPPRPEVPRAFRRQPRAAAPSFFFSRM

SEQ ID NO: 64926 - protein, 124 aa, Homo sapiens
  MOD_RES (1)..(1): Any amino acid
XNIAALLSVMLQPYMPTVSATIQAQLQLPPPACSILLTNFLCTLPAGHQIGTVSPLFQKLENDQIESLRQRFGGGQVRKLKAVPSLHNSHSITSLISLSSPHPSLFPSFGPAASSLTVFLSCLN

SEQ ID NO: 64927 - protein, 180 aa, Homo sapiens
MAAANPWDPASAPNGAGLVLGHFIASGMVNQEMLNMSKKTVSCFVNFTRLQQITNIQAEIYQKNLEIELLKLEKDTADVVHPFFLEMKSCYVAQAGLELMASILPFQSPKTLRLQKCHTLQSMNNHLEAVLKEKRSLRQRLLKPMCQENLPIEAVYHRYMVHLLELAVTFIERLETHLET

SEQ ID NO: 64928 - protein, 127 aa, Homo sapiens
MKAVVQRVTRASVTVGGEQISAIGRGICVLLGISLEDTQKELEHMVRKILNLRVFEDESGKHWSKSVMDKQYEILCVSQFTLQCVLKGNKPDFHLAMPTEQAEGFYNSFLEQLRKTYRPELIKDTLF

SEQ ID NO: 64929 - protein, 571 aa, Homo sapiens
MALTSFLPAPTQLSQDQLEAEEKARSQRSRQTSLVSSRREPPPYGYRKGWIPRLLEDFGDGGAFPEIHVAQYPLDMGRKKKMSNALAIQVDSEGKIKYDAIARQGQSKDKVIYSKYTDLVPKEVMNADDPDLQRPDEEAIKEITEKTRVALEKSVSQKVAAAMPVRAADKLAPAQYIRYTPSQQGVAFNSGAKQRVIRMVEMQKDPMEPPRFKINKKIPRGPPSPPAPVMHSPSRKMTVKEQQEWKIPPCISNWKNAKGYTIPLDKRLAADGRGLQTVHINENFAKLAEALYIADRKAREAVEMRAQVERKMAQKEKEKHEEKLREMAQKARERRAGIKTHVEKEDGEARERDEIRHDRRKERQHDRNLSRAAPDKRSKLQRNENRDISEVIALGVPNPRTSNEVQYDQRLFNQSKGMDSGFAGGEDEIYNVYDQAWRGGKDMAQSIYRPSKNLDKDMYGDDLEARIKTNRCQAIQLNFSVYTGESKVVHSFFSFSLDLFPTRSFLVQTVDREAEKDQCSLRKILLVWTSFWKKPNSMVALKDPQIAAAPRNTSMKARRGGRNRHRSLQSE

SEQ ID NO: 64930 - protein, 193 aa, Homo sapiens
MPEGTVGLPARRPQCFLRAEMANSGLQLLGFSMALLGWVGLVACTAIPQWQMSSYAGDNIITAQAMYKGLWMDCVTQSTGMMSCKMYDSVLALSAALQATRALMVVSLVLGFLAMFVATMGMKCTRCGGDDKVKKARIAMGGGIIFIVAGLAALVACSWYGHQIVTDFYNPLIPTNIKYEFGPAIFIGWAGSA

SEQ ID NO: 64931 - protein, 185 aa, Homo sapiens
  MOD_RES (1)..(1): Any amino acid
XAHFFLGQCQLEMESYDEAIANLQRAYSLAKEQRLNFGDDIPSALRIAKKKRWNSIEERRIHQESELHSYLSRLIAAERERELEECQRNHEGDEDDSHVRAQQACIEAKHDKYMADMDELFSQVDEKRKKRDIPDYLCGKISFELMREPCITPSGITYDRKDIEEHLQVRPAAGGAGPVAWSWAP

SEQ ID NO: 64932 - protein, 77 aa, Homo sapiens
MAASRLPPATLTLKQFVRRQQVLLLYRRILQTIRQVPNDSDRKYLKDWAREEFRRNKSATEEVRTKSWLRPRLKRKT

SEQ ID NO: 64933 - protein, 47 aa, Homo sapiens
  MOD_RES (1)..(1): Any amino acid
XLLLLLTPPPGGEPGVGAARPALGPGRHFPALPLQRAGQHQPHYAPH

SEQ ID NO: 64934 - protein, 140 aa, Homo sapiens
MRSECVLGAASDSGQEAPRDTWFLQGWKASRRFLIKGSVAGGAVYLVYDQELLGPSDKSQAALQKAGEVVPPAMYQFSQYVCQQTGLQIPQLPAPPKIYFPIRDSWNAGIMTVMSALSVAPSKAREYSKEGWEYVKARTK

SEQ ID NO: 64935 - protein, 124 aa, Homo sapiens
VVAPATDGGLNLTSTFLRKNQCETRTMLLQPAGSLGSYSYRSPHWGSTYSVSVVETDYDQYALLYSQGSKGPGEDFRMATLYSRTQTPRAELKEKFTAFCKAQGFTEDTIVFLPQTAPGFFLGR

SEQ ID NO: 64936 - protein, 150 aa, Homo sapiens
MAASKVKQDMPPPGGYGPIDYKRNLPRRGLSGYSMLAIGIGTLIYGHWSIMKWNRERRRLQIEDFEARIALLPLLQAETDRRTLQMLRENLEEEAIIMKDVPDWKVGPGWEGRGASHGRDRAWGWGAPTAFYRNPRTKGVVGARSHKGRL

SEQ ID NO: 64937 - protein, 154 aa, Homo sapiens
  MOD_RES (1)..(1): Any amino acid
XMDSSAVYVLSSMARQRRASLSCGGPGGQDFARSGFSKNCGSPGSSQLSSNSLYAKAVKNHSSGTVSATSPNKCKRPMNAFMLFAKKYRVEYTQMYPGKDNRAISVILGDRWKKMKNEERRMYTLEAKALAEEQKRLNPDCWKRKRTNSVCFNK

SEQ ID NO: 64938 - protein, 86 aa, Homo sapiens
  MOD_RES (1)..(1): Any amino acid
XWTESLYCGVYTNAWPSSDFRFEYLSSSTITWTSLYEICGVQRDTYSQLKGKKRQASNQKTIQPPRKAVEEPLNAFKESKGMMNDE

SEQ ID NO: 64939 - protein, 160 aa, Homo sapiens
MEESPLSRAPSRGGVNFLNVARTYIPNTKVECHYTLPPGTMPSASDWIGIFKVEAACVRDYHTFVWSSVPESTTDGSPIHTSVQFQGTREDGKLGERSQGSGGLKEASYLPKPGAQLYQFRYVNRQGQVCGQSPPFQFREPRPMDELVTLEEADGGSDIL

SEQ ID NO: 64940 - protein, 107 aa, Homo sapiens
MPPPWHPPPRLLAVCLLTTTQATVVRDLVAVRMAEEQEFTQLCKLPAQPSHPHCVNNTYRSAQHSQALLRGLLALRDSGILFDVVLVVEGRHIEAHRILLAASCDYF

SEQ ID NO: 64941 - protein, 112 aa, Homo sapiens
MNVKDLRPRARTILKWNELNVGDVVMVNYNVESPGQRGFWFDAEITTLKTISRTKKELRVKIFLGGSEGTLNDCKIISVDEIFKIERPGAHPLSFADGKFLRRNDPECDLCG

SEQ ID NO: 64942 - protein, 166 aa, Homo sapiens
  MOD_RES (1)..(1): Any amino acid
XDSQYHETTLKGGMFAGQLTKVGMQQMFALGERLRKNYVEDIPFLSPTFNPQEVFIRSTNIFRNLESTRCLLAGLFQCQKEGPIIIHTDEADSEVLYPNYQSCWSLRQRTRGRRQTASLQPGISEDLKKVKDRMGIDSSDKVDFFILLDNVAAEQEKMGSCRFHGS

SEQ ID NO: 64943 - protein, 99 aa, Homo sapiens
MSGCGLFLRTTAAARACRGLVVSTANRRLLRTSPPVRAFAKELFLGKIKKKFSHFQKLAKMNLMKSISSWDPWKNSSLKRWTPEKLTRKGKSQMKLWRN

SEQ ID NO: 64944 - protein, 275 aa, Homo sapiens
MTSKGPEEEHPSVTLFRQYLRIRTVQPKPDYGAAVAFFEETARQLGLGCQKVEVAPGYVVTVLTWPGTNPTLSSILLNSHTDVVPVFKEHWSHDPFEAFKDSEGYIYARGAQDMKCVSIQYLEAVRRLKVEGHRFPRTIHMTFVPDEEVGGHQGMELFVQRPEFHALRAGFALDEGIANPTDAFTVFYSERSPWWVRVTSTGRPGHASRFMEDTAAEKLHKVVNSILAFREKEWQRLQSNPHLKEGSVTSVNLTKLEGGVAYNVIPATMSASFDF

SEQ ID NO: 64945 - protein, 84 aa, Homo sapiens
MQQHSGQHLITAVADHLFKLKTTSWELGRFRSAIELDTPSMTAEQVAAIEQSVNEKIRDRLPVNVRELSLDDPEVEQVRWPGFA

SEQ ID NO: 64946 - protein, 285 aa, Homo sapiens
  MOD_RES (1)..(1): Any amino acid
XPQLLPLLKHTTSYLHEVFEFYEEILTCRYPYSCFKTVFIDEAYVEVAAYASMSIFRSDEWVLKGISGYIYGLWMKKTFGVNEYRHWIKEELDKIVAYELKTGGVLLHPIFGGGKEKDNPASHLHFSIKHPHTLSWEYYSMFQCKAHLVMRLIENRISMEFMLQVFNKLLSLASTASSQKFQSHMWSQMLVSTSGFLKSISNVSGKDIQPLIKQWVDQSGVVKFYGSFAFNRKRNVLELEIKQDYTSPGTQKYVGPLKVTVQELDGSFNHTLQIEENSLKHDIPC

SEQ ID NO: 64947 - protein, 119 aa, Homo sapiens
MLSEGDILFSSLLSSPSLFWPPGLILLFYLVFYGFLAALFSFTMWVMLQTLNDEVPKYRDQIPSPGLMVFPKPVTALEYTFSRSDPTSYAGYIEDLKKFLKPYTLEEQKNLTVCPDGAL

SEQ ID NO: 64948 - protein, 77 aa, Homo sapiens
MEKVMQELGKSLTDQDVNSLAAQHFESQQDLENKWSNELKQSTAIQKQEYQEWVIKLHQDLKNPNNSSLRSPVEDHA

SEQ ID NO: 64949 - protein, 536 aa, Homo sapiens
MSYTGFVQGSETTLQSTYSDTSAQPTCDYGYGTWNSGTNRGYEGYGYGYGYGQDNTTNYGYGMATSHSWEMPSSDTNANTSASGSASADSVLSRINQRLDMVPHLETDMMQGGVYGSGGERYDSYESCDSRAVLSERDLYRSGYDYSELDPEMEMAYEGQYDAYRDQFRMRGNDTFGPRAQGWARDARSGRPMASGYGRMWEDPMGARGQCMSGASRLPSLFSQNIIPEYGMFQGMRGGGAFPGGSRFGFGFGNGMKQMRRTWKTWTTADFRTKKKKRKQGGSPDEPDSKATRTDCSDNSDSDNDEGTEGEATEGLEGTEAVEKGSRVDGEDEEGKEDGREEGKEDPEKGALTTQDENGQTKRKLQAGKKSQDKQKKRQRDRMVERIQFVCSLCKYRTFYEDEMASHLDSKFHKEHFKYVGTKLPKQTADFLQEYVTNKTKKTEELRKTVEDLDGLIQQIYRDQDLTQVWDHPEASEDHGSQPEPQAHDGAVQEVLPHGGPQYSQQQAHQQEAGALPEGREPFHRQPRGGEGAGGG

SEQ ID NO: 64950 - protein, 178 aa, Homo sapiens
MALLTAAARLLGTKNASCLVLAARHASASSTNLKDILADLIPKEQARIKTFRQQHGKTVVGQITVDMMYGGMRGMKGLVYETSVLDPDEGIRFRGFSIPECQKLLPKAKGGEEPLPEGLFWLLVTGHIPTEEQVSWLSKEWAKRAALPSHVVTMLDNFPTNLHPMSQLSAAVTALNSE

SEQ ID NO: 64951 - protein, 152 aa, Homo sapiens
MQHENVIGLLDVFTPASSLRNFYDFYLVMPFMQTDLQKIMGMEFSEEKIQYLVYQMLKGLKYIHSAGVVHRDLKPGNLAVNEDCELKILDFGLARHADAEMTGYVVTRWYRAPEVILSWMHYNQTGQILHPVPATDPQEGFHSAVPTGQPPG

SEQ ID NO: 64952 - protein, 45 aa, Homo sapiens
GSPFIPERRRRPLLPDGTFSSCKKIWIQAAFLSVCHCPPPLASRT

SEQ ID NO: 64953 - protein, 160 aa, Homo sapiens
MRCSPGGVWLALAASLLHVSLQGEFQRKLYKELVKNYNPLERPVANDSQPLTVYFSLSLLQIMDVDEKNQVLTTNIWLQMSWTDHYLQWNVSEYPGVKTVRFPDGQIWKPDILLYNSSYDQQQEVLAYGMHCWSPQFGPTSSSMFPVVHWRVLWQRWLQC

SEQ ID NO: 64954 - protein, 212 aa, Homo sapiens
MAAAVLGQLGALWIHNLRSRGKLALGLLSFHSVLPQSYIHTSASLDISRKWEKKNKIVYPPQLPGEPRRPAEIYHCRRQIKYSKDKMWYLAKLIRGMSIDQALAQLEFNDKKGAKIIKEVLLEAQDMAVRDHNVEFRSNLYIAESTSGRGQCLKRIRYHGRGRFGIMEKVYCHYFVKLVEGPPPPPEPPKTAVAHAKEYIQQLRSRTIVHTL

SEQ ID NO: 64955 - protein, 483 aa, Homo sapiens
MQSFLTLLKEHEDTCAPPAELVTLAGRLCRDFQDDLAQLQPLVTAILDSQLRLHLLDNADVALACARVLDQQEQQQAACRLLEGCQVPGGSQELVQLWNDIHYRLVMRRLGVAALTPVQKFRCRKRNPPPPSLCPEGLKSRNFPREVREKLHNFAVGVNTNPSKAERENLALETSLTPEQVYNWFANYRRRQRALPQHMKPAQQATAEDPGARERGPDLLQPSGNPRVDSGFVDRPQWSEEREEKGPPQSPQTTQGPWEPLALAPDFPADETVSKPLDVRSLPGGEMYQEGPGHDPATLPLFCPGPGLCPLAAGNDMLNPSLAAPESWLMSLALASSKEVSFQTGQLVHSHGLDFMMGPADTAVAVSIATLGDPSPTGFSGPPSGHPQSVQLEEGLGTSSGRTELRVGSFLVTQPPLQAPEFILTQSPPELAPAPSAFPGPVSAMELSQALPSSQVQCSDSQASGDAFWGARMLLEFSGSSLG

SEQ ID NO: 64956 - protein, 76 aa, Homo sapiens
MTPPQQPPPLRSEPGTLGSAASSYSPLGLNGVPGSIWDFVSGSFSPSPSPILSAGPPSSSSASPNGAELARVRRQL

SEQ ID NO: 64957 - protein, 116 aa, Homo sapiens
MSVTLTSVKRVQSSPNLLAAGRDSQSPDSAWRSYNDGNQETLNGDATYSSLAAKGFRSVRPNLQDKRSPTQSQITVNGNSGGAVSPMSYYQRPFSPSAYSLPASLNSSIVMQHGTS

SEQ ID NO: 64958 - protein, 51 aa, Homo sapiens
MLQMQDIVLNEVKKVDSEYIATVCGSFRRGAESSGDMDVLLTHPSFTSEST

SEQ ID NO: 64959 - protein, 200 aa, Homo sapiens
MVVPSLKLQDLIEEIRGAKTQAQEREVIQKECAHIRASFRDGDPVHRHRQLAKLLYVHMLGYPAHFGQMECLKLIASSRFTDKRVGYLGAMLLLDERHDAHLLITNSIKNDLSQGIQPVQGLALCTLSTMGSAEMCRDLAPEVEKLLLQPSPYVRKKAILTAVHMIRKVPELSSVFLPPCAQLLHERHHGILLGTITLIT

SEQ ID NO: 64960 - protein, 50 aa, Homo sapiens
MELLTFRDVAIEFSPEEWKCLDPAQQNLYRDVMLENYRNLVSLVEKRDCL

SEQ ID NO: 64961 - protein, 59 aa, Homo sapiens
MSRPQGLLWLPLLFTPVCVMLNSNVLLWLTALAIKFTLIDSQAQYPVVNTNYGKIRGLR

SEQ ID NO: 64962 - protein, 547 aa, Homo sapiens
MKMTVDFEECLKDSPRFRAALEEVEGDVAELELKLDKLVKLCIAMIDTGKAFCVANKQFMNGIRDLAQYSSNDAVVETSLTKFSDSLQEMINFHTILFDQTQRSIKAQLQNFVKEDLRKFKDAKKQFEKVSEEKENALVKNAQVQRNKQHEVEEATNILTATRKCFRHIALDYVLQINVLQSKRRSEILKSMLSFMYAHLAFFHQGYDLFSELGPYMKDLGAQLDRLVVDAAKEKREMEQKHSTIQQKDFSSDDSKLEYNVDAANGIVMEGYLFKRASNAFKTWNRKKPDHIRRWFSIQNNQLVYQKKFKDNPTVVVEDLRLCTVKHCEDIERRFCFEVVSPTKSCMLQADSEKLRQAWIKAVQTSIATAYREKGDESEKLDKKSSPSTGSLDSGNESKEKLLKGESALQRVQCIPGNASCCDCGLADPRWASINLGITLCIECSGIHRSLGVHFSKVRSLTLDTWEPELLKLMCELGNDVINRVYEANVEKMGIKKPQPGQRQEKEAYIRAKYVERKFVDKYSISLSPPEQQKKFVSKSSEEKRLS

SEQ ID NO: 64963 - protein, 122 aa, Homo sapiens
  MOD_RES (1)..(1): Any amino acid
XSMSKEAVAICKGLMTKHPGKRLGCGPEGERDIKEHAFFRYIDWEKLERKEIQPPYKPKAVSSPFSLTAGYSHTRYSCLCLMFSKCSLRGRRQCVYWNMGVCIHTYAQNHWLLRWTFSIGPA

SEQ ID NO: 64964 - protein, 211 aa, Homo sapiens
  MOD_RES (1)..(1): Any amino acid
XKSLRIAEYAFKLAQESGRKKVTAVHKANIMKLGDGLFLQCCREVAARYPQITFENMIVDNTTMQLVSRPQQFDVMVMPNLYGNIVNNVCAGLVGGPGLVAGANYGHVYAVFETATRNTGKSIANKNIANPTATLLASCMMLDHLKLHSYATSIRKAVLASMDNENGLVCAEPACVLQMHTPDIGGQGTTSEAIQDVIRHIRVINGRAVEA

SEQ ID NO: 64965 - protein, 249 aa, Homo sapiens
MPEIRVTPLGACPVLSWNLVLPPGRGSRAPSSTDTRTGFHVLPHGVSASSEGAPRPGAGQDVGRSCILVSIAGKNVMLDCGMHMGFNDDRRFPDFSYITQNGRLTDFLDCVIISHFHLDHCGALPYFSEMVGYDGPIYMTHPTQAICPILLEDYRKIAVDKKGEANFFTSQMIKDCMKKVVAVHLHQTVQVDDELEIKAYYAGHVLGAAMFQIKVGSESVVYTGDYNMTPDRHLGAAWIDKCRPNLLIT

SEQ ID NO: 64966 - protein, 149 aa, Homo sapiens
WLNFKKLLNEASTTHHCVETGSQEASAIYFTSGTSGLPKMAEHSYSSLGLKAKMDAGWTGLQASDIMWTISDTGWILNILGSLLESWTLGACTFVHLLPKFDPLVILKVFRSTQPIVNQKKFKSTYKLEAPASSCPTFLDQTNVFFKCV

SEQ ID NO: 64967 - protein, 153 aa, Homo sapiens
MGGLFWRSALRGLRCGPRAPGPSLLVRHGSGGPSWTRERTLVAVKPDGVQRRLVGDVIQRFERRGFTLVGMKMLQVWEGYNVVRASRAMIGHTDSAEAAPGTIRGDFSVHISRNVIHASDSVEGAQREIQLWFQSSELVSWADGGQHSSIHPA

SEQ ID NO: 64968 - protein, 302 aa, Homo sapiens
MAPLRFSANLSWLFPELSGLPARVRAAGSSGFEAVEVAWPYAETPEALARAAREAGLRLVLINTPPGDQEKGEMGLGAVPGRQAAFREGLEQAVRSGHCLMGRKLSVPCKGAVARGGLVYLAAFLRLDMIHLMAGRVPQGADRIAVKAEMEAVFLENLRHAAGVLAQEDLVGLLEPINTRITDPQYFLDTPQQAAAILQKVGRPNLQLQMDIFHWQIMDGNLTGNIREFLPIVGHVQVAQVPGRGEPSSPGELNFPYLFQLLEDEGYKGFVGCEYQPRGDTVEGLSWLRSYWDRRGHPEAGQ

SEQ ID NO: 64969 - protein, 239 aa, Homo sapiens
MCAINGRRSGADAWPRGPRCAAPRACAVPRRRLPGLTPNEAPRRRPQGEYLDILAISCDSFDEEVNVLIGRGQGKKNHVENLQKLRRWCRDYRVAFKINSVINRFNVEEDMTEQIKALNPVRWKVFQCLLIEGENCGEDALREAERFVIGDEEFERFLERHKEVSCLVPESNQKMKDSYLILDEYMRFLNCRKGRKDPSKSILDVGVEEAIKFSGFDEKMFLKRGGKYIWSKADLKLDW

SEQ ID NO: 64970 - protein, 410 aa, Homo sapiens
MQPSSLLPLALCLLAAPASALVRIPLHKFTSIRRTMSEVGGSVEDLIAKGPVSKYSQAVPAVTEGPIPEVLKNYMDYYGEIGIGTPPQCFTVVFDTGSSNLWVPSIHCKLLDIACWIHHKYNSDKSSTYVKNGTSFDIHYGSGSLSGYLSQDTVSVPCQSASSASALGGVKVERQVFGEATKQPGITFIAAKFDGILGMAYPRISVNNVLPVFDNLMQQKLVDQNIFSFYLSRDPDAQPGGELMLGGTDSKYYKGSLSYLNVTRKAYWQVHLDQVEVASGLTLCKEGCEAIVDTGTSLMVGPVDEVRELQKAIGAVPLIQGEYMIPCEKVSTLPAITLKLGGKGYKLSPEDYTLKVSQAGKTLCLSGFMGMDIPPPSGPLWILGDVFIGRYYTVFDRDNNRVGFAEAARL

SEQ ID NO: 64971 - protein, 154 aa, Homo sapiens
MAPGSFAEYTVVPASIATPVPSVKPEYLTLLVSGTTAYISLKELGGLSEGKKVLVTAAAGGTGQFAMQLSKKAKCHVIGTCSSDEKSAFLKSLGCDRPINYKTEPVGTVLKQEYPEGVDVVYESVGGAMFDLAVDALATKGRLIVIGFISGYQT

SEQ ID NO: 64972 - protein, 491 aa, Homo sapiens
  MOD_RES (1)..(1): Any amino acid
XTPQYAVPFTLSCAAGRPALVEQTAAVLAWPGGTQQILLPSTWQQLPGVALHNSVQPTAMIPEAMGSGQQLADWRNAHSHGNQYSTIMQQPSLLTNHVTLATAQPLNVGVAHVVRQQQSSSLPSKKNKQSAPVSSKSSLDVLPSQVYSLVGSSPLRTTSSYNSLVPVQDQHQPIIIPDTPSPPVSVITIRSDTDEEEDNKYKPSSSGLKPRSNVISYVTVNDSPDSDSSLSSPYSTDTLSALRGNSGSVLEGPGRVVADGTGTRTIIVPPLKTQLGDCTVATQASGLLSNKTKPVASVSGQSSGCCITPTGYRAQRGGTSAAQPLNLSQNQQSSAAPTSQERSSNPAPRRQQAFVAPLSQAPYTFQHGSPLHSTGHPHLAPAPAHLPSQAHLYTYAAPTSAAALGSTSSIAHLFSPQGSSRHAAAYTTHPSTLVHQVPVSVGPSLLTSASVAPAQYQHQFATQSYIGSSRGSTIYTGYPLSPTKISQYSYL

SEQ ID NO: 64973 - protein, 195 aa, Homo sapiens
MIGGLFIYNHKGEVLISRVYRDDIGRNAVDAFRVNVIHARQQVRSPVTNIARTSFFHVKRSNIWLAAVTKQNVNAAMVFEFLYKMCDVMAAYFGKISEENIKNNFVLIYELLDEILDFGYPQNSETGALKTFITQQGIKSQHQVSSSLSFHPCSFALFLQALPFGAYRGKWITDKRRAVTDHQPGNWADWLAARG

SEQ ID NO: 64974 - protein, 1070 aa, Homo sapiens
MELFQAKDHYILQQGERALWCSRRDGGLQLRPATDLLLAWNPICLGLVEGVIGKIQLHSDLPWWLILIRQKALVGKLPGDHEVCKVTKIAVLSLSEMEPQDLELEVKESKEKEKLERRLLEELLKMFMDSESFYYSLTYDLTNSVQRQSTGERDGRPLWQKTPDVDFWIIPMIQGFVQIEELVVNYTESSDDEKSSPETPPQESTCVDDIHPRFLVALISRRSRHRAGMRYKRRGVDKNGNVANYVETEQLIHVHNHTLSFVQTRGSVPVFWSQVGYRYNPRPRLDRSEKETVAYFCAHFEEQLNIYKKQVIINLVDQAGREKIIGDAYLKQVLLFNNSHLTYVSFDFHEHCRGMKFENVQTLTDAIYDIILDMKWCWVDEAGVICKQEGIFRVNCMDCLDRTNVVQAAIARVVMEQQLKKLGVMPPEQPLPVKCNRIYQIMWANNGDSISRQYAGTAALKGDFTRTGERKLAGVMKDGVNSANRYYLNRFKDAYRQAVIDLMQGIPVTEDLYSIFTKEKEHEALHKENQRSHQELISQLLQSYMKLLLPDDEKFHGGWALIDCDPSLIDATHRDVDVLLLLSNSAYYVAYYDDEVDKVNQYQRLSLENLEKIEIGPEPTLFGKPKFSCMRLHYRYKEASGYFHTLRAVMRNPEEDGKDTLQCIAEMLQITKQAMGSDLPIIEKKLERKSSKPHEDIIGIRSQNQGSLAQGKNFLMSKFSSLNQKVKQTKSNVNIGNLRKLGNFTKPEMKVNFLKPNLKVNLWKSDSSLETMENTGVMDKVQAESDGDMSSDNDSYHSDEFLTNSKSDEDRQLANSLESVGPIDYVLPSCGIIASAPRLGSRSQSLSSTDSSVHAPSEITVAHGSGLGKGQESPLKKSPSAGDVHILTGFAKPMDIYCHRFVQDAQNKVTHLSETRSVSQQASQERNQMTNQVSNETQSESTEQTPSRPSQLDVSLSATGPQFLSVEPAHSVASQKTPTSASSMLELETGLHVTPSPSESSSSRAVSPFAKIRSSMVQVASITQAGLTHGINFAVSKVQKSPPEPEIINQVQQNELKKMFIQCQTRIIQI

SEQ ID NO: 64975 - protein, 262 aa, Homo sapiens
MTACPGAEWTQVSAGPPGKGEPAMRGYLVAIFLSAVFLYYVLHCILWGTNVYWVAPVEMKRRNKIQPCLSKPAFASLLRFHQFHPFLCAADFRKIASLYGSDKFDLPYGMRTSAEYFRLALSKLQSCDLFDEFDNIPCKKCVVVGNGGVLKNKTLGEKIDSYDVIIRMNNGPVLGHEEEVGRRTTFRLFYPESVFSDPIHNDPNTTVILTAFKPHDLRWLLELLMGDKINTNGFWKKPALNLIYKPYQIRILDPFIIRTAAY

SEQ ID NO: 64976 - protein, 316 aa, Homo sapiens
MELWAPQRLPQTRGKATAPSKDPDRGFRRDGHHRPVPHSWHNGERFHQWQDNRGSPQPQQEPRADHQQQPHYASRPGDWHQPVSGVDYYEGGYRNQLYSRPGYENSYQSYQSPTMREEYAYGSYYYHGHPQWLQEERVPRQRSPYIWHEDYREQKYLDEHHYENQHSPFGTNSETHFQSNSRNPCKDSPASNSGQEWPGELFPGSLLAEAQKNKPSLASESNLLQQRESGLSSSSYELSQYIRDAPERDDPPASAAWSPVQADVSSAGPKAPMKFYIPHVPVSFGPGGQLVHVGPSSPTDGQAALVELHSMEGRCT

SEQ ID NO: 64977 - protein, 191 aa, Homo sapiens
  MOD_RES (1)..(1): Any amino acid
XMDDLFDILIKSGEISLPIKEEPSPISKMRPVTASITTMPVNTVVSRPPPQVQMAPPVSLEPMGSLSASLENQLEAFLDGTLPSANEIPPLQSSSEDREPFSLIEDLQNDLLSHSGMLDHSHSPMETSETQFAAGTPCLSLDLSDSNLDNMEWLDITMPNSSSGLTPLSTTAPSMFSADFLDPQDLPLPWD

SEQ ID NO: 64978 - protein, 1075 aa, Homo sapiens
MGTGPGVSGRLAASRPGPGLPLRDSEPSWAGGRARDGDSQVCHHADCQQLHRRGPLNLCEACDSKFHSTMHYDGHVRFDLPPQGSVLARNVSTRSCPPRTSPAVDLEEEEEESSVDGKGDRKSTGLKLSKKKARRRHTDDPSKECFTLKFDLNVDIETEIVPAMKKKSLGEVLLPVFERKGIALGKVDIYLDQSNTPLSLTFEAYRFGGHYLRVKAPAKPGDEGKVEQGMKDSKSLSLPILRPAGTGPPALERVDAQSRRESLDILAPGRRRKNMSEFLGEASIPGQEPPTPSSCSLPSGSSGSTNTGDSWKNRAASRFSGFFSSGPSTSAFGREVDKMEQLEGKLHTYSLFGLPRLPRGLRFDHDSWEEEYDEDEDEDNACLRLEDSWRELIDGHEKLTRRQCHQQEAVWELLHTEASYIRKLRVIINLFLCCLLNLQESGLLCEVEAERLFSNIPEIAQLHRRLWASVMAPVLEKARRTRALLQPGDFLKGFKMFGSLFKPYIRYCMEEEGCMEYMRGLLRDNDLFRAYITWAEKHPQCQRLKLSDMLAKPHQRLTKYPLLLKSVLRKTEEPRAKEAVVAMIGSVERFIHHVNACMRQRQERQRLAAVVSRIDAYEVVESSSDEVDKLLKEFLHLDLTAPIPGASPEETRQLLLEGSLRMKEGKDSKMDVYCFLFTDLLLVTKAVKKAERTRVIRPPLLVDKIVCRELRDPGSFLLIYLNEFHSAVGAYTFQASGQALCRGWVDTIYNAQNQLQQLRAQEPPGSQQPLQSLEEEEDEQEEEEEEEEEEEEGEDSGTSAASSPTIMRKSSGSPDSQHCASDGSTETLAMVVVEPGDTLSSPEFDSGPFSSQSDETSLSTTASSATPTSELLPLGPVDGRSCSMDSAYGTLSPTSLQDFVAPGPMAELVPRAPESPRVPSPPPSPRLRRRTPVQLLSCPPHLLKSKSEASLLQLLAGAGTHGTPSAPSRSLSELCLAVPAPGIRTQGSPQEAGPSWDCRGAPSPGSGPGLVGCLAGEPAGSHRKRCGDLPSGASPRVQPEPPPGVSAQHRKLTLAQLYRIRTTLLLNSTLTASEV

SEQ ID NO: 64979 - protein, 542 aa, Homo sapiens
MLRRALLCLAVAALVRADAPEEEDHVLVLRKSNFAEALAAHKYLLVEFYAPWCGHCKALAPEYAKAAGKLKAEGSEIRLAKVDATEESDLAQQYGVRGYPTIKFFRNGDTASPKEYTGVLSLAGREQRREQARQGRRHSLFESRTYICLGLAGREADDIVNWLKKRTGPAATTLPDGAAAESLVESSEVAVIGFFKDVESDSAKQFLQAAEAIDDIPFGITSNSDVFSKYQLDKDGVVLFKKFDEGRNNFEGEVTKENLLDFIKHNQLPLVIEFTEQTAPKIFGGEIKTHILLFLPKSVSDYDGKLSNFKTAAESFKGKILFIFIDSDHTDNQRILEFFGLKKEECPAVRLITLEEEMTKYKPESEELTAERITEFCHRFLEGKIKPHLMSQELPEDWDKQPVKVLVGKNFEDVAFDEKKNVFVEFYAPWCGHCKQLAPIWDKLGETYKDHENIVIAKMDSTANEVEAVKVHSFPTLKFFPASADRTVIDYNGERTLDGFKKFLESGGQDGAGDDDDLEDLEEAEEPDMEEDDDQKAVKDEL

SEQ ID NO: 64980 - protein, 79 aa, Homo sapiens
MGGAVVDEGPTGVKAPDGGWGWAVLFGCFVITGFSYAFPKPVLPWAHMGPVPTPLECLGDSSFHPWKMEINLRVGGVLG

SEQ ID NO: 64981 - protein, 125 aa, Homo sapiens
MFLLPRLQLLGQMRLCDYVCDLLLEESNVQPVSTPVTVCGDIHGQFYDLCELFRTGGQVPDTNYIFMGDFVDRGYYSLETFTYLLALKAKWPDRITLLRGNHESRQITQVYGFYDECQTKYGNAN

SEQ ID NO: 64982 - protein, 102 aa, Homo sapiens
MAEEFVTLKDVGMDFTLGDWEQLGLEQGDTFWDTALDNCQDLFLLDPPRPNLTSHPDGSEDLEPLAGGSPEATSPDVTETKNSPLMEDFFEEGFSQEIIEML

SEQ ID NO: 64983 - protein, 133 aa, Homo sapiens
VAPLQSLSAVTSSDQRRRSKEARTPGTRDTDSVVFEDVAVNFTQEEWALLGPSQKKLYRDVMQETFVNLASIGENWEEKNIEDHKNQGRKLRSHMVERLCERKEGSQFGETISQTPNPKPNKKTFTRVKPYEC

SEQ ID NO: 64984 - protein, 40 aa, Homo sapiens
MKSCGKRFHDEVGKFRFLNELIKVVSPKYLGSRTSEKVKN

SEQ ID NO: 64985 - protein, 142 aa, Homo sapiens [sequence omitted]

SEQ ID NO: 64986 - protein, 93 aa, Homo sapiens
MVLRSLVEYSQDVLAHPVSEEHLPDVSLIGEFSDPAELGKLLQLVLGCAISCEKKQASPTLIPRPHPENHDAGRIGSACGDGSHPRAHDQRHS

SEQ ID NO: 64987 - protein, 217 aa, Homo sapiens
  MOD_RES (1)..(1): Any amino acid
XLTLQGDALSQADVNLKMPRNNQLLHFAFREDKQWKLQQIQDARNHVSQAIYLLTSRDQSYQFKTGAEVLKLMDAVMLQLTRARNRLTTPATLTLPEIAASGLTRMFAPALPSDLLVNVYINLNKLCLTVYQLHALQPNSTKRVGLSAPGGEPRAQSGVRDPLAQRRPGLLHRLPAALPAAQGQDLRVLQLLELQTLLITAPRSLSPGRRPRPLLIP

SEQ ID NO: 64988 - protein, 58 aa, Homo sapiens
MVFGAMVLLVGLEELTNIRNVERLKKDLRASYCLIDSFLGDSELIGDLTQCVDCVIPP

SEQ ID NO: 64989 - protein, 83 aa, Homo sapiens
MTKFQEAVTFKDVAVAFTEEELGLLDSAQRKLYRDVMLENFRNLVSVGHQSFKPDMISQLEREEKLWMKELQTQRGKHSVWTL

SEQ ID NO: 64990 - protein, 55 aa, Homo sapiens
MGITLHLLLHSDRDPIPDVPAVYFVMPTEENIDRMCQASNLCSHQQEEGHGLCQP

SEQ ID NO: 64991 - protein, 1494 aa, Homo sapiens
MENEIFTPLLEQFMTSPLVTWVKTFGPLAAGNGTNLDEYVALVDGVFLNQVMLQINPKLESQRVNKKVNNDASLRMHNLSILVRQIKFYYQETLQQLIMMSLPNVLIIGKNPFSEQGTEEVKKLLLLLLGCAVQCQKKEEFIERIQGLDFDTKAAVAAHIQEVTHNQENVFDLQWMEVTDMSQEDIEPLLKNMALHLKRLIDERDEHSETIIELSEERDGLHFLPHASSSAQSPCGSPGMKRTESRQHLSVELADAKAKIRRLRQELEEKTEQLLDCKQELEQMEIELKRLQQENMNLLSDARSARMYRDELDALREKAVRVDKLESEVSRYKERLHDIEFYKARVEELKEDNQVLLETKTMLEDQLEGTRARSDKLHELEKENLQLKAKLHDMEMERDMDRKKIEELMEENMTLEMAQKQSMDESLHLGWELEQISRTSELSEAPQKSLGHEVNELTSSRLLKLEMENQSLTKTVEELRTTVDSVEGNASKILKMEKENQRLSKKVEILENEIVQEKQSLQNCQNLSKDLMKEKAQLEKTIETLRENSERQIKILEQENEHLNQTVSSLRQRSQISAEARVKDIEKENKILHESIKETSSKLSKIEFEKRQIKKELEHYKEKGERAEELENELHHLEKENELLQKKITNLKITCEKIEALEQENSELERENRKLKKTLDSFKNLTFQLESLEKENSQLDEENLELRRNVESLKCASMKMAQLQLENKELESEKEQLKKGLELLKASFKKTERLEVSYQGLDIENQRLQKTLENSNKKIQQLESELQDLEMENQTLQKNLEELKISSKRLEQLEKENKSLEQETSQLEKDKKQLEKENKRLRQQAEIKDTTLEENNVKIGNLEKENKTLSKEIGIYKESCVRLKELEKENKELVKRATIDIKTLVTLREDLVSEKLKTQQMNNDLEKLTHELEKIGLNKERLLHDEQSTDDSRYKLLESKLESTLKKSLEIKEEKIAALEARLEESTNYNQQLRQELKTVKKNYEALKQRQDEERMVQSSPPISGEDNKWERESQETTRELLKVKDRLIEVERNNATLQAEKQALKTQLKQLETQNNNLQAQILALQRQTVSLQEQNTTLQTQNAKLQVENSTLNSQSTSLMNQNAQLLIQQSSLENENESVIKEREDLKSLYDSLIKDHEKLELLHERQASEYESLISKHGTLKSAHKNLEVEHRDLEDRYNQLLKQKGQLEDLEKMLKVEQEKMLLENKNHETVAAEYKKLCGENDRLNHTYSQLLKETEVLQTDHKNLKSLLNNSKLEQTRLEAEFSKLKEQYQQLDITSTKLNNQCELLSQLKGNLEEENRHLLDQIQTLMLQNRTLLEQNMESKDLFHVEQRQYIDKLNELRRQKEKLEEKIMDQYKFYDPSPPRRRGNWITLKMRKLIKSKKDINRERQKSLTLTPTRSDSSEGFLQLPHQDSQDSSSVGSNSLEDGQTLGTKKSSMVALKRLPFLRNRPKDKDKMKACYRRSMCKTL

SEQ ID NO: 64992 - protein, 427 aa, Homo sapiens
LAPSWEEHATCLANAEEQDMQRVLIDISEKEAVNLQQDAFVVIGRDTRPSSEKLSQSVIDGVTVLGGQFHDYGLLTTPQLHYMVYCRNTGGRYGKATIEGYYQKLSKAFVELTKQASCSGDEYRSLKVDCANGIGALKLREMEHYFSQGLSVQLFNDGSKGKLNHLCGADFVKSHQKPPQGMEIKSNERCCSFDGDADRIVYYYHDADGHFHLIDGDKIATLISSFLKELLVEIGESLNIGVVQTAYANGSSTRYLEEVMKALFSTAVEMKIKQSAEQLEDKKRKAAKMLENIIDLFNQAAGDAISDMLVIEAILALKGLTVQQWDALYTDLPNRQLKVQVADRRVISTTDAERQAVTPPGLQEAINDLVKKYKLSRAFVRPSGTEDVVRVYAEADSQESADHLAHEVSLAVFQLAGGIGERPQPGF

SEQ ID NO: 64993 - protein, 31 aa, Homo sapiens
MALCLYLGEGPDVLVYSLDFGGHLRMIKRVQ

SEQ ID NO: 64994 - protein, 89 aa, Homo sapiens
MEHKEVVLLLLLFLKSGQGEPLDDYVNTQGPSLFSVTKKQLGAGSREECAAKCEEDKEFTCRYFHRRCTYPEICNSDGHSNITVKSNNV

SEQ ID NO: 64995 - protein, 250 aa, Homo sapiens
LLKLTRDFPQRHEKYQSWAGTFHLCLKKNKYPDSRSTFIKHAGSYLKRGEFLSIHTAITCFFLQISARFLEQVKHECHFFNGTERVRFLDRYFYHQEEYVRFDSDVGEYRAVTELGRPDAEYWNSQKDLLEQRRAEVDTYCRHNYGVVESFTVQRRVYPEVTVYPAKTQPLQHHNLLVCSVNGFYPGSIEVRWFRNGQEEKTGVVSTGLIQNGDWTFQTLVMLETVPRSGEVYTCQVEHPSLTSPLTVEW

SEQ ID NO: 64996 - protein, 49 aa, Homo sapiens
MRSVSYVQRVALEFSGSLFPHAICLGDVDNDTLNELVVGDTSGKNADPE

SEQ ID NO: 64997 - protein, 158 aa, Homo sapiens
LFPLLEEDPNIFAYACDFSPRAIEYVKQNPLYDTERCKVFQCDLTKDDLLDHVPPESVDVVMLIFVLSAVHPDKMHLVLQNIYKCHGCSSELRQPWDKDDFAVTWDPWSPAIRLLGEGLRHVHETLKQALYCTIFTQHLEGTDLAPALEELTSLLWCQ

SEQ ID NO: 64998 - protein, 400 aa, Homo sapiens
MSSQAFPAEEDHHNEERQTKKKRKTKHRHKFSEELLQELKEIFGENGYPDFTTRKTLANKFDCPVNVINNWFQNNRARLPPEERQRIFLTWKKHDFPVQACPFLSLQETQAAASNYATEQSFSCAKRALMRRPGCSLLEKQRIACQQMGYNCFSLENQETPSQQVGSMCSSLEKQGIPSQQVGSQCSYLVAGTEKHPGYALEYGGDTGSEHSTAYRFLSYNSAECLHPPPSSVPYFHGERTETRESQHASPFLLDYAQGAYGVKKDHCLCSFCLSLLQEQQQNDWQYHPQQHQQPQNYSEGMMLQEQLPMDSGPWDLEKQWPSAQSQLQSQLPQNNGKPLCSQLQHVPPQIAANSPLLPLGQDMQVGASSNSGLKCSSFRLRGLHGPATGTQGCSFAKYC

SEQ ID NO: 64999 - protein, 360 aa, Homo sapiens
MDSELMHSIVGSYHKPPERVFVPSFTQNEPSQNCHPANLEVTSPKILHSPNSQEKQLEYTKRMVLNVEREKNMILEQQAQLQREKEQDQMKLYAKLEKLDVLEKECFRLTTTQKTAEDKIKHLEEKLKEEEHQRKLFQDKASELQTGLEISKIIMSSVSNLKHSKEKKKSSKKTKCIKRRPPWQICSKFGALPFVAEKPSRTTSWCKAIPPDSEKSISICDNLSELLMAMQDELDQMSMEHQELLKQMKETESHSVCDDIECELECLLKKMEIKGEQISKLKKHQDSVCKLQQKVQNSKMSEASGIQQEDSYPKGSKNIKNSPRKCLTDTNLFQKNSSFHPIRVHNLQMKLRRDDIMWEQ

SEQ ID NO: 65000 - protein, 262 aa, Homo sapiens
MELIQDISRPPLEYVKGVPLIKYFAEALGPLQSFQARPDDLLISTYPKSGTTWVSQILDMIYQGGDLEKCHRAPIFMRVPFLEFKVPGIPSGVCVLGARGVEEDRAGASAHQTFPDPLLRDGDSEKHTSPTTPEDTPAPGSAPPDSVGSEGQAIQASTEEPSAAQNPKREIQKILEFVGRSLPEETVDLMVEHTSFKEMKKNPMTNYTTVRREFMDHSISPFMRKGMAGDWKTTFTVAQNERFDADYAKKMAGCSLSFRSEL

SEQ ID NO: 65001 - protein, 251 aa, Homo sapiens
MPMRVPEEVTLRNPGSSGRKERPEAGTGSWLGRTRNQVINTLADHHHRGTDFGGSPWLHVIIAFPTSYKVVITLWIVYLWVSLLKTIFWSRNGHDGSTDVQQRAWRSNRRRQEGLRSICMHTKKRVSSFRGNKIGLKDVITLRRHVETKVRAKIRKRKVTTKINHHDKINGKRKTARKQKMFQRAQELRRRAEDYHKCKIPPSARKALCNWVRMAAAEHRHSSGLPYWPYLTAETLKNRMGHQPPPPTQQH

SEQ ID NO: 65002 - protein, 107 aa, Homo sapiens
MEVTDRIASLEQRVQMQEDDIQLLKSALADVVRRLNITEEQQAVLNRKGPTKARPLMQTLPLRTTVNNGTVLPKKPTGSLPSPSGVRKETAVPATKSNIKRTSSSER

SEQ ID NO: 65003 - protein, 116 aa, Homo sapiens
SMSVVLRQTLWRRRAVAVAALSVSRVPTRSLRTSTWRLAQDQTQDTQLITVDEKLDITTLTGVPEEHIKTRKVRIFVPARNNMQSGVNNTKKWKMEFDTRERWENPLMGWASTMEL

SEQ ID NO: 65004 - protein, 272 aa, Homo sapiens
MAGSADSYTSRPSDSDVSLEEDREAIRQEREQQAAIQLERAKSKPVAFAVKTNVSYCGALDEDVPVPSTAISFDAKDFLHIKEKYNNDWWIGRLVKEGCEIGFIPSPLRLENIRIQQEQKRGRFHGGKSSGNSSSSLGEMVSGTFRATPTSTAKQKQKVTEHIPPYDVVPSMRPVVLVGPSLKGYESQRMRHSNHSTENSPIERRSLMTSDENYHNERARKSRNRLSSSSQHSRDHYPLVEEDYPDSYQDTYKPHRNRGSPGGYSHDSRHRL

SEQ ID NO: 65005 - protein, 85 aa, Homo sapiens
MLVGSQSFSPGGPNGIIRSQSFAGFSGLQERRSRCNSFIENSSALKKPQAKLKKMHNLGHKNNNPPKEPQPKRVEEVYRALKNGL

SEQ ID NO: 65006 - protein, 188 aa, Homo sapiens
  MOD_RES (1)..(1): Any amino acid
XLCTVSYGKVKLVLKHNRYFVESCHPDVIQHLLQDPVIRECRLRNSEGEATELITETFTSKSAHLPLSQISKTAESSGGPSTSRVTDPQGKSDIPMDLFDFYEQMDKDEEEEEETQTVSFEVKQEMIEELQKRCIHLEYPLLAEYDFRNDSVNPDINIDLKPTAVLRPYQEKSLRKMFGNGRARSGVI

SEQ ID NO: 65007 - protein, 58 aa, Homo sapiens
MVNPTVFFDIAVDGEPLGRVSFECVSMHGVRKKPSYNSTKSSMDGCVGAGLSHVFGVE

SEQ ID NO: 65008 - protein, 140 aa, Homo sapiens
MAHLMMFRDVAVDFSQEEWECLDLEQRDLYRDVMLENYSNMVSLGFCIYQPEAFSLLEKGKEPWKILRDETRGPCPDMQSRCQTKKLLPKNGIFEREIAQLEIMRICKNHSLDCLCFRGDWEGNTQFQTLQDNQEECFKQ

SEQ ID NO: 65009 - protein, 129 aa, Homo sapiens
MADEDGEGIHPSAPHRNGGGGGGGGSGLHCAGNGGGGGGGPRVVRIVKSESGYGFNVRGQVSEGGQLRSINGELYAPLQHVSAVLPGGAADRAGVRKGDRILEVYIMFTWQGGSCVLSGTGSLLSYTRT

SEQ ID NO: 65010 - protein, 2346 aa, Homo sapiens
MSEPGGGGGEDGSAGLEVSAVQNVADVSVLQKHLRKLVPLLLEDGGEAPAALEAALEEKSALEQMRKFLSDPQVHTVLVERSTLKEDVGDEGEEEKEFISYNINIDIHYGVKSNSLAFIKRTPVIDADKPVSSQLRVLTLSEDSPYETLHSFISNAVAPFFKSYIRESGKADRDGDKMAPSVEKKIAELEMGLLHLQQNIEIPEISLPIHPMITNVAKQCYERGEKPKVTDFGDKVEDPTFLNQLQSGVNRWIREIQKVTKLDRDPASGTALQEISFWLNLERALYRIQEKRESPEVLLTLDILKHGKRFHATVSFDTDTGLKQALETVNDYNPLMKDFPLNDLLSATELDKIRQALVAIFTHLRKIRNTKYPIQRALRLVEAISRDLSSQLLKVLGTRKLMHVAYEEFEKVMVACFEVFQTWDDEYEKLQVLLRDIVKRKREENLKMVWRINPAHRKLQARLDQMRKFRRQHEQLRAVIVRVLRPQVTAVAQQNQGEVPEPQDMKVAEVLFDAADANAIEEVNLAYENVKEVDGLDVSKEGTEAWEAAMKRYDERIDRVETRITARLRDQLGTAKNANEMFRIFSRFNALFVRPHIRGAIREYQTQLIQRVKDDIESLHDKFKVQYPQSQACKMSHVRDLPPVSGSIIWAKQIDRQLTAYMKRVEDVLGKGWENHVEGQKLKQDGDSFRMKLNTQEIFDDWARKVQQRNLGVSGRIFTIESTRVRGRTGNVLKLKVNFLPEIITLSKEVRNLKWLGFRVPLAIVNKAHQANQLYPFAISLIESVRTYERTCEKVEERNTISLLVAGLKKEVQALIAEGIALVWESYKLDPYVQRLAETVFNFQEKVDDLLIIEEKIDLEVRSLETCMYDHKTFSEILNRVQKAVDDLNLHSYSNLPIWVNKLDMEIERILGVRLQAGLRAWTQVLLGQAEDKAEVDMDTDAPQVSHKPGGEPKIKNVVHELRITNQVIYLNPPIEECRYKLYQEMFAWKMVVLSLPRIQSQRYQVGVHYELTEEEKFYRNALTRMPDGPVALEESYSAVMGIVSEVEQYVKVWLQYQCLWDMQAENIYNRLGEDLNKWQALLVQIRKARGTFDNAETKKEFGPVVIDYGKVQSKVNLKYDSWHKEVLSKFGQMLGSNMTEFHSQISKSRQELEQHSVDTASTSDAVTFITYVQSLKRKIKQFEKQVELYRNGQRLLEKQRFQFPPSWLYIDNIEGEWGAFNDIMRRKDSAIQQQVANLQMKIVQEDRAVESRTTDLLTDWEKTKPVTGNLRPEEALQALTIYEGKFGRLKDDREKCAKAKEALELTDTGLLSGSEERVQVALEELQDLKGVWSELSKVWEQIDQMKEQPWVSVQPRKLRQNLDALLNQLKSFPARLRQYASYEFVQRLLKGYMKINMLVIELKSEALKDRHWKQLMKRLHVNWVVSELTLGQIWDVDLQKNEAIVKDVLLVAQGEMALEEFLKQIREVWNTYELDLVNYQNKCRLIRGWDDLFNKVKEHINSVSAMKLSPYYKVFEEDALSWEDKLNRIMALFDVWIDVQRRWVYLEGIFTGSADIKHLLPVETQRFQSISTEFLALMKKVSKSPLVMDVLNIQGVQRSLERLADLLGKIQKALGEYLERERSSFPRFYFVGDEDLLEIIGNSKNVAKLQKHFKKMFAGVSSIILNEDNSVVLGISSREGEEVMFKTPVSITEHPKINEWLTLVEKEMRVTLAKLLAESVTEVEIFGKATSIDPNTYITWIDKYQAQLVVLSAQIAWSENVETALSSMGGGGDAAPLHSVLSNVEVTLNVLADSVLMEQPPLRRRKLEHLITELVHQRDVTRSLIKSKIDNAKSFEWLSQMRFYFDPKQTDVLQQLSIQMANAKFNYGFEYLGVQDKLVQTPLTDRCYLTMTQALEARLGGSPFGPAGTGKTESVKALGHQLGRFVLVFNCDETFDFQAMGRIFVGLCQVGAWGCFDEFNRLEERMLSAVSQQVQCIQEALREHSNPNYDKTSAPITCELLNKQVKVSPDMAIFITMNPGYAGRSNLPDNLKKLFRSLAMTKPDRQLIAQVMLYSQGFRTAEVLANKIVPFFKLCDEQLSSQSHYDFGLRALKSVLVSAGNVKRERIQKIKREKEERGEAVDEGEIAENLPEQEILIQSVCETMVPKLVAEDIPLLFSLLSDVFPGVQYHRGEMTALREELKKVCQEMYLTYGDGEEVGGMWVEKVLQLYQITQINHGLMMVGPSGSGKSMAWRVLLKALERLEGVEGVAHIIDPKAISKDHLYGTLDPNTREWTDGLFTHVLRKIIDSVRGELQKRQWIVFDGDVDPEWVENLNSVLDDNKLLTLPNGERLSLPPNLQEPAMDS

SEQ ID NO: 65011 - protein, 140 aa, Homo sapiens
  MOD_RES (1)..(1): Any amino acid
XKSPLGLKGKEPVVYPWMKKIHVSAVNPSYNGGEPKRSRTAYTRQQVLELEKEFHFNRYLTRRRRIEIAHTLCLSERQVKIWFQNRRMKWKKDHKLPNTKMRSSNSASASAGPPGKAQTQSPHLHPHPHPSTSTPVPSSI

SEQ ID NO: 65012 - protein, 1178 aa, Homo sapiens
MANGGGGGGGSSGGGGGGGGSSLRMSSNIHANHLSLDASSSSSSSSSSSSSSSSSSSSSSVHEPKMDALIIPVTMEVPCDSRGQRMWWAFLASSMVTFFGGLFIILLWRTLKYLWTVCCHCGGKTKEAQKINNGSSQADGTLKPVDEKEEAVAAEVGWMTSVKDWAGVMISAQTLTGRVLVVLVFALSIGALVIYFIDSSNPIESCQNFYKDFTLQIDMAFNVFFLLYFGLRFIAANDKLWFWLEVNSVVDFFTVPPVFVSVYLNRSWLGLRFLRALRLIQFSEILQFLNILKTSNSIKLVNLLSIFISTWLTAAGFIHLVENSGDPWENFQNNQALTYWECVYLLMVTMSTVGYGDVYAKTTLGRLFMVFFILGGLAMFASYVPEIIELIGNRKKYGGSYSAVSGRKHIVVCGHITLESVSNFLKDFLHKDRDDVNVEIVFLHNISPNLELEALFKRHFTQVEFYQGSVLNPHDLARVKIESADACLILANKYCADPDAEDASNIMRVISIKNYHPKIRIITQMLQYHNKAHLLNIPSWNWKEGDDAICLAELKLGFIAQSCLAQGLSTMLANLFSMRSFIKIEEDTWQKYYLEGVSNEMYTEYLSSAFVGLSFPTVCELCFVKLKLLMIAIEYKSANRESRILINPGNHLKIQEGTLGFFIASDAKEVKRAFFYCKACHDDITDPKRIKKCGCKRLEDEQPSTLSPKKKQRNGGMRNSPNTSPKLMRHDPLLIPGNDQIDNMDSNVKKYDSTGMFHWCAPKEIEKVILTRSEAAMTVLSGHVVVCIFGDVSSALIGLRNLVMPLRASNFHYHELKHIVFVGSIEYLKREWETLHNFPKVSILPGTPLSRADLRAVNINLCDMCVILSANQNNIDDTSLQDKECILASLNIKSMQFDDSIGVLQANSQGFTPPGMDRSSPDNSPVHGMLRQPSITTGVNIPIITELVNDTNVQFLDQDDDDDPDTELYLTQPFACGTAFAVSVLDSLMSATYFNDNILTLIRTLVTGGATPELEALIAEENALRGGYSTPQTLANRDRCRVAQLALLDGPFADLGDGGCYGDLFCKALKTYNMLCFGIYRLRDAHLSTPSQCTKRYVITNPPYEFELVPTDLIFCLMQFDHNAGQSRASLSHSSHSSQSSSKKSSSVHSIPSTANRQNRPKSRESRDKQNRKEMVYR

SEQ ID NO: 65013 - protein, 133 aa, Homo sapiens
  MOD_RES (1)..(1): Any amino acid
XYELREEHLDKIFKHRELQQKLVDAKLEQAQEMMKEAEERHKREKEYLLNQAAEWKLQAKVLKEQETVLQAQVRPGGRGMGVLSSLSPDKKAGAKGGQQKSSYVAGDGGMGIGNEEQLHIYSYFQVKIKAQYY

SEQ ID NO: 65014 - protein, 75 aa, Homo sapiens
  MOD_RES (1)..(1): Any amino acid
XYRDAVFLAERLYAEGLQKGNKSYLVECLISRKAMMILLLSLVIQLALLFHCWDMYIARQIGLPKDQNVTKRALV

SEQ ID NO: 65015 - protein, 743 aa, Homo sapiens
  MOD_RES (1)..(1): Any amino acid
XAELYQYYLAQNIGLTGMKLENPADPQLMINPFQLDPATAAALAPGLGELSPYISDPALKLFQCAVCNKFTSDSLEALSVHVSSERSLPEEEWRAVIGDIYQCKLCNYNTQLKANFQLHCKTDKHMQKYQLVAHIKEGGKSNEWRLKCIAIGNPVHLKCNACDYYTNSVDKLRLHTTNHRHEAALKLYKHLQKQEGAVNPESCYYYCAVCDYTTKVKLNLVQHVRSVKHQQTEGLRKLQLHQQGLAPEEDNLSEIFFVKDCPPNELETASLGARTCDDDLTEQQLRSTSGIITPEKELKVSVAGGTQPLLLAKEEDVATKRSKPTEDNKFCHEQFYQCPYCNYNSRDQSRIQMHVLSQHSVQPVICCPLCQDVLSNKMHLQLHLTHLHSVSPDCVEKLLMTVPVPDVMMPNSMLLPAAASEKSERDTPAAVTAEGSGKYSGESPMDDKSMAGLEDSKANVEVKNEEQKPTKEPLEVSEWNKNSSKDVKIPDTLQDQLNEQQKRQPLSVSDRHVYKYRCNHCSLAFKTMQKLQIHSQYHAIRAATMCNLCQRSFRTFQALKKHLEAGHPELSEAELQQLYASLPVNGELWAESETMSQDDHGLEQEMEREYEVDHEGKASPVGSDSSSIPDDMGSEPKRTLPFRKGPNFTMEKFLDPSRPYKCTVCKESFTQKNILLVHYNSVSHLHKLKKVLQEASSPVPQETNSNTDNKPYKCSICNVAYSQSSTLEIHMRSVLHQTKARAA

SEQ ID NO: 65016 - protein, 63 aa, Homo sapiens
MERAISPGLLVRALLLLLLLLGLAARTVAAGRARGLPAPTAESRSLGVRNQTMRQSCDRAAGH

SEQ ID NO: 65017 - protein, 147 aa, Homo sapiens
MATRGGAGVAMAVWSLLSARAVTAFLLLFLPRFLQAQTFSFPFQQPEKCDNNQYFDISALSCVPCGANQRQDARGTSCVCLPGFQMISNNGGPAIICKKCPENMKGVTEDGWNCISCPSDLTAEGKCHCPIGHILGSHSCPGWSVVV

SEQ ID NO: 65018 - protein, 165 aa, Homo sapiens
MQDYNKDDMSYRRISAVEPKTALPFNRFLPNKSRQPSYVPAPLRKKKPDKHEDNRRSWASPVYTEADGTFSSNQRRIWGTNVENWPTVQGTSKSSCYLEEEKAKTRSIPNIVKDDLYVRKLSPVMPNPGNAFDQFLPKCWTPEDVNWKRIKRETYKPWYKEFQGF

SEQ ID NO: 65019 - protein, 124 aa, Homo sapiens
MQEHKLKVARLDNIFLTRMHWSNVGGLSGMILTLKETGLPKCVLSGPPQLEKYLEAIKIFSGPLKGIELAVRPHSAPEYEDETMTVYQIPIHSEQRRGKHQPWQSPERPLSRLSPERSSDSESN

SEQ ID NO: 65020 - protein, 424 aa, Homo sapiens
MQYSAMDEFHPFIEALLPHVRAIAYTWFNLQARKRKYFKKHEKRMSKDEERAVKDELLSEKPEIKQKWASRLLAKLRKDIRQEYREDFVLTVTGKKHPCCVLSNPDQKDSGQSGSPSHNDPAKNPPGYLEDSFVKSGVFNVSELVRVSRTPITQGTGVNFPIGEIPSQPYYHDMNSGVNLQRSLSSPPSSKRPKTISIDENMEPSPTGDFYPSPSSPAAGSRTWHERDQDMSSPTTMKKPEKPLFSSASPQDSSPRLSTFPQHHHPGIPGVAHSVISTRTPPPPSPLPFPTQAILPPAPSSYFSHPTIRYPPHLNPQDTLKNYVPSYDPSSPQTSQPNGSGQVVGKVPGHFTPVLAPSPHPSAVRPVTLSMTDTKPITTSTEGEAASPTATTYTASGTSQANRYVGLSPRDPSFLHQQQSWYLG

SEQ ID NO: 65021 - protein, 545 aa, Homo sapiens
  MOD_RES (1)..(1): Any amino acid
XWRLPRALCVHAAKTSKLSGPWSRPAAFMSTLLINQPQYAWLKELGLREENEGVYNGSWGGRGEVITTYCPANNEPIARVRQASVADYEETVKKAREAWKIWADIPAPKRGEIVRQIGDALREKIQVLGSLVSLEMGKILVEGVGEVQEYVDICDYAVGLSRMIGGPILPSERSGHALIEQWNPVGLVGIITAFNFPVAVYGWNNAIAMICGNVCLWKGAPTTSLISVAVTKIIAKVLEDNKLPGAICSLTCGGADIGTAMAKDERVNLLSFTGSTQVGKQVGLMVQERFGRSLLELGGNNAIIAFEDADLSLVVPSALFAAVGTAGQRCTTARRLFIHESIHDEVVNRLKKAYAQIRVGNPWDPNVLYGPLHTKQAVSMFLGAVEEAKKEGGTVVYGGKVMDRPGNYVEPTIVTGLGHDASIAHTETFAPILYVFKFKNEEEVFAWNNEVKQGLSSSIFTKDLGRIFRWLGPKGSDCGIVNVNIPTSGAEIGGAFGGEKHTGGGRESGSDAWKQYMRRSTWKMYTKRVYWDDFSFILITVAASS

SEQ ID NO: 65022 - protein, 160 aa, Homo sapiens
MTDVPATFTQAECNGDKPPENGQQTITKISEELTDVDSPLPHYRVEPSLEGALTKGSQEERRKLQGNMLLNSSMEDKMLKENPEEKLFIVHKAITDLSLQETSADEMTFREGHQWEKIPLSGSNQEIRRQKERITEQPLKEEEDEDRKNKGHQAAEIEWL

SEQ ID NO: 65023 - protein, 152 aa, Homo sapiens
MSGPVPSRARVYTDVNTHRPREYWDYESHVVEWGNQDDYQLVRKLGRGKYSEVFEAINITNNEKVVVKILKYLLFTTATTANPASQKYAIARSITQSITRSVTQSNVETTNHLKLAVHPVSGRFNDGLMCLPQKCKVFHSIPVHCWGASHAL

SEQ ID NO: 65024 - protein, 674 aa, Homo sapiens
MKKFFDSRREQGGSGLGSGSSGGGGSTSGLGSGYIGRVFGIGRQQVTVDEVLAEGGFAIVFLVRTSNGMKCALKRMFVNNEHDLQVCKREIQIMRDLSGHKNIVGYIDSSINNVSSGDVWEVLILMDFCRGGQVVNLMNQRLQTGFTENEVLQIFCDTCEAVARLHQCKTPIIHRDLKVENILLHDRGHYVLCDFGSATNKFQNPQTEGVNAVEDEIKKYTTLSYRAPEMVNLYSGKIITTKADIWALGCLLYKLCYFTLPFGESQVAICDGNFTIPDNSRYSQDMHCLIRYMLEPDPDKRPDIYQVSYFSFKLLKKECPIPNVQNSPIPAKLPEPVKASEAAAKKTQPKARLTDPIPTTETSIAPRQRPKAGQTQPNPGILPIQPALTPRKRATVQPPPQAAGSSNQPGLLASVPQPKPQAPPSQPLPQTQAKQPQAPPTPQQTPSTQAQGLPAQAQATPQHQQQLFLKQQQQQQQPPPAQQQPAGTFYQQQQAQTQQFQAVHPATQKPAIAQFPVVSQGGSQQQLMQNFYQQQQQQQQQQQQQQLATALHQQQLMTQQAALQQKPTMAAGQQPQPQPAAAPQPAPAQEPAIQAPVRQQPKVQTTPPPAVQGQKVGSLTPPSSPKTQRAGHRRILSDVTHSAVFGVPASKSTQLLQAAAAEAELLDPGRQTLQ

SEQ ID NO: 65025 - protein, 242 aa, Homo sapiens
MNDTHVNEDLKAIKFSEADYFGNVLQTRKYLAQSDFFWLRKAVPKTEWFTNPTTVNAFYSASTNQIRFPAGELQKPFFWGTEYPRSLSYGAIGVIVGHEFTHGFDNNGRKYDKNGNLDPWWSTESEEKFKEKTKCMINQYSNYYWKKAGLNVKGKRTLGENIADNGGLREAFRAYRKWINDRRQGLEEPLLPGITFTNNQLFFLSYAHGMQRWRKALGMDVEERNPKSSFHTGRRQETGRIL

SEQ ID NO: 65026 - protein, 102 aa, Homo sapiens
MAEMNPAQGHVVFEDVAIYFSQEEWGHLDEAQRLLYRDVMLENLALLSSLGSWHGAEDEEAPSQQGFSVGVSEVTASKPCLSSQKVHPSETCGPPLKDILCL

SEQ ID NO: 65027 - protein, 104 aa, Homo sapiens
NANGPEGPNYRSELHIFPASPGASLGGPEGAHPAAAPAGCVPSPSALAPGYAEPLKGVPPEKFNHTAISKGYRCPWQEFVSYRDYQSDGRSHTPSPNDYRNFNK

SEQ ID NO: 65028 - protein, 84 aa, Homo sapiens
MPKSKELVSSSSSGSDSDSEVDKKLKRKKQVAPEKPVKKQKTGETSRALSSSKQSSSSRDDNMFQELFITFITGVPPAQEVSGV

SEQ ID NO: 65029 - protein, 71 aa, Homo sapiens
MEVLRPQLIRIDGRNYRKNPVQEQTYQHEEDEEDFYQGSMECADEPCDAYEVEQTPQGFRSTLRAPSLLYK

SEQ ID NO: 65030 - protein, 159 aa, Homo sapiens
MSSKQATSPFACAADGEDAMTQDLTSREKEEGSDQHVASHLPLHPIMHNKPHSEELPTLVSTIQQDADWDSVLSSQQRMESENNKLCSLYSFRNTSTSPHKPDEGSRDREIMTSVTFGTPERRKGSLADVVDTLKQKKLEEMTRTEQEASLSFKISGVP

SEQ ID NO: 65031 - protein, 155 aa, Homo sapiens
  MOD_RES (1)..(1): Any amino acid
XEPETTPTPNPPTTEEEKTESNQEVANPEHYIKHPLQNRWALWFFKNDKSKTWQANLRLISKFDTVEDFWALYNHIQLSSNLMPGCDYSLFKDGIEPMWEDEKNKRGGRWLITLNKQQRRSDLDRFWLETEGIQGKVRTSSKDSDWLSVPRRHSY

SEQ ID NO: 65032 - protein, 186 aa, Homo sapiens
  MOD_RES (1)..(1): Any amino acid
XLKMQRVEHAVSEFIKYEISFNVYMFHGGTNFGFMNGATYFGKHSGIVTSYDYDAVLTEAGDYTEKYLKLQKLFQSVSATPLPRVPKLPPKAVYPPVRPSLYLPLWDALSYLNEPVRSRQPVNMENLPINNGSGQSYGLVLYEKSICSGGRLRAHAHDVAQVFLDETMIGILNENNKDLHIPELRE

SEQ ID NO: 65033 - protein, 100 aa, Homo sapiens
MEPGLEHALRRTPSWSSLGGSEHQEMSFLEQENSSSWPSPAVTSSSERIRGKRRAKALRWTRQKSVEEGEPPGPRSRPAAESTGLEATFPKTTPLAQADP

SEQ ID NO: 65034 - protein, 169 aa, Homo sapiens
MISVKRNTWRALSLVIGDCRKKGNFEYCQDRTEKHSTMPDSPVDVKTQSRLTPPTMPPPPTTQGAPRTSSFTPTTLTNGTSHSPTALNGAPSPPNGFSNGPSSSSSSSLANQQLPPACGARQLSKLKRFLTTLQQFGNDISPEIGERVRTLVLGLVNSTLTIEEFHSKL

SEQ ID NO: 65035 - protein, 315 aa, Homo sapiens
MATASPAADGGRGRPWEGGLVSWPPAPPLTLPWTWMGPSWGQHPGHWGFPALTEPSASPAAGLGIFEVRRVLDASGCSMLAPLQTGAARFSSYLLSRARKVLGSHLFSPCGVPEFCSISTRKLAAHGFGASMAAMVSFPPQRYHYFLVLDFEATCDKPQIHPQEIIEFPILKLNGRTMEIESTFHMYVQPVVHPQLTPFCTELTGIIQAMVDGQPSLQQVLERVDEWMAKEGLLDPNVKSIFVTCGDWDLKVMLPGQCQYLGLPVADYFKQWINLKKAYSFAMGCWPKNGLLDMNKGLSLQHIGRPHSGIAFFLT

SEQ ID NO: 65036 - protein, 27 aa, Homo sapiens
MGIIPRIARDIFNHIYSMDENLEFHIK

SEQ ID NO: 65037 - protein, 22 aa, Homo sapiens
MSKQQPTQFINPETPGYVGFAN

SEQ ID NO: 65038 - protein, 197 aa, Homo sapiens
MGTRRKVLVLGSGYISEPVLEYLSRDGNIEITVGSDMKNQIEQLGKKYNINPVSMDICKQEEKLGFLVAKQDLVISLLPYVLHPLVAKACITNKVNMVTASYITPALKELEKSVEDAGITIIGELGLDPGLDHMLAMETIDKAKEVGATIESYISYCGGLPAPEHSNNPLRYKFSWSPVGVLMNVMQSATYLLDGKD

SEQ ID NO: 65039 - protein, 87 aa, Homo sapiens
  MOD_RES (1)..(1): Any amino acid
XSVMAPVDVDLNLVSNILESYSSQAGLAGPASNLLQSMGVQLPDNTDHRPTNGVSLCCPGWSAVALSWLNASSTSQVHAILLPQPPE

SEQ ID NO: 65040 - protein, 122 aa, Homo sapiens
NDLWLNEGFASYVEYLGADYAEPTWNLKDLMVLNDVYRVMAVDALASSHPLSTPASEINTPAQISELFDAISYSKVQPAPRGARGRRAPQSSGCSPASCPRTYSSRAWRPTSTPLPTRTPST

SEQ ID NO: 65041 - protein, 35 aa, Homo sapiens
  MOD_RES (1)..(1): Any amino acid
XITYSNSCYYIGKERRTWEERVCWPVLRRTLICFL

SEQ ID NO: 65042 - protein, 194 aa, Homo sapiens
  MOD_RES (1)..(1): Any amino acid
XGVEPSLEHLLDIQGLPKRQAGAGSSSPEAPLRSEDSTCLPPSPGLITVRLKFLNDTEELAVARPEDTVGALKSKYFPGQESQMKLIYQGRLLQDPARTLRSLNITDNCVIHCHRSPPGSAVPGPSASLAPSATEPPSLGVNVGSLMVPVFVVLLGVVWYFRINYRQFFTAPATVSLVGVTVFFSFLVFGMYGR

SEQ ID NO: 65043 - protein, 96 aa, Homo sapiens
MKEKNINPEKDASFKICMKMCLLQITGYKQLYLDVESVRKRPYDSDNLQHEELLMKLWNLLMPTKKLNARISKQWAEIGFQGDDPKTDFRGMGILG

SEQ ID NO: 65044 - protein, 126 aa, Homo sapiens
LDQHQHLKEKAEARKESAKEKQLKEEEKILESVAEGRALMSVKEMAKGITYDDPIKTSWTPPRYVLSMSEERHERVRKKYHILVEGDGIPPPIKSFKEMKFPAVSSSATCRGSASFTGFGALRKYL

SEQ ID NO: 65045 - protein, 144 aa, Homo sapiens
MKGSNRNKDHSAEGEGVGKRPKRKCLQWHPLLAKKLLDFSEEEEEEDEEEDIDKVQLLGADGLEQDVGETEDDESPEQRARRPMNAFLLFCKRHRSLVRQEHPRLDNRGATKILADWWAVLDPKEKQKYTDMAKEYKDAFMKAN

SEQ ID NO: 65046 - protein, 178 aa, Homo sapiens
CEGRQAKVKSSMGSMFRQQSIEDKEDKPPPRQKFIQSEMSEAVERARKRREEEERRAREERLAACAAKLKQLDQKCKQARKAGEARKQAEKEVPWSPSAEKASPQENGPAVHKGSPEFPAQETPTTFPEEAPTVSPAVAQSNSSEEEAREAGSPAQEFKYQKSLPPRFQRQQQQQQQE

SEQ ID NO: 65047 - protein, 105 aa, Homo sapiens
TCFYNSRANISCVWSQDGALQDTSCQVHAWPDRRSLQLPWDQAGMREQDKVPMREECHGASGGGSAPHSGWHRGPSLALLPGAILAAERSEKSPLGQLCGSFLFF

SEQ ID NO: 65048 - protein, 40 aa, Homo sapiens
MKAADEPAYLTVGTDVSAKYRGAFCEAKIKTVKRLVKVKN

SEQ ID NO: 65049 - protein, 244 aa, Homo sapiens
MGILEKISEIEKEIARTQKNKATEYHLGLLKAKLAKYRAQLLEPSKSASSKGEGFDVMKSGDARVALIGFPSVGKSTFLSLMTSTASEAASYEFTTLTCIPGVIEYKGANIQLLDLPGIIEGAAQGKGRGRQVIAVARTADVIIMMLDATKGEVQRSLLEKELESVGIRLNKHKPNIYFKPKKGGGISFNSTVTLTQCSEKLVQLILHEYNLQCRSAFPRRLLPGRVHRCDRGQPGVHALPVCL

SEQ ID NO: 65050 - protein, 272 aa, Homo sapiens
  MOD_RES (1)..(1): Any amino acid
XKQTHSKARNSPKLFPVRGNKEENSGPSHDPSQNETLGICSSNSLSSQDVAKLSEMIVPENRAIQLKPKEEHFGDGDPESTGKRSSELLDPTTPMRTKCIELLYAALTSSSTDQPKADLWQNFAREIEEHVFTLYSKNIKKYKTCIRSKVANLKNPRNSHLQQNLLSGTTSPREFAEMTVMEMANKELKQLRASYTESCIQEHYLPQVIDGTQTNKIKCRRCEKYNCKVTVIDRGTLFLPSWVRNSNPDEQMMTYVICNECGEQWYHSKWVC

SEQ ID NO: 65051 - protein, 376 aa, Homo sapiens
MVAEVDSMPAASSVKKPFVLRSKMGKWCRHCFPCCRGSGKSNVGTSGDQDDSTMKTLRSKMGKWCCHCFPCCRGSGKSNVGTSGDHDDSAMKTLRSKMGKWCCHCFPCCRGSGKSNVGAWGDYDDSAFVEPRYHVRREDLDKLHRAAWWGKVARKDLIVMLRDTDVNKQDKQKRTALHLASANGNSGVVKLLLDRRCQLNVLDNKKRTALTKAVQCQEDECALMLLEHGTDPNIPDEYGNTTLHYAIYNEDKLMAKALLLYGADIESKNKHGLTPLLLGVHEQKQQVVKFLIKKKANLNALDRYGRTALILAVCCGSASIVSLLLEQNIDVSSQDLSGQTAREYAVSSHHHVICQLLSDYKEKQMLKISSENSNPG

SEQ ID NO: 65052 - protein, 112 aa, Homo sapiens
MPGGRRGPSRQQLSRSALPSLQTLVGGGCGNGTGLRNRNGSAIGLPVPPITALITPGPVRHCQIPDLPVDGSLLFEFLFFIYLLVALFIQYINIYKTVWWYPYNHPASCTSL

SEQ ID NO: 65053 - protein, 160 aa, Homo sapiens
MWTADEIAQLCYEHYGIRLPKKGKPEPNHEWTLLAAVVKIQSPADKACDTPDKPVQVTKEVVSMGTGTKCIGQSKMRKNGDILNDSHAEVIARRSFQRYLLHQLQLAATLKEDSIFVPGTQKGVWKLRRDLIFVFFSSHTPCGDASIIPMLEFEDQPCCP

SEQ ID NO: 65054 - protein, 113 aa, Homo sapiens
MIRLGGWCARRLCSAAVPAGRRGAAGGLGLAGGRALRVLVDMDGVLADFEGGFLRKFRARFPDQPFIALEDRRGFWVSEQYGRLRPGLSVSVPAPPRAGPPSRPEPQTPPLRR

SEQ ID NO: 65055 - protein, 146 aa, Homo sapiens
MFLSSVGFSVVMMSIWPYLQKIDPTADTSFLGWVIASYSLGQMVASPIFGLWSNYRPRKEPLIVSILISVAANCLYAYLHIPASHNKYYMLVARGLLGIGAENIVWMTQEDSVKVLILKKQVQMKLRFPKEILTRLLLWPSMFCFL

SEQ ID NO: 65056 - protein, 41 aa, Homo sapiens
MASEKPLAAVTCTAPVNIAVIKYLEMGFHRVSQAGLKLLTS

SEQ ID NO: 65057 - protein, 640 aa, Homo sapiens
MWRVCARRAQNVAPWAGLEARWTALQEVPGTPRVTSRSGPAPARRNSVTTGYGGVRALCGWTPSSGATPRNRLLLQLLGSPGRRYYSLPPHQKVPLPSLSPTMQAGTIARWEKKEGDKINEGDLIAEVETDKATVGFESLEECYMAKILVAEGTRDVPIGAIICITVGKPEDIEAFKNYTLDSSAAPTPQAAPAPTPAATASPPTPSAQAPGSSYPPHMQVLLPALSPTMTMGTVQRWEKKVGEKLSEGDLLAEIETDKATIGFEVQEEGYLAKILVPEGTRDVPLGTPLCIIVEKEADISAFADYRPTEVTDLKPQVPPPTPPPVAAVPPTPQPLAPTPSAPCPATPAGPKGRVFVSPLAKKLAVEKGIDLTQVKGTGPDGRITKKDIDSFVPSKVAPAPAAVVPPTGPGMAPVPTGVFTDIPISNIRRVIAQRLMQSKQTIPHYYLSIDVNMGEVLLVRKELNKILEGRSKISVNDFIIKASALACLKVPEANSSWMDTVIRHVAVSTPAGLITPIVFNAHIKGVETIANDVVSLATKAREGKLQPHEFQGGTFTISNLGMFGIKNFSAIINPPQACILAIGASEDKLVPADNEKGFDVASMMSVTLSCDHRVVDGAVGAQWLAEFRKYLEKPITMLL

SEQ ID NO: 65058 - protein, 162 aa, Homo sapiens
MIDVPHSTSVTWRTVLVTELNEPLSNEDRNLLSVAYKNVVGARRSSWRVISSIEQKTMADGNEKKLEKVKAYREKIEKELETVCNDVLSLLDKFLIKNCNDFQYESKVFYLKMKGDYYRYLAEVASGEKKNSVVEASEAAYKEAFEISKEQMQPTHPIRLGL

SEQ ID NO: 65059 - protein, 631 aa, Homo sapiens
MVVPSKTKIVCHFSTLVLTCGQPHTLQIVPRDEYDNPTNNSMSLRDEHNYTLSIHELGPQEEESTGVSFEKSVTSNRQTFQVFLRLTLHSRGCFHACISYQNQPINNGEFDIIVLSEDEKNIVERNVSTSGVSIYFEAYLYNATNCSSTPWHLPPMHMTSSQRRPSTAVDEEDEDSPSECHTPEKVKKPKKVYCYVSPKQFSVKEFYLKIIPWRLYTFRVCPGTKFSYLGPDPVHKLLTLVVDDGIQPPVELSCKERNILAATFIRSLHKNIGGSETFQDKVNFFQRELRQVHMKRPHSKVTLKVSRHALLESSLKATRNFSISDWSKNFEVVFQDEEALDWGGPRREWFELICKALFDTTNQLFTRFSDNNQALVHPNPNRPAHLRLKMYEFAGRLVGKCLYESSLGGAYKQLVRARFTRSFLAQIIGLRMHYKYFETDDPEFYKSKVCFILNNDMSEMELVFAEEKYNKSGQLDKVVELMTGGAQTPVTNANKIFYLNLLAQYRLASQVKEEVEHFLKGLNELVPENLLAIFDENELELLMCGTGDISVSDFKAHAVVVGGSWHFREKVMRWFWTVVSSLTQEELARLLQFTTGSSQLPPGGFAALCPSFQIIAAPTHSTLPTAHTCFN

SEQ ID NO: 65060 - protein, 209 aa, Homo sapiens
MLPAAMVGALVRGWRNRSSPQRAESKLLIRPSQDGIAIQDGHQLRLEVPSAVTKVPHPKTTARRSCPQELKTMELSDSDRPVSFGSTSSSASSRDSHGSFGSRMTLVSNSHMGLFNQDKEVGAIKLELIPARPFSSSELQRDNPATGQQNADEGSERPPRAQWRVDSNGAPKTIADSATSPKLLYVDRVVQEILETERTYVQDLKSIVE

SEQ ID NO: 65061 - protein, 433 aa, Homo sapiens
IMAFNAADKVNFATWNQARLERDLSNKKIYQEEEMPESGAGSEFNRKLREEARRKKYGIVLKEFRPEDQPWLLRVNGKSGRKRNKVLNHFSIMQQRRLKDQDQDEDEEEKEKRGRRKASELRIHDLEDDLEMSSDASDASGEEGGRVPKAKKKAPLAKGGRKKKKKKGSDDEAFEDSDDGDFEGQEVDYMSDGSSSSQEEPESKAKAPQQEEGPKGVDEQSDSSEESEEEKPPEEDKEEEEEKKAPTPQEKKRRKDSSEESDSSEESDIDSEASSALFMAKKKTPPKRERKPSGGSSRGNSRPGTPSAEGGSTSSTLRAAASKLEQGKRVSEMPAAKRLRLDTGPQSLSGKSTPQPPSGKTTPNSGDVQVTEDAVRRYLTRKPMTTKDLLKKFQTKKTGLSSEQTVNVLAQILKRLNPERKMINDKMHFSLKE

SEQ ID NO: 65062 - protein, 123 aa, Homo sapiens
MSTPARRRLMRDFKRLQEDPPAGVSGAPSENNIMVWNAVIFGPEGTPFEDGTFKLTIEFTEEYPNKPPTVRFVSKMFHPNVYADGSICLDILQNRWSPTYDVSSILTSIQILWVKSLYGIVNF

SEQ ID NO: 65063 - protein, 424 aa, Homo sapiens
MVHSSMGAPEIRMSKPLEAEKQGLDSPSEHTDTERNGPDTNHQNPQNKTSPFSVSPTGPSTKDIQQLLQLQQLVLVPGHHLQPPAQFLLPQAQQSQPGLLPTPNLFQLPQQTQGALLTSQPRAGLPTQPPKCLEPPSHPEEPSDLEELEQFARTFKQRRIKLGFTQGDVGLAMGKLYGNDFSQTTISRFEALNLSFKNMCKLKPLLEKWLNDAETMSVDSSLPSPNQLSSPSLGFDGLPGRRRKKRTSIETNVRFALEKSFLANQKPTSEEILLIAEQLHMEKEVIRVWFCNRRQKEKRINPCSAAPMLPSPGKPASYSPHMVTPQGGAGTLPLSQASSSLSTTVTTLSSAVGTLHPSRTAGGGGGGGGAAPPLNSIPSVTPPPPATTNSTNPSPQGSHSAIGLSGLNPSTGPGLWWNPAPYQP

SEQ ID NO: 65064 - protein, 95 aa, Homo sapiens
MQNSVSVPPKDEGESNIPSGTIQSRKGLQNKSQFRTIAPKIVPKVLTSRMLPCHSPSRSDQVRCPGPLKRKLRFSFSCHLAQTSQRFINIVVKMS

SEQ ID NO: 65065 - protein, 213 aa, Homo sapiens
MEATRRRQHLGATGGPGAQLGASFLQARHGSVSADEAARTAPFHLDLWFYFTLQNWVLDFGRPIAMLVFPLEWFPLNKPSVGDYFHMAYNVITPFLLLKLIERSPRTLPRSITYVSIIIFIMGASIHLVGDSVNHRLLFSGYQHHLSVRENPIIKNLKPETLVRPPPAPCLSTPLSCSTIMMSTWVTACGTSPSSSSSSCTSAAALLPLKLRA

SEQ ID NO: 65066 - protein, 73 aa, Homo sapiens
MSNPSAPPPYEDRNPLYPGPPPPGGYGQPSVLPGGYPAYPGYPQPGYGHPAGYPQPMPPTHPMPMNYGPGHGY

SEQ ID NO: 65067 - protein, 36 aa, Homo sapiens
MDIPKIDIYHYELDIKPEKCPRRVNREIVEHMVQHF

SEQ ID NO: 65068 - protein, 91 aa, Homo sapiens
MTSRKKVLLKVIILGDSGVGKTSLMNQYVNKKFSNQYKATIGADFLTKEVMVDDRLVTMQETEVELYNEFPEPIKLDKNDRAKASAESCSC

SEQ ID NO: 65069 - protein, 921 aa, Homo sapiens
MLRNERQFKEEKLAEQLKQAEELRQYKVLVHAQERELTQLREKLREGRDASRSLNEHLQALLTPDEPDKSQGQDLQEQLAEGCRLAQHLVQKLSPENDNDDDEDVQVEVAEKVQKSSAPREMQKAEEKEVPEDSLEECAITYSNSHGSYDSNQPHRKTKITFEEDKVDSTLIGSSSHVEWEDAVHIIPENESDDEEEEEKGPVSPRNLQESEEEEVPQESWDEGYSTLSIPPEMLASYQSYSSTFHSLEEQQVCMAVDIGRHRWDQVKKEDQEATGPRLSRELLDEKGPEVLQDSLDRCYSTPSGCLELTDSCQPYRSAFYVLEQQRVGLAVDMDEIEKYQEVEEDQDPSCPRLSRELLDEKEPEVLQDSLDRCYSTPSGYLELPDLGQPYSSAVYSLEEQYLGLALDVDRIKKDEEEEEDQDPPCPRLSRELLEVVEPEVLQDSLDRCYSTPSSCLEQPDSCQPYGSSFYALEEKHVGFSLDVGEIEKKGKGKKRRGRRSKKERRRGRKEGEEDQNPPCPRLSRELLDEKGPEVLQDSLDRCYSTPSGCLELTDSCQPYRSAFYVLEQQRVGLAVDMDEIEKYQEVEEDQDPSCPRLSRELLDEKGPEVLQDSLDRCYSTPSGCLELTDSCQPYRSAFYVLEQQRVGLAVDMDEIEKYQEVEEDQDPSCPRLSRELLDEKEPEVLQDSLDRCYSTPSGYLELPDLGQPYSSAVYSLEEQYLGLALDVDRIKKDQEEEEDQGPPCPRLSRELLEVVEPEVLQDSLDRCYSTPSSCLEQPDSCQPYGSSFYALEEKHVGFSLDVGEIEKKGKGKKRRGRRSKKERRRGRKEGEEDQNPPCPRLNGVLMEVEEREVLQDSLDRCYSTPSMYFELPDSFQHYRSVFYSFEEQHISFALYVDNRFFTLTVTSLHLVFQMGVIFPQ

SEQ ID NO: 65070 - protein, 187 aa, Homo sapiens
MNKRIHYYSRLTTPADKALIAPDHVVPAPEECYVYSPLGSAYKLQSYTEGYGKNTSLVTIFMIWNTMMGTSILSIPWGIKQAGFTTGMCVIILMGLLTLYCCYRVVKSRTMMFSLDTTSWEYPDVCRHYFGSFGQWSSLLFSLVSLIGAMIVYWVLMSNFLFNTGKFIFNFIHHINDTDTILSTNNS

SEQ ID NO: 65071 - protein, 438 aa, Homo sapiens
MWPQPRFPPHPAMSEKTQQGKLAAAKKKLKAYWQRKSPGIPAGANRKKKINGSSPDTATSGGYHSPGDSATGIYGEGRASSTTLEDLESQYQELAVALDSSSAIISQLTENINSLVRTSKEEKKHEIHLVQKLGRSLFKLKNQTAEPLAPEPPAGPSKVEQLQDETNHLRKELESVGRQLQAEVENNQMLSLLNRRQEERLREQEERLREQEERLREQEERLCEQEERLREQEERLCEQEKLPGQERLLEEVEKLLEQERRQEEQERLLERERLLEEVEELLEQERLRQQDERLWQQETLQELERLRELERLRELERMLELGWEALYEQRAEPRSGFEELNNENKSTLQLEQQVKELKKSGGAEEPRGSESAAAARPVAGAPVPQGAWMCGQAGWTPQEHPGLSGEAVGTGEAAGGAGEAACHSFRAAENRELNITII

SEQ ID NO: 65072 - protein, 490 aa, Homo sapiens
MSYGEIEEFCLVRIVMALCSALMTIFTIKMGTAKQAIDQGRSPVIIDNTNIQAWEMKPYVEVAIGKGYRVEFHEPETWWKFDPEELEKRNKHGVSRKKIAQMLDRYEYQMSISIVMNSVEPSHKSTQRPPPPQGRQRERVLKKTGHRLSKTKQKRNRKRNKKQNSQNRIMEENSLEFLSDLTPGDQDPSQSEEEDIEKTRRESEYPFIDGLQNEVGDFVTGYKEKRWKNKDPKDSFQNVMSIVELDNTPKNYLSKEGDNLFVSLLLRPNEISVTCPILTQNLSCVTTDDCSGMKVEKHIRNRHTIALDTQDLSAETSCLFMKKREIVDKNLSHEPILCHQHGIRMSDKVLREEQVYTTKINHWAFFTTNLSDEDLQLGSDRQPYFGSWPAGPHKFICEQRPKKDRACKLAGPDSRGQWIQMIFTSVAASEPGNNPEILTDKLLIGNEDFSPPPETMDSFIETNLFRSCLPQPDIPKNALESTKNKKRRKK

SEQ ID NO: 65073 - protein, 147 aa, Homo sapiens
  MOD_RES (1)..(1): Any amino acid
XYFNVVNSWIIFYMSQSFQFPVPWEKCPLTMNSSGFDPECERTTPSIYFWYQQALKASDRIEDGGSPVYSLVLPFFLCWCLVGAFMINGLKSTGKVIYVLVLLPCFIIVGFFIRTLLLEGAKFGLQQLVVAKQRQGFTVLARTVSIF

SEQ ID NO: 65074 - protein, 83 aa, Homo sapiens
MAGRVPSLLVLLVFPSSCLAFRSPLSVFKRFKETTRPFSNECLGTTRPVVPIDSSDFALDIRMPGVTPKQEAVVSIRTRCPLD

SEQ ID NO: 65075 - protein, 5646 aa, Homo sapiens
MVVSAGPWSSEKAEMNILEINEKLRPQLAENKQQFGNLKERCFVTQLAGFLANQQKKYKYEECKDLIKSMLRNERQFKEEKLAEQLKQAEELRQYKVLVHAQERELTQLREKLREGRDASRSLNEHLQALLTPDEPDKSQGQDLQEQLAEGCRLAQHLVQKLSPENDNDDDEDVQVELAEKVQKSSAPREMQKAEEKEVPEDSQEECAITYSNSHGPYDSNQPHRKTKITFEEDKVDSTLIGSSSHVEWEDAVHIIPGKNESDDEEEEEKGPVSPRNLQESEEEEVPQESWDEGYSTLSIPPEMLASYQSYSSTFHSLEEQQVCMAVDIGRHRWDQVKKEDQEATGPRLSRELLDEKGPEVLQDSLDRCYSTPSGCLELTDSCQPYRSAFYVLEQQRIGLAVDMDEIEKYQEVEEDQDPSCPRLSRELLDEKEPEVLQDSLDRCYSTPSGYLELPDLGQPYSSAVYSLEEQYLGLALDVDRTKKDQEEEEDQGPPCPRLSRELLEVVEPEVLQDSLDRCYSTPSSCLEQPDSCQPYGSSFYALEEKHVGFSLDVGEIEKKGKGKKRRGRRSKKERRRGRKEGEEDQNPPCPRLSRELLDEKGPEVLQDSLDRCYSTPSGCLELTDSCQPYRSAFYVLEQQRVGLAVDMDEIEKYQEVEEDQDPSCPRLSRELLDEKEPEVLQDSLDRCYSTPSGYLELPDLGQPYSSAVYSLEEQYLGLALDVDRTKKDQEEEEDQGPPCPRLSRELLEVVEPEVLQDSLDRCYSTPSSCLEQPDSCQPYGSSFYALEEKHVGFSLDVGEIEKKGKGKKRRGRRSKKERRRGRKEGEEDQNPPCPRLSRELLDEKGPEVLQDSLDRSYSTPSGCLELTDSCQPYRSAFYVLEQQRVGLAVDMDEIEKYQEVEEDQDPSCPRLSRELLDEKEPEVLQDSLDRCYSTPSGYLELPDLGQPYSSAVYSLEEQYLGLALDVDRTKKDQEEEEDQGPPCPRLSRELLEVVEPEVLQDSLDRCYSTPSSCLEQPDSCQPYGSSFYALEEKHVGFSLDVGEIEKKGKGKKRRGRRSKKERRRGRKEGEEDQNPPCPRLSRELLDEKGPEVLQDSLDRCYSTPSGCLELTDSCQPYRSAFYVLEQQRVGLAVDMDEIEKYQEVEEDQDPSCPRLSRELLDEKEPEVLQDSLDRCYSTPSGYLELPDLGQPYSSAVYSLEEQYLGLALDVDRTKKDQEEEEDQGPPCPRLSRELLEVVEPEVLQDSLDRCYSTPSSCLEQPDSCQPYGSSFYALEEKHVGFSLDVGEIEKKGKGKKRRGRRSKKERRRGRKEGEEDQNPPCPRLSRELLDEKGPEVLQDSLDRSYSTPSGCLELTDSCQPYRSAFYVLEQQRVGLAVDMDEIEKYQEVEEDQDPSCPRLSRELLDEKEPEVLQDSLDRCYSTPSGYLELPDLGQPYSSAVYSLEEQYLGLALDVDRTKKDQEEEEDQGPPCPRLSRELLEVVEPEVLQDSLDRCYSTPSSCLEQPDSCQPYGSSFYALEEKHVGFSLDVGEIEKKGKGKKRRGRRSKKERRRGRKEGEEDQNPPCPRLSRELLDEKGPEVLQDSLDRSYSTPSGCLELTDSCQPYRSAFYVLEQQRVGLAVDMDEIEKYQEVEEDQDPSCPRLSRELLDEKEPEVLQDSLDRCYSTPSGYLELPDLGQPYSSAVYSLEEQYLGLALDVDRTKKDQEEEEDQGPPCPRLSRELLEVVEPEVLQDSLDRCYSTPSSCLEQPDSCQPYGSSFYALEEKHVGFSLDVGEIEKKGKGKKRRGRRSKKERRRGRKEGEEDQTPPCPRLSRELLDEKGPEVLQDSLDRSYSTPSGCLELTDSCQPYRSAFYVLEQQRVGLAVDMDEIEKYQEVEEDQDPSCPRLSRELLDEKEPEVLQDSLDRCYSTPSGYLELPDLGQPYSSAVYSLEEQYLGLALDVDRTKKDQEEEEDQGPPCPRLSRELLEVVEPEVLQDSLDRCYSTPSSCLEQPDSCQPYGSSFYALEEKHVGFSLDVGEIEKKGKGKKRRGRRSKKERRRGRKEGEEDQNPPCPRLSRELLDEKGPEVLQDSLDRSYSTPSGCLELTDSCQPYRSAFYVLEQQRVGLAVDMDEIEKYQEVEEDQDPSCPRLSRELLDEKEPEVLQDSLDRCYSTPSGYLELPDLGQPYSSAVYSLEEQYLGLALDVDRTKKDQEEEEDQGPPCPRLSRELLEVVEPEVLQDSLDRCYSTPSSCLEQPDSCQPYGSSFYALEEKHVGFSLDVGEIEKKGKGKKRRGRRSKKERRRGRKEGEEDQNPPCPRLSRELLDEKGPEVLQDSLDRCYSTPSGCLELTDSCQPYRSAFYVLEQQRVGLAVDMDEIEKYQEVEEDQDPSCPRLSRELLDEKEPEVLQDSLDRCYSTPSGYLELPDLGQPYSSAVYSLEEQYLGLALDVDRTKKDQEEEEDQGPPCPRLSRELLEVVEPEVLQDSLDRCYSTPSSCLEQPDSCQPYGSSFYALEEKHVGFSLDVGEIEKKGKGKKRRGRRSKKERRRGRKEGEEDQNPPCPRLSRELLDEKGPEVLQDSLDRCYSTPSGCLELTDSCQPYRSAFYVLEQQRVGLAVDMDEIEKYQEVEEDQDPSCPRLSRELLDEKEPEVLQDSLDRCYSTPSGYLELPDLGQPYSSAVYSLEEQYLGLALDVDRTKKDQEEEEDQGPPCPRLSRELLEVVEPEVLQDSLDRCYSTPSSCLEQPDSCQPYGSSFYALEEKHVGFSLDVGEIEKKGKGKKRRGRRSKKERRRGRKEGEEDQNPPCPRLSRELLDEKGPEVLQDSLDRCYSTPSGCLELTDSCQPYRSAFYVLEQQRVGLAVDMDEIEKYQEVEEDQDPSCPRLSRELLDEKEPEVLQDSLDRCYSTPSGYLELPDLGQPYSSAVYSLEEQYLGLALDVDRTKKDQEEEEDQGPPCPRLSRELLEVVEPEVLQDSLDRCYSTPSSCLEQPDSCQPYGSSFYALEEKHVGFSLDVGEIEKKGKGKKRRGRRSKKERRRGRKEGEEDQNPPCPRLSRELLDEKGPEVLQDSLDRSYSTPSGCLELTDSCQPYRSAFYVLEQQRVGLAVDMDEIEKYQEVEEDQDPSCPRLSRELLDEKEPEVLQDSLDRCYSTPSGYLELPDLGQPYSSAVYSLEEQYLGLALDVDRTKKDQEEEEDQGPPCPRLSRELLEVVEPEVLQDSLDRCYSTPSSCLEQPDSCQPYGSSFYALEEKHVGFSLDVGEIEKKGKGKKRRGRRSKKERRRGRKEGEEDQNPPCPRLSRELLDEKGPEVLQDSLDRSYSTPSGCLELTDSCQPYRSAFYVLEQQRVGLAVDMDEIEKYQEVEEDQDPSCPRLSRELLDEKEPEVLQDSLDRCYSTPSGYLELPDLGQPYSSAVYSLEEQYLGLALDVDRTKKDQEEEEDQGPPCPRLSRELLEVVEPEVLQDSLDRCYSTPSSCLEQPDSCQPYGSSFYALEEKHVGFSLDVGEIEKKGKGKKRRGRRSKKERRRGRKEGEEDQNPPCPRLSRELLDEKGPEVLQDSLDRSYSTPSGCLELTDSCQPYRSAFYVLEQQRVGLAVDMDEIEKYQEVEEDQDPSCPRLSRELLDEKEPEVLQDSLDRCYSTPSGYLELPDLGQPYSSAVYSLEEQYLGLALDVDRTKKDQEEEEDQGPPCPRLSRELLEVVEPEVLQDSLDRCYSTPSSCLEQPDSCQPYGSSFYALEEKHVGFSLDVGEIEKKGKGKKRRGRRSKKERRRGRKEGEEDQNPPCPRLSRELLDEKGPEVLQDSLDRSYSTPSGCLELTDSCQPYRSAFYVLEQQRVGLAVDMDEIEKYQEVEEDQDPSCPRLSRELLDEKEPEVLQDSLDRCYSTPSGYLELPDLGQPYSSAVYSLEEQYLGLALDVDRTKKDQEEEEDQGPPCPRLSRELLEVVEPEVLQDSLDRCYSTPSSCLEQPDSCQPYGSSFYALEEKHVGFSLDVGEIEKKGKGKKRRGRRSKKERRRGRKEGEEDQNPPCPRLSRELLDEKGPEVLQDSLDRCYSTPSGCLELTDSCQPYRSAFYVLEQQRVGLAVDMDEIEKYQEVEEDQDPSCPRLSRELLDEKEPEVLQDSLDRCYSTPSGYLELPDLGQPYSSAVYSLEEQYLGLALDVDRTKKDQEEEEDQGPPCPRLSRELLEVVEPEVLQDSLDRCYSTPSSCLEQPDSCQPYGSSFYALEEKHVGFSLDVGEIEKKGKGKKRRGRRSKKERRRGRKEGEEDQNPPCPRLSRELLDEKGPEVLQDSLDRCYSTPSGCLELTDSCQPYRSAFYVLEQQRVGLAVDMDEIEKYQEVEEDQDPSCPRLSRELLDEKEPEVLQDSLDRCYSTPSGYLELPDLGQPYSSAVYSLEEQYLGLALDVDRTKKDQEEEEDQGPPCPRLSRELLEVVEPEVLQDSLDRCYSTPSSCLEQPDSCQPYGSSFYALEEKHVGFSLDVGEIEKKGKGKKRRGRRSKKERRRGRKEGEEDQTPPCPRLSRELLDEKGPEVLQDSLDRCYSTPSGCLELTDSCQPYRSAFYVLEQQRVGLAVDMDEIEKYQEVEEDQDPSCPRLSRELLDEKEPEVLQDSLDRCYSTPSGYLELPDLGQPYSSAVYSLEEQYLGLALDVDRTKKDQEEEEDQGPPCPRLSRELLEVVEPEVLQDSLDRCYSTPSSCLEQPDSCQPYGSSFYALEEKHVGFSLDVGEIEKKGKGKKRRGRRSKKERRRGRKEGEEDQNPPCPRLSRELLDEKEPEVLQDSLDRCYSTPSGYLELPDLGQPYSSAVYSLEEQYLGLALDVDRTKKDQEEEEDQGPPCPRLSRELLEVVEPEVLQDSLDRCYSTPSSCLEQPDSCQPYGSSFYALEEKHVGFSLDVGEIEKKGKGKKRRGRRSKKERRRGRKEGEEDQNPPCPRLSRELLDEKEPEVLQDSLDRCYSTPSGYLELPDLGQPYSSAVYSLEEQYLGLALDVDRTKKDQEEEEDQGPPCPRLSRELLEVVEPEVLQDSLDRCYSTPSSCLEQPDSCQPYGSSFYALEEKHVGFSLDVGEIEKKGKGKKRRGRRSKKERRRGRKEGEEDQNPPCPRLSRELLDEKGPEVLQDSLDRSYSTPSGCLELTDSCQPYRSAFYVLEQQRVGLAVDMDEIEKYQEVEEDQDPSCPRLSRELLDEKEPEVLQDSLDRCYSTPSGYLELPDLGQPYSSAVYSLEEQYLGLALDVDRTKKDQEEEEDQGPPCPRLSRELLEVVEPEVLQDSLDRCYSTPSSCLEQPDSCQPYGSSFYALEEKHVGFSLDVGEIEKKGKGKKRRGRRSKKERRRGRKEGEEDQNPPCPRLSRELLDEKGPEVLQDSLDRCYSTPSGCLELTDSCQPYRSAFYVLEQQRVGLAVDMDEIEKYQEVEEDQDPSCPRLSRELLDEKEPEVLQDSLDRCYSTPSGYLELPDLGQPYSSAVYSLEEQYLGLALDVDRTKKDQEEEEDQGPPCPRLSRELLEVVEPEVLQDSLDRCYSTPSSCLEQPDSCQPYGSSFYALEEKHVGFSLDVGEIEKKGKGKKRRGRRSKKKRRRGRKEGEEDQNPPCPRLNGVLMEVEEPEVLQDSLDGCYSTPSMYFELPDSFQHYRSVFYSFEEQHISFALYVDNRFFTLTVTSLHLVFQMGVIFPQ

SEQ ID NO: 65076 - protein, 119 aa, Homo sapiens
MAAVAAGGLVGKGRDISLAALQRHDPYINRIVDVASQVALYTFGHRANEWEKTDVEGTLFVYTRSASPKHGFTIMNRLSMENRTEPITKDLDFQLQDPFLLYRNARYEETETPVRRQTV

SEQ ID NO: 65077 - protein, 32 aa, Homo sapiens
TTEERRKVGNNLQRLLEMVATHVGSVERRMLG

SEQ ID NO: 65078 - protein, 159 aa, Homo sapiens
  MOD_RES (1)..(1): Any amino acid
XTGANQSRMAVSKTVLIPPELKTVEKPNPNIKTTQVFDINGTDVTPRPLYHPDPLTGTAKPSKLLTSQEGSLGSEFISSYSLYQNTINPSTLGQFTRSVLGSSTVSKSSVSASESIAEDLEEPSYKRERLTSFTGNENILVYFSNSPLFSQYAYYWLDT

SEQ ID NO: 65079 - protein, 166 aa, Homo sapiens
MDLEVRDYYLSLLLMLRATHLQEGSRVVTLCNMNIKSLLNLSIWHPNQSTTRREILSHMQKVALFKLQSYWLPNFYTHTKMTMAKEEACHGLMQEYETRLYSVCYTHIGGLPLNMSIKKCHHFQKRYSSRKAKRKMWQLVDPDSWSLEMDLKPDAIGMPLQETCPQ

SEQ ID NO: 65080 - protein, 34 aa, Homo sapiens
MTVMSLSRDLKDDFHSDTVLSILNEQRIRGILCD

SEQ ID NO: 65081 - protein, 57 aa, Homo sapiens
MLPAGEIGASPAAPCCSESGDERKNLEEKSDINVTVLIGSKQVSEVSGAGNSSLQRH

SEQ ID NO: 65082 - protein, 28 aa, Homo sapiens
MLTITDFINILHRYYKSALVQIYELEEH

SEQ ID NO: 65083 - protein, 197 aa, Homo sapiens
ASRKAGTRGKVAATKQAQRGSSNVFSMFEQAQIQEFKEVSPPPPTFPRAGGCSHLKAPIPQAFSCIDQNRDGIICKADLRETYSQLGKVSVPEEELDAMLQEGKGPINFTVFLTLFGEKLNGTDPEEAILSAFRMFDPSGKGVVNKDEFKQLLLTQADKFSPAEVEQMFALTPMDLAGNIDYKSLCYIITHGDEKEE

SEQ ID NO: 65084 - protein, 19 aa, Homo sapiens
  MOD_RES (1)..(1): Any amino acid
XNRDDKIIFGKGTRLHILP

SEQ ID NO: 65085 - protein, 199 aa, Homo sapiens
  MOD_RES (1)..(1): Any amino acid
XTAQSFCDSPGEKGGATPPALLLLLSRLCLDYETATISYILTLTDEQFLVQDQFPVTPVSTLCAEARETARRLLTHYVKVQGLVISQMLRKSVETRDWLSTLEPRNVRAVMKRVVEDTTAIDVQVGLLYEEGVRKAQSSDSSKRTFSVYSSSRQQGRYAPSYTPSAPMDTNLLSNIQKLFSERIDVFSPVEFNKVRLPT

SEQ ID NO: 65086 - protein, 1471 aa, Homo sapiens
MDNALFLAAVSNLDIESKLSVYYRAPWHQQRNIFLPATRPPCVEELHRHARQSLQALRREHRSRSDRREQRAAAPLSIAAPPLPAYPPAHSQRRREFKDRHFLTFNSTRSPSPTECCHMTPWSRKSHPPEDEDTDVMLGQRPKNPIHNIPSTLDKQTNWSKALPLPTPEEKMKQDAQVISSCIIPINVTGVGFDREASIRCSLVHSQSVLQRRRKLRRRKTISGIPRRVQQEIDSDESPVARERNVIVHTNPDPSNTVNRISGTRDSECQTEDILIAAPSRRRIRAQRGQSIAASLSHSAGNISALADKGDTMFTPAVSSRTRSRSLPREGNRGGDAEPKVGAKPSAYEEGESFVGDHERTPNDFSEAPSSPSAQDHQPTLGLACSQHLHSPQHKLSERGRSRLSRMAADSGSCDISSNSDTFGSPIHCISTAGVLLSSHMDQKDDHQSSSGNWSGSSSTCPSQTSETIPPAASPPLTGSSHCDSELSLNTAPHANEDASVFVTEQYNDHLDKVRGHRANSFTSTVADLLDDPNNSNTSDSEWNYLHHHHDASCRQDFSPERPKADSLGCPSFTSMATYDSFLEKSPSDKADTSSHFSVDTEGYYTSMHFDCGLKGNKSYVCHYAALGPENGQGVGASPGLPDCAWQDYLDHKRQGRPSISFRKPKAKPTPPKRSSSLRKSDGNADISEKKEPKISSGQHLPHSSREMKLPLDFANTPSRMENANLPTKQEPSWINQSEQGIKEPQLDASDIPPFKDEVAESTHYADLWLLNDLKTNDPYRSLSNSSTATGTTVIECIKSPESSESQTSQSESRATTPSLPSVDNEFKLASPEKLAGLASPSSGYSSQSETPTSSFPTAFFSGPLSPGGSKRKPKVPERKSSLQQPSLKDGTISLSKDLELPIIPPTHLDLSALHNVLNKPFHHRHPLHVFTHNKQNTVGETLRSNPPPSLAITPTILKSVNLRSINKSEEVKQKEENNTDLPYLEESTLTTAALSPSKIRPHTANKSVSRQYSTEDTILSFLDSSAVEMGPDKLHLEKNSTFDVKNRCDPETITSAGSSLLDSNVTKDQVRTETEPIPENTPTKNCAFPTEGFQRVSAARPNDLDGKIIQYGPGPDETLEQVQKAPSAGLEEVAQPESVDVITSQSDSPTRATDVSNQFKHQFVMSRHHDKVPGTISYESEITSVNSFPEKCSKQENIASGISAKSASDNSKAEETQGNVDEASLKESSPSDDSIISPLSEDSQAEAEGVFVSPNKPRTTEDLFAVIHRSKRKVLGRKDSGDMSVRSKSRAPLSSSSSSASSITSPSSNVTTPNSQRSPGLIYRNAKKSNTSNEEFKLLLLKKGSRSDSSYRMSATEILKSPILPKPPGELTAESPQSTDDAHQGSQGAEALSPLSPCSPRVNAEGFSSKSFATSASARVGRSRAPPAASSSRYSVRCRLYNTPMQAISEGETENSDGSPHDDRSSQSST

SEQ ID NO: 65087 - protein, 169 aa, Homo sapiens; identical to SEQ ID NO: 60738

SEQ ID NO: 65088 - protein, 39 aa, Homo sapiens
MATACKRSGEPQSDDIEASRMKRAAAKHLIERYYHQLTE

SEQ ID NO: 65089 - protein, 38 aa, Homo sapiens
NFNQSTSSEASPSGPRGVAAQGVLTQHLEKRRSLMGVS

SEQ ID NO: 65090 - protein, 125 aa, Homo sapiens
MPAVASVPKELYLSSSLKDLNKKTEVKPEKISTKSYVHSALKIFKTAEECRLDRDEERAYVLYMKYVTVYNLIKKRPDFKQQQDYFHSILGPGNIKKAVEEAERLSESLKLSGFYLSLIGRINSF

SEQ ID NO: 65091 - protein, 191 aa, Homo sapiens
MEALSRAGQEMSLAALKQHDPYITSIADLTGQVALYTFCPKANQWTDIEGTLFVYRRSASPYHGFTIVNRLNMHNLVEPVNKDLEFQLHEPFLLYRNASLSIYSIWFYDKNDCHRIAKLMADVVEEETRRSQQAARDKQSPSQANGCSDHRPIDILEMLSRAKDEYERNQMGDSNISSPGLQPSTQLSNLG

SEQ ID NO: 65092 - protein, 280 aa, Homo sapiens
MPLHVKWPFPAVPPLTWTLASSVVMGLVGTYSCFWTSEWAQAEAGPPGYPCPAGEYMNHLTVHNREVLYELIEKRGPATPLITVSNHQSCMDDPHLWGILKLRHIWNLKLMRWTPAAADICFTKELHSHFFSLGKCVPVCRGDGVYQKGMDFILEKLNHGDWVHIFPEGKVNMSSEFLRFKWGIGRLIAECHLNPIILPLWHVGMNDVLPNSPPYFPRFGQKITVLIGKPFSALPVLERLRAENKSAVEMRKALTDFIQEEFQHLKTQAEQLHNHLQPGR

SEQ ID NO: 65093 - protein, 169 aa, Homo sapiens
MASKRALVILAKGAEEMETVIPVDVMRRAGIKVTVAGLAGKDPVQCSRDVVICPDASLEDAKKESAAVKEILKEQENRKGLIAAICAGPTALLAHEIGFGSKVTTHPLAKDKMMNGGHYTYSENRVEKDGLILTSRGPGTSFEFALAIVEALNGKEVAAQVKAPLVLKD

SEQ ID NO: 65094 - protein, 72 aa, Homo sapiens
MTNSKGRSITDKTSGGPSSGGGFVDWTLRLNTIQSDKFLNLLLSMVPVIYQKNQEDRHKKANGIWQDGLSTA

SEQ ID NO: 65095 - protein, 157 aa, Homo sapiens
MVGEDIEARRHFLNLCCQPRRVSLRLKKCISEVKDKAGSAQCHPLEQRAGIPSGEWRQLKERSPKNPEQKIIKRVIALEGDIVRTIGHKNRYVKVPRGHIWVEGDHHGHSFDSNSFGPVSLGLLHAHATHILWPPERWQKLESVLPPERLPVQREEE

SEQ ID NO: 65096 - protein, 82 aa, Homo sapiens
  MOD_RES (1)..(1): Any amino acid
XKGPAAGPRSRAAMAQWRKKKGLRKRRGAASQARGSDSEDGEFEIQAEDDARARKLGPGRPLPTFPTSECTSDVEPDTREMA

SEQ ID NO: 65097 - protein, 115 aa, Homo sapiens
MDISEKLFCSTCDQTFQNHQEQREHYKLDWHRFNLKQRLKDKPLLSALDFEKQSSTGDLSSISGSEDSDSASEEDLQTLDRERATFEKLSRPPGFYPHRVLFQNAQGQFLYAYRC

SEQ ID NO: 65098 - protein, 104 aa, Homo sapiens
MKHTQSGQSTSPLVIDYTCRVCQMAFVFSSLIPLLLMTPVFCLGNTSECFQNFSQSHKCILMHSPPSAMAELPPSANTSVCSTLYFYGIAIFLGSFVLSLLTIM

SEQ ID NO: 65099 - protein, 248 aa, Homo sapiens
MAPYGPLAASSLLSQQYAASLGLEKLVSPPASAAASSPSSSPSPQPVSELDLSSEPQQLTAKGAGFPSIPVGKSPMVEQAVQTGSADNLNAKKLLPGKGTTGTQLNGRQAQPSSKTASDVVQPAAVQAQGQVNDENRRPQRRRSGNRRTRNRSRGQNRPTNVKENTIKFEGDFDFESANAQFNREELDKEFKKKLNFKDDKAEKGEEKDLAVVTQSAEAPAEEDLLGPNCYYDKSKSFFDNISSELKT

SEQ ID NO: 65100 - protein, 128 aa, Homo sapiens
MPLEMEPKMSKLAFGCQRSSTSDDDSGCALEEYAWVPPGLRPEQIQLYFACLPEEKVPYVNSPGEKHRIKQLLYQLPPHDNEVRYCQSLSEEEKKELQVFSAQRKKEALGRGTIKLLSRAVMHAVCEQ

SEQ ID NO: 65101 - protein, 278 aa, Homo sapiens
  MOD_RES (1)..(1): Any amino acid
XEKESSRGRGNNNRKGRGGNRGREFRGEENGIDCNQVDKPSDRGKRARGRGFGRGRGRGAGRFSTQGMGTFNPADYSDSTSTDVCGTKLVVWEAAQNGADEGTGAWKNSVEEWTTEDWTEDLSETKVFTASSAPAENHILPGQSIDLVALLQKPVPHSQASEANSFETSQQQGFGQALVFTNSQHNNQMAPGTGSSTAVNSCSPQSLSSVLGSGFGELAPPKMANITSSQILDQLKAPSLGQFTTTPSTQQNSTSHPTTTTSWDLKPPTSQSSVLSHL

SEQ ID NO: 65102 - protein, 194 aa, Homo sapiens
MAPGWPSLSAGSRQEAPQLAAGGSAYQAVGRQFQPRATALQGPSQVTATGGPANSSRLGGAFGWESAGPGWRPDLRRSSSSPRLFAAELRPAQTGSVLGLTSRAAQPQHAPASPVLWKRQGTSSRQGPGRRLCTRRTILRAYDNSRRPSPVSAMSVASTSTGCIPASTVSSSAVSQRSIFTSMRRRSGTTWPLI

SEQ ID NO: 65103 - protein, 258 aa, Homo sapiens
MELPQLDRGTLCQWSTLSYPGLVKELCALFIGSELLPKDELNDLIDRAFSRFRHREVVHLSRLRNGLNVLELWHGVTYAFKDLSLSCTTQFLQYFLEKREKHVTVVVGTSGDTGSAAIESVQGAKNMDIIVLLPKGHCTKIQELQMTTVLKQNVHVFGVEGNSDELDEPIKTVFADVAFVKKHNLMSLNSINWSRVLVQMAHHFFAYFQCTPSLDTHPLPLVEVVVPTGAAGNLAALPGAASPLPLQPSSRKLSWLLA

SEQ ID NO: 65104 - protein, 942 aa, Homo sapiens
MVVSAGHWSSEKAEMNILEINETLRPQLPENKQQLRNLKEKCFLTQLAGFLANRQKKYKYEECKDLIKFMLRNERQFKEEKLAEQLKQAEELRQYKVLVHSQERELTQLKEKLREGRDASRSLNEHLQALLTPDEPDKSQGQDLQEQLAEGCRLAQHLVQKLSPENDEDEDEDVQVEEDEKVLESSAPREVQKTEESKVPEDSLEECAITCSNSHGPCDSNQPHKNIKITFEEDEVNSTLVVDRESSHDECQDALNILPVPGPTSSATNVSMVVSAGPLSGEKAAINILEINEKLRPQLAEKKQQFRNLKEKCFLTQLAGFLANQQNKYKYEECKDLIKSMLRNERQFKEEKLAEQLKQAEELRQYKVLVHAQERELTQLREKLREGRDASRSLNEHLQALLTPDEPDKSQGQDLQEQLAEGCRLAQHLVQKLSPENDNDDDEDVQVEVAEKVQKSSAPREMQKAEEKEVPEDSLEECAITCSNSHGPYDCNQPHRKTKITFEEDKVDSTLIGSSSHVEWEDAVHIIPENESDDEEEEEKGPVSPRNLQESEEEEVPQESWDEGYSTLSIPPEMLASYKSYSSTFHSLEEQQVCMAVDIGRHRWDQVKKEDHEATGPRLSRELLDEKGPEVLQDSLDRCYSTPSGCLELTDSCQPYRSAFYVLEQQRVGLAVDMDEIEKYQEVEEDQDPSCPRLSRELLDEKEPEVLQDSLGRCYSTPSGYLELPDLGQPYSSAVYSLEEQYLGLALDVDRIKKDQEEEEDQGPPCPRLSRELLEVVEPEVLQDSLDRCYSTPSSCLEQPDSCQPYGSSFYALEEKHVGFSLDVGEIEKKGKGKKRRGRRSKKERRRGRKEGEEDQNPPCPRLNSMLMEVEEPEVLQDSLDICYSTPSMYFELPDSFQHYRSVFYSFEEEHISFALYVDNRFFTLTVTSLHLVFQMGVIFPQ

SEQ ID NO: 65105 - protein, 534 aa, Homo sapiens
MVYTQSEILQKEVYLFERIDSQNREIMKHLKAICFLRPTKENVDYIIQELRRPKYTIYFIYFSNVISKSDVKSLAEADEQEVVAEVQEFYGDYIAVNPHLFSLNILGCCQGRNWDPAQLSRTTQGLTALLLSLKKCPMIRYQLSSEAAKRLAECVKQVITKEYELFEFRRTEVPPLLLILDRCDDAITPLLNQWTYQAMVHELLGINNNRIDLSRVPGISKDLREVVLSAENDEFYANNMYLNFAEIGSNIKNLMEDFQKKKPKEQQKLESIADMKAFVENYPQFKKMSGTVSKHVTVVGELSRLVSERNLLEVSEVEQELACQNDHSSALQNIKRLLQNPKVTEFDAARLVMLYALHYERHSSNSLPGLMMDLRNKGVSEKYRKLVSAVVEYGGKRVRGSDLFSPKDAVAITKQFLKGLKGVENVYTQHQPFLHETLDHLIKGRLKENLYPYLGPSTLRDRPQDIIVFVIGGATYEEALTVYNLNRTTPGVRIVLGGTTVHNTKSFLEEVLASGLHSRSKESSQVTSRSASRR

SEQ ID NO: 65106 - protein, 240 aa, Homo sapiens
MPASQSRARARDRNNVLNRAEFLSLNQPPKGGPEPRSSGRKASGPSAQPPPAGDGARERRQSQQLPEEDCMQLNPSFKGIAFNSLLAIDICMSKRLGVCAGRAASWASARSMVKLIGITGHGIPWIGGTILCLVKSSTLAGQEVLMNLLLDEPKPRLWSQQSQLGHQPPTGVCVTLGNSLDLSELRFSVSLKWEEPTRPASQSLDSSLGHLKWNVSVVQAVVAVHFFSAVSPVPRTVPGT

SEQ ID NO: 65107 - protein, 36 aa, Homo sapiens
MFKGCVCNSAGGSHSIKPEENCVPRDRVLLCTQAGV

SEQ ID NO: 65108 - protein, 166 aa, Homo sapiens
MHGAPRLTFPCASEYLWHAREKAYQDHRRKVQSAQPLVDTRAPLTFRHLHLKLKRLKLEEERLSVIERDNRLLLEKVASVMRTRGQTDSKNNSKHRSLHRGKREQELRRVRKKTRPFWKESHTQNHGMELKGGVKTGAGLRSPGCWCGISLETADTPSKKQEVKLD

SEQ ID NO: 65109 - protein, 224 aa, Homo sapiens
MAPAMESPTLLCVALLFFAPDGVLAVSSTKWFHNGSLSEETNSSLNIVNAKFEDSGEYKCQHQQVNESEPVYLEVFSDWLLLQASAEVVMEGQPLFLRCHGWRNWDVYKVIYYKDGEALKYWYENHNISITNATVEDSGTYYCTGKVWQLDYESEPLNITVIKAPREKYWLQFFIPLLVVILFAVDTGLFISTQQQVTFLLKIKRTRKGFRLLNPHPKPNPKNN

SEQ ID NO: 65110 - protein, 53 aa, Homo sapiens
MRSRKLTGAVRSSARLKARSCSAARLASAQEVAGSTSAKTACLPSHRFRGASS

SEQ ID NO: 65111 - protein, 280 aa, Homo sapiens
QGNESIVAKTTVTVPNDGGPIEAVSTIETVPYWTRSRRKTGTLQPWNSDSTLNSRQLEPRTETDSVGTPQSNGGMRLHDFVSKTGMLADFVSQTSPMIPSIVVHCVNEIEQRGLTETGLYRISGCDRTVKELKEKFLRVKTVPLLSKVDDIHAICSLLKDFLRNLKEPLLTFRLNRAFMEAAEITDEDNSIAAMYQAVGELPQANRDTLAFLMIHLQRVAQSPHTKMDVANLAKVFGPTIVAHAVPNPDPVTMLQDIKRQPKVVERLLSLPLEYWSQFMM

SEQ ID NO: 65112 - protein, 403 aa, Homo sapiens
MSRRKQTNPNKVHWDQVFAGLEEQARQAMMKTDFPGDLGSQRQAIQQLRDQDSSSSDSEGDEEETTQDEVSSHTSEEDGGVVKVEKELENTEQPVGGNEVVEHEVTGNLNSDPLLELCQCPLCQLDCGSREQLIAHVYQHTAAVVSAKSYMCPVCGRALSSPGSLGRHLLIHSEDQRSNCAVCGARFTSHATFNSEKLPEVLNMESLPTVHNEGPSSAEGKDIAFSPPVYPAGILLVCNNCAAYRKLLEAQTPSVRKWALRRQNEPLEVRLQRLERERTAKKSRRDNETPEEREVRRMRDREAKRLQRMQETDEQRARRLQRDREAMRLKRANETPEKRQARLIREREAKRLKRRLEKMDMMLRAQFGQDPSAMAALAAEMNFFQLPVSGVELDSQLLGKMAF

SEQ ID NO: 65113 - protein, 72 aa, Homo sapiens
MAVFKTTLWRLISGTLGIICLSLMSTLGILLKNSFTKLSIEPAFTPGPNIELQKAGFYELQSTILLDWTLLQ

SEQ ID NO: 65114 - protein, 150 aa, Homo sapiens
MVKLFIGNLPREATEQEIRSLFEQYGKVLECDIIKNYGFVHIEDKTAAEDAIRNLHHYKLHGVNINVEASKNKSKTSTKLHVGNISPTCTNKELRAKFEEYGPVIECDIVKDYAFVHMERAEDAVEAIRGLDNTEFQDIQLCHPSCSVVA

SEQ ID NO: 65115 - protein, 93 aa, Homo sapiens
MAEAHQAVAFQFTVTPDGIDLRLSHEALRQIYLSGLHSWKKKFIRFKNGIITGVYPASPSSWLIVVVGVMTTMYAKIDPSLGIIAKINRTLET

SEQ ID NO: 65116 - protein, 88 aa, Homo sapiens
MILNSLSLCYHNKLILAPMVRVGTLPMRLLALDYGADIVYCEELIDLKMIQCKRVVNEVLSTVDFVAPDDRVVFRTCEREQNRVVFQM

SEQ ID NO: 65117 - protein, 281 aa, Homo sapiens
MPREDRATWKSNYFLKIIQLLDDYPKCFIVGADNVGSKQMQQIRMSLRGKAVVLMGKNTMMRKAIRGHLENNPALEKLLPHIRGNVGFVFTKEDLTEIRDMLLANKVPAAARAGAIAPCEVTVPAQNTGLGPEKTSFFQALGITTKISRGTIEILVFDNGSIYNPEVLDITEETLHSRFLEGVRNVASVCLQIGYPTVASVPHSIINGYKRVLALSVETDYTFPLAEKVKAFLADPSAFVAAAPVAAATTAAPAAAAAPAKVEAKEESEESDEDMGFGLFD

SEQ ID NO: 65118 - protein, 477 aa, Homo sapiens
MTIGRMENVEVFTAEGKGRGLKATKEFWAADIIFAERAYSAVVFDSLVNFVCHTCFKRQEKLHRCGQCKFAHYCDRTCQKDAWLNHKNECSAIKRYGKVPNENIRLAARIMWRVEREGTGLTEGCLVSVDDLQNHVEHFGEEEQKDLRVDVDTFLQYWPPQSQQFSMQYISHIFGVINCNGFTLSDQRGLQAVGVGIFPNLGLVNHDCWPNCTVIFNNGKIELRALGKISEGEELTVSYIDFLNVSEERKRQLKKQYYFDCTCEHCQKKLKDDLFLGVKDNPKPSQEVVKEMIQFSKDTLEKIDKARSEGLYHEVVKLCRECLEKQEPVFADTNIYMLRMLSIVSEVLSYLQAFEEASFYARRMVDGYMKLYHPNNAQLGMAVMRAGLTNWHAGNIEVGHGMICKAYAILLVTHGPSHPITKDLEAMRVQTEMELRMFRQNEFMYYKMREAALNNQPMQVMAEPSNEPSPALFHKKQ

SEQ ID NO: 65119 - protein, 92 aa, Homo sapiens
SSPMSAPVRPKTSPGSPKTVFPFSYQESPPRSPRRMSFSGIFRSSSKESSPNSNPATSPGGIRFFSRSRKSKTLMLLFQPPASPPLRQHPPK

SEQ ID NO: 65120 - protein, 637 aa, Homo sapiens
MSRMLPFLLLLWFLPITEGSQRAEPMFTAVTNSVLPPDYDSNPTQLNYGVAVTDVDHDGDFEIVVAGYNGPNLVLKYDRAQKRLVNIAVDERSSPYYALRDRQGNAIGVTACDIDGDGREEIYFLNTNNAFSGVATYTDKLFKFRNNRWEDILSDEVNVARGVASLFAGRSVACVDRKGSGRYSIYIANYAYGNVGPDALIEMDPEASDLSRGILALRDVAAEAGVSKYTGGRGVSVGPILSSSASDIFCDNENGPNFLFHNRGDGTFVDAAASAGVDDPHQHGRGVALADFNRDGKVDIVYGNWNGPHRLYLQMSTHGKVRFRDIASPKFSMPSPVRTVITADFDNDQELEIFFNNIAYRSSSANRLFRVIRREHGDPLIEELNPGDALEPEGRGTGGVVTDFDGDGMLDLILSHGESMAQPLSVFRGNQGFNNNWLRVVPRTRFGAFARGAKVVLYTKKSGAHLRIIDGGSGYLCEMEPVAHFGLGKDEASSVEVTWPDGKMVSRNVASGEMNSVLEILYPRDEDTLQDPAPLECGQGFSQQENGHCMDTNECIQFPFVCPRDKPVCVNTYGSYRCRTNKKCSRGYEPNEDGTACVAQVAFLGGYSSAASRISEPLSRASYLSLGLGLCLQLYAL

SEQ ID NO: 65121 - protein, 62 aa, Homo sapiens
MEELETSLFQTRKAHRIEQMVARWLRRSRDSSARAKVAAADGPARNPTQTLIPVRHTVKIDK

SEQ ID NO: 65122 - protein, 104 aa, Homo sapiens
MEEVPGDALCEHFEANILTQNRCQNCFHPEEAHGARYQELRSPSGAEVPYCDLPRCPPAPEDPLSASTSGCQSVVDPGLRPGPKRTGTLLRGRRRRPPAGTSSQ

SEQ ID NO: 65123 - protein, 119 aa, Homo sapiens
MNPVPQMEMQKSPVFCVAQAGSCRPELFIFRHLGSSPRFTSQKSDDDYEDYASNKTWVLTPKVPEGDVTVILNNLLEGYDNKLRPDIGVKPTLIHTDMYVNSIGPVNAINMEYTIDIFF

SEQ ID NO: 65124 - protein, 244 aa, Homo sapiens
MSLYPSLEDLKVDKVIQAQTAFSANPANPAILSEASAPIPHDGNLYPRLYPELSQYMGLSLNEEEIRANVAVVSGAPLQGGIFVQLVQANSPASLVGLRFGDQVLQINGENCAGWSSDKAHKVLKQAFGEKITMTIRDRPFERTITMHKDSTGHVGFIFKNGKITSIVKDSSAARNGLLTEHNICEINGQNVIGLKDSQIADILSTSGTVVTITIMPAFIFEHIIKRMAPSIMKSLMDHTIPEV

SEQ ID NO: 65125 - protein, 104 aa, Homo sapiens
  MOD_RES (1)..(1): Any amino acid
XEPTKTRKSPSSDSWTCADTSTERRSSDSWEFFLFEESDWSGKDGNAGNDTGAHAAIRPPSAPESTPAWACAVRPASVVTLCGSPASAPSHHQVHQVHQTRPPQ

SEQ ID NO: 65126 - protein, 435 aa, Homo sapiens
MALRSAQGDGPTSGHWDGGAEKADFNAKRKKKVAEIHQALNSDPTDVAALRRMAISEGGLLTDEIRRKVWPKLLNVNANDPPPISGKNLRQMSKDYQQVLLDVRRSLRRFPPGMPEEQREGLQEELIDIILLILERNPQLHYYQGYHDIVVTFLLVVGERLATSLVEKLSTHHLRDFMDPTMDNTKHILNYLMPIIDQVNPELHDFMQRLECNGMILAHCNLYLPGSSDSSASASSSWDYSAEVGTIFALSWLITWFGHVLSDFRHVVRLYDFFLACHPLMPIYFAAVIVLYREQEVLDCDCDMASVHHLLSQIPQDLPYETLISRAGDLFVQFPPSELAREAAAQQQAERTAASTFKDFELASAQQRPDMVLRQRFRGLLRPEDRTKDVLTKPRTNRFVKLAVMGLTVALGAAALAVVKSALEWAPKFQLQLFP

SEQ ID NO: 65127 - protein, 135 aa, Homo sapiens
  MOD_RES (1)..(1): Any amino acid
XGCAERRPLQPRTEAAAAPAGRAMPSEYTYVKLRSDCSRPSLQWYTRAQSKMRRPSLLLKDILKCTLLVFGVWILYILKLNYTTEECDMKKMHYVDPDHVKRAQKYAQQVLQKECRPKFAKTSMALLFEHRARPP

SEQ ID NO: 65128 - protein, 148 aa, Homo sapiens
MNRLRNAKIYVERAVKQKKIFTIQGCYPVIRCLLRRRGWVEKKMVHRSGPTLLPPQKDLDSSAMGDSDTTEDEDEDEDEEFQPSQLFDFDDLLKFDDLDGTHALMSRMVQNEIPYFIWTTRRDVLDCRFLSKDQMINHYARAGSFTTK

SEQ ID NO: 65129 - protein, 65 aa, Homo sapiens
MGMTRMLLECSLSDKLCVIQEKQYEVIIVPTLLVTIFLILLGVILWLFIREQRTQQQRSGPQGKA

SEQ ID NO: 65130 - protein, 165 aa, Homo sapiens
MRVHISSCLKVQEQMANCPKFVPVVPTSQPIPSNIPNRSTFACPYCGARNLDQQELVKHCVESHRSDPNRVVCPICSAMPWGDPSYKSANFLQHLLHRHKFSYDTFVVGIPPAPSSPTPSSSTLLLLGPLASLRVRRVQRKPETEASFQVATFPQVLWGLPAGGE

SEQ ID NO: 65131 - protein, 1151 aa, Homo sapiens
MVQVEFYVNENTFKERLKLFFIKNQRSSLRIRLFNFSLKLLTCLLYIVRVLLDDPALGIGCWGCPKQNYSFNDSSSEINWAPILWVERKMTLWAIQVIVAIISFLETMLLIYLSYKGNIWEQIFRVSFVLEMINTLPFIITIFWPPLRNLFIPVFLNCWLAKHALENMINDFHRAILRTQSAMFNQVLILFCTLLCLVFTGTCGIQHLERAGENLSLLTSFYFCIVTFSTVGYGDVTPKIWPSQLLVVIMICVALVVLPLQFEELVYLWMERQKSGGNYSRHRAQTEKHVVLCVSSLKIDLLMDFLNEFYAHPRLQDYYVVILCPTEMDVQVRRVLQIPLWSQRVIYLQGSALKDQDLMRAKMDNGEACFILSSRNEVDRTAADHQTILRAWAVKDFAPNCPLYVQILKPENKFHVKFADHVVCEEECKYAMLALNCICPATSTLITLLVHTSRGQEGQESPEQWQRMYGRCSGNEVYHIRMGDSKFFREYEGKSFTYAAFHAHKKYGVCLIGLKREDNKSILLNPGPRHILAASDTCFYINITKEENSAFIFKQEEKRKKRAFSGQGLHEGPARLPVHSIIASMGTVAMDLQGTEHRPTQSGGGGGGSKLALPTENGSGSRRPSIAPVLELADSSALLPCDLLSDQSEDEVTPSDDEGLSVVEYVKGYPPNSPYIGSSPTLCHLLPVKAPFCCLRLDKGCKHNSYEDAKAYGFKNKLIIVSAETAGNGLYNFIVPLRAYYRSRKELNPIVLLLDNKPDHHFLEAICCFPMVYYMEGSVDNLDSLLQCGIIYADNLVVVDKESTMSAEEDYMADAKTIVNVQTMFRLFPSLSITTELTHPSNMRFMQFRAKDSYSLALSKLEKRERENGSNLAFMFRLPFAAGRVFSISMLDTLLYQSFVKDYMITITRLLLGLDTTPGSGYLCAMKITEGDLWIRTYGRLFQKLCSSSAEIPIGIYRTESHVFSTSEPHDLRAQSQISVNVEDCEDTREVKGPWGSRAGTGGSSQGRHTGGGDPAEHPLLRRKSLQWARRLSRKAPKQAGRAAAAEWISQQRLSLYRRSERQELSELVKNRMKHLGLPTTGYDEMNDHQNTLSYVLINPPPDTRLEPSDIVYLIRSDPLAHVASSSQSRKSSCSHKLSSCNPETRDETQL

SEQ ID NO: 65132 - protein, 2366 aa, Homo sapiens [sequence omitted]

SEQ ID NO: 65133 - protein, 214 aa, Homo sapiens
MLGWVQRVLPQPPGTPRKTKMQEEEEVEPEPEMEAEVEPEPNPEEAETESESMPPEESFKEEEVAVADPSPQETKEAALTSTISLRAQGAEISEMNSPSRRVLTWLMKGVEKVIPQPVHSITEDPAQILGHGSTGDTGCTDEPNEALEAQDTRPGLRLLLWLEQNLERVLPQPPKSSEVWRDEPAVATGAASDPAPPGRPQEMGPKLQARETPS

SEQ ID NO: 65134 - protein, 263 aa, Homo sapiens
  MOD_RES (1)..(1): Any amino acid
XFWLVINQEGNMVTARQEPRLVLISLTCDGDTLTLSAAYTKDLLLPIKTPTTNAVHKCRVHGLEIEGRDCGEATAQWITSFLKSQPYRLVHFEPHMRPRRPHQIADLFRPKDQIAYSDTSPFLILSEASLADLNSRLEKKVKATNFRPNIVISGCDVYAEVTLCPFGSFLGFDFFFKDSWDELLIGDVELKRVMACSRCILTTVDPDTGVMSRKEPLETLKSYRQCDPSERKLYGKSPLFGQYFVLENPGTIKVGDPVYLLGQ

SEQ ID NO: 65135 - protein, 126 aa, Homo sapiens
MEEFDLVKTLHKTSSSVGSDENSLHSLGLNLNTDRSSPHLSTNGVSSFSGKTRPSVIQGTVEVLTSLMQELQNSGKTDSELWKNCETRWLQLFNLVEKQCQEQIVAQQEQFHNQIQNLKYSKKCPR

SEQ ID NO: 65136 - protein, 30 aa, Homo sapiens
MNQRGARVSSPILIISYETFRLHVGVLQKG

SEQ ID NO: 65137 - protein, 108 aa, Homo sapiens
MDIDKDLEAPLYLTPEGWSLFLQRYYQVVHEGAELRHLDTQVQRCEDILQQLQAVVPQIDMEGDRNIWIVKPGAKSRGRGIMCMDHLEEMLKLVNGNPVVMKDGNPSP

SEQ ID NO: 65138 - protein, 144 aa, Homo sapiens
  MOD_RES (1)..(1): Any amino acid
XVTVTTPDEITSVFDGISYSKGSSILRMLEDWIKPENFQKGCQMYLEKYQFKNAKTSDFWAALEEASRLPVKEVMDTWTRQMGYPVLNVNGVKNITQKRFLLDPRANPSQPPSDLGYTWNIPVKWTEDNITSSVLFNRSEKEVN

SEQ ID NO: 65139 - protein, 170 aa, Homo sapiens
MAATASPQPLATEDADSENSSFYYYDYLDEVAFMLCRKDAVVSFGKVFLPVFYSLIFVLGLSGNLLLLMVLLRYVPRRRMVEIYLLNLAISNLLFLVTLPFWGISVAWHWVFGSFLCKMVSTLYTINFYSGIFFISCMSLDKYLEIVHAQPYHRLRTRAKSLLLATIVWA

SEQ ID NO: 65140 - protein, 212 aa, Homo sapiens
MQPDPRPSGAGACCRFLPLQSQCPEGAGDAVMYASTECKAEVTPSQHGNRTFSYTLEDHTKQAFGIMNELRLSQQLCDVTLQVKYQDAPAAQFMAHKVVLASSSPVFKAMFTNGLREQGMEVVSIEGIHPKVMERLIEFAYTASISMGEKCVLHVMNGAVMYQIDSVVRACSDFLVQQLDPSNAIGIANFAEQIGCVELHQRAREYIYMHFG

SEQ ID NO: 65141 - protein, 839 aa, Homo sapiens
MNGHISNHPSSFGMYPSQMNGYGSSPTFSQTDREHGSKTSAKALYGPDGSYFLRSSSKQKKKEQRKNYARDSVSSVSDISQYRVEHLTTFVLDRKDAMITVDDGIRKLKLLDAKGKVWTQDMILQVDDRAVSLIDLESKNELENFPLNTIQHCQAVMHSCSYDSVLALVCKEPTQNKPDLHLFQCDEVKANLISEDIESAISDSKGGKQKRRPDALRMISNADPSIPPPPRAPAPAPPGTVTQVDVRSRVAAWSAWAADQGDFEKPRQYHEQEETPEMMAARIDRDVQILNHILDDIEFFITKLQKAAEAFSELSKRKKNKKGKRKGPGEGVLTLRAKPPPPDEFLDCFQKFKHGFNLLAKLKSHIQNPSAADLVHFLFTPLNMVVQATGGPELASSVLSPLLNKDTIDFLNYTVNGDERQLWMSLGGTWMKARAEWPKEQFIPPYVPRFRNGWEPPMLNFMGATMEQDLYQLAESVANVAEHQRKQEIKRLSTEHSSVSEYHPADGYAFSSNIYTRGSHLDQGEAAVAFKPTSNRHIDRNYEPLKTQPKKYAKSKYDFVARNNSELSVLKDDILEILDDRKQWWKVRNASGDSGFVPNNILDIVRPPESGLGRADPPYTHTIQKQRMEYGPRPADTPPAPSPPPTPAPVPVPLPPSTPAPVPVSKVPANITRQNSSSSDSGGSIVRDSQRHKQLPVDRRKSQMEEVQDELIHRLTIGRSAAQKKFHVPRQNVPVINITYDSTPEDVKTWLQSKGFNPVTVNSLGVLNGAQLFSLNKDELRTVCPEGARVYSQITVQKAALEDSSGSSELQEIMRRRQEKISAAASDSGVESFDEGSSH

SEQ ID NO: 65142 - protein, 53 aa, Homo sapiens
MQQKAFEESRYPWQESFENVAVCLPLRCPRCGDHTRFRSLSSLRAHLEFSHSY

SEQ ID NO: 65143 - protein, 389 aa, Homo sapiens
  MOD_RES (1)..(1): Any amino acid
XRRTRFVFQKALRSLRRYPLPLRSGKEAKILQHFGDGLCRMLDERLQRHRTSGGDHAPDSPSGENSPAPQGRLAEVQDSSMPVPAQPKAGGSGSYWPARHSGARVILLVLYREHLNPNGHHFLTKEELLQRCAQKSPRVAPGSARPWPALRSLLHRNLVLRTHQPARYSLTPEGLELAQKLAESEGLSLLNVGIGPKEPPGEETAVPGAASAELASEAGVQQQPLELRPGEYRVLLCVDIGETRGGGHRPELLRELQRLHVTHTVRKLHVGDFVWVAQETNPRDPANPGELVLDHIVERKRLDDLCSSIIDGRFREQKFRLKRCGLERRVYLVEEHGSVHNLSLPESTLLQAVTNTQVIDGFFVKRTADIKESAAYLALLTRGLQRLYQ

SEQ ID NO: 65144 - protein, 87 aa, Homo sapiens
  MOD_RES (1)..(1): Any amino acid
XDDSIEADILAITGPEDQPGSLEVNGNKVRKKLMAPDISLTLDPSDGSVLSDDLDESGEIDLDGLDTPSENSNEFEWEVISWKDIFR

SEQ ID NO: 65145 - protein, 74 aa, Homo sapiens
MQVHKETIDAVPNAIPGRTDIELEIYGMEGIPEKDMDERRRLLEQKTQESQKKKQQDDSDEYDDDDSAASTSFQ

SEQ ID NO: 65146 - protein, 572 aa, Homo sapiens
MAVYVGMLRLGRLCAGSSGVLGARAALSRSWQEARLQGVRFLSSREVDRMVSTPIGGLSYVQGCTKKHLNSKTVGQCLETTAQRVPEREALVVLHEDVRLTFAQLKEEVSVNPAYQAMELEYVLKKVGCKALVFPKQFKTQQYYNVLKQICPEVENAQPGALKSQRLPDLTTVISVDAPLPGTLLLDEVVAAGSTRQHLDQLQYNQQFLSCHDPINIQFTSGTTGSPKGATLSHYNIVNNSNILGERLKLHEKTPEQLRMILPNPLYHCLGSVAGTMMCLMYGATLILASPIFNGKKALEAISRERGTFLYGTPTMFVDILNQPDFSSYDISTMCGGVIAGSPAPPELIRAIINKINMKDLVVAYGTTENSPVTFAHFPEDTVEQKAESVGRIMPHTEARIMNMEAGTLAKLNTPGELCIRGYCVMLGYWGEPQKTEEAVDQDKWYWTGDVATMNEQGFCKIVGRSKDMIIRGGENIYPAELEDFFHTHPKVQEVQVVGVKDDRMGEEICACIRLKDGEETTVEEIKAFCKGKISHFKIPKYIVFVTNYPLTISGKIQKFKLREQMERHLNL

SEQ ID NO: 65147 - protein, 152 aa, Homo sapiens
AIEALILDPESASFQEYGSTGTAHADSEYERRMMSVYNHVLEEVESLNRKYTPVSYMIPIDNMTNEMEQRVEPHNDYFSTQFLLNFAILGTHNITVESSVKDANGIVWKTGPRTTIFVKSLEDPYSQQIRLQQQQAQQPLQQQQQRNAYTRF

SEQ ID NO: 65148 - protein, 43 aa, Homo sapiens
MAGSQDIFDAIVMADERSGATKVLLLHGNVYCTVAPLRRTAER

SEQ ID NO: 65149 - protein, 103 aa, Homo sapiens
MEDSEALGFEHMGLDPRLLQAVTDLGWSRPTLIQEKAIPLALEGKDLLARARTGSGKTAAYAIPMLQLLLHRKASCADGEARCGSRDPISHIKPLAARQPETS

SEQ ID NO: 65150 - protein, 1286 aa, Homo sapiens
MAAVPQNNLQEQLERHSARTLNNKLSLSKPKFSGFTFKKKTSSDNNVSVTNVSVAKTPVLRNKDVNVTEDFSFSEPLPNTTNQQRVKDFFKNAPAGQETQRGGSKSLLPDFLQTPKEVVCTTQNTPTVKKSRDTALKKLEFSSSPDSLSTINDWDDMDDFDTSETSKSFVTPPQSHFVRVSTAQKSKKGKRNFFKAQLYTTNTVKTDLPPPSSESEQIDLTEEQKDDSEWLSSDVICIDDGPIAEVHINEDAQESDSLKTHLEDERDNSEKKKNLEEAELHSTEKVPCIEFDDDDYDTDFVPPSPEEIISASSSSSKCLSTLKDLDTSDRKEDVLSTSKDLLSKPEKMSMQELNPETSTDCDARQISLQQQLIHVMEHICKLIDTIPDDKLKLLDCGNELLQQRNIRRKLLTEVDFNKSDASLLGSLWRYRPDSLDGPMEGDSCPTGNSMKELNFSHLPSNSVSPGDCLLTTTLGKTGFSATRKNLFERPLFNTHLQKSFVSSNWAETPRLGKKNESSYFPGNVLTSTAVKDQNKHTASINDLERETQPSYDIDNFDIDDFDDDDDWEDIMHNLAASKSSTAAYQPIKEGRPIKSVSERLSSAKTDCLPVSSTAQNINFSESIQNYTDKSAQNLASRNLKHERFQSLSFPHTKEMMKIFHKKFGLHNFRTNQLEAINAALLGEDCFILMPTGGGKSLCYQLPACVSPGVTVVISPLRSLIVDQVQKLTSLDIPATYLTGDKTDSEATNIYLQLSKKDPIIKLLYVTPEKICASNRLISTLENLYERKLLARFVIDEAHCVSQWGHDFRQDYKRMNMLRQKFPSVPVMALTATANPRVQKDILTQLKILRPQVFSMSFNRHNLKYYVLPKKPKKVAFDCLEWIRKHHPYDSGIIYCLSRRECDTMADTLQRDGLAALAYHAGLSDSARDEVQQKWINQDGCQVICATIAFGMGIDKPDVRFVIHASLPKSVEGYYQESGRAGRDGEISHCLLFYTYHDVTRLKRLIMMEKDGNHHTRETHFNNLYSMVHYCENITECRRIQLLAYFGENGFNPDFCKKHPDVSCDNCCKTKDYKTRDVTDDVKSIVRFVQEHSSSQGMRNIKHVGPSGRFTMNMLVDIFLESLSSDPEVLLQIDGVTEDKLEKYGAEVISVLQKYSEWTSPAEDSSPGISLSSSRGPGRSAAEELDEEIPVSSHYFASKTRNERKRKKMPASQRSKRRKTASSGSKAKGGSATCRKISSKTKSSSIIGSSSASHTSQATSGANSKLGIMAPPKPINRPFLKPSYAFS

SEQ ID NO: 65151 - protein, 71 aa, Homo sapiens
MLTENGQVLSCGSNSFGQLGVPHGPRRCVVPQAIEKYSFQKKEGQSSALSAVQPASGMLCFVVDLVLRPWA

SEQ ID NO: 65152 - protein, 80 aa, Homo sapiens
GPTGYVEKITCSSSKRNEFKSCRSALMEQRLFWKFEGAVVCVALIFACLVIIRQRQLDRKALEKVACSARSRSRSLIAPN

SEQ ID NO: 65153 - protein, 217 aa, Homo sapiens
MLGAWAVEGTAVALLRLLLLLLPPAIRGPGLGVAGVAGAAGAGLPESVIWAVNAGGEAHVDVHGIHFRKDPLEGRVGRASDYGMKLPILRSNPEDQILYQTERYNEETFGYEVPIKEEGDYVLVLKFAEVYFAQSQQKMYQSFSLIRDWRRKKRKKKKKNMMKGLISKNRPIRTGCSQAPAHPTPMPRTTAASCFPSWWPSESSFQPSSASAGCENK

SEQ ID NO: 65154 - protein, 173 aa, Homo sapiens
MATFPCQLCGKTFLTLEKFTIHNYSHSRERPYKCVQPDCGKAFVSRYKLMRHMATHSPQKSHQCAHCEKTFNRKDHLKNHLQTHDPNKMAFGCEECGKKYNTMLGYKRHLALHAASSGDLTCGVCALELGSTEVLLDHLKAHAEEKPPSGTKEKKHQCDHCERCFYTRKDVRR

SEQ ID NO: 65155 - protein, 2482 aa, Homo sapiens
MKGTDSGSCCRRRCDFGCCCRASRRAHYTPYRSGDATRTPQSPRQTPSRERRRPEPAGSWAAAAEEEEAAAAATPWMRDYFAEDDGEMVPRTSHTAAFLSDTKDRGPPVQSQIWRSGEKVPFVQTYSLRAFEKPPQVQTQALRDFEKHLNDLKKENFSLKLRIYFLEERMQQKYEASREDIYKRNIELKVEVESLKRELQDKKQHLDKTWADVENLNSQNEAELRRQFEERQQETEHVYELLENKIQLLQEESRLAKNEAARMAALVEAEKECNLELSEKLKGVTKNWEDVPGDQVKPDQYTEALAQRDKRIEELNQSLAAQERLVEQLSREKQQLLHLLEEPTSMEVQPMTEELLKQQKLNSHETTITQQSVSDSHLAELQEKIQQTEATNKILQEKLNEMSYELKCAQESSQKQDGTIQNLKETLKSRERETEELYQVIEGQNDTMAKLREMLHQSQLGQLHSSEGTSPAQQQVALLDLQSALFCSQLEIQKLQRVVRQKERQLADAKQCVQFVEAAAHESEQQKEASWKHNQELRKALQQLQEELQNKSQQLRAWEAEKYNEIRTQEQNIQHLNHSLSHKEQLLQEFRELLQYRDNSDKTLEANEMLLEKLRQRIHDKAVALERAIDEKFSALEEKEKELRQLRLAVRERDHDLERLRDVLSSNEATMQSMESLLRAKGLEVEQLSTTCQNLQWLKEEMETKFSRWQKEQESIIQQLQTSLHDRNKEVEDLSATLLCKLGPGQSEIAEELCQRLQRKERMLQDLLSDRNKQVLEHEMEIQGLLQSVSTREQESQAAAEKLVQALMERNSELQALRQYLGGRDSLMSQAPISNQQAEVTPTGRLGKQTDQGSMQIPSRDDSTSLTAKEDVSIPRSTLGDLDTVAGLEKELSNAKEELELMAKKERESQMELSALQSMMAVQEEELQVQAADMESLTRNIQIKEDLIKDLQMQLVDPEDIPAMERLTQEVLLLREKVASVESQGQEISGNRRQQLLLMLEGLVDERSRLNEALQAERQLYSSLVKFHAHPESSERDRTLQVELEGAQVLRSRLEEVLGRSLERLNRLETLAAIGGAAAGDDTEDTSTEFTDSIEEEAAHHSHQQLVKVALEKSLATVETQNPSFSPPSPMGGDSNRCLQEEMLHLRAEFHQHLEEKRKAEEELKELKAQIEEAGFSSVSHIRNTMLSLCLENAELKEQMGEAMSDGWEIEEDKEKGEVMVETVVTKEGLSESSLQAEFRKLQGKLKNAHNIINLLKEQLVLSSKEGNSKLTPELLVHLTSTIERINTELVGSPGKHQHQEEGNVTVRPFPRPQSLDLGATFTVDAHQLDNQSQPRDPGPQSAFSLPGSTQHLRSQLSQCKQRYQDLQEKLLLSEATVFAQANELEKYRVMLSESLVKQDSKQIQVDLQDLGYETCGRSENEAEREETTSPECEEHNSLKEMVLMEGLCSEQGRRGSTLASSSERKPLENQLGKQEEFRVYGKSENILVLRKDIKDLKAQLQNANKVIQNLKSRVRSLSVTSDYSSSLERPRKLRAVGTLEGSSPHSVPDEDEGWLSDGTGAFYSPGLQAKKDLESLIQRVSQLEAQLPKNGLEEKLAEELRSASWPGKYDSLIQDQARELSYLRQKIREGRGICYLITRHAKDTVKSFEDLLRSNDIDYYLGQSFREQLAQGSQLTERLTSKLSTKDHKSEKDQAGLEPLALRLSRELQEKEKVIEVLQAKLDARSLTPSSSHALSDSHRSPSSTSFLSDELEACSDMDIVSEYTHYEEKKASPSHSDSIHHSSHSAVLSSKPSSTSASQGAKAESNSNPISLPTPQNTPKEANQAHSGFHFHSIPKLASLPQAPLPSAPSSFLPFSPTGPLLLGCCETPVVSLAEAQQELQMLQKQLGESASTVPPASTATLLSNDLEADSSYYLNSAQPHSPPRGTIELGRILEPGYLGSSGKWDVMRPQKGSVSGDLSSGSSVYQLNSKPTGADLLEEHLGEIRNLRQRLEESICINDRLREQLEHRLTSTARGRGSTSNFYSQGLESIPQLCNENRVLREDNRRLQAQLSHVSREHSQETESLREALLSSRSHLQELEKELEHQKVERQQLLEDLREKQQEVLHFREERLSLQENDSRLQHKLVLLQQQCEEKQQLFESLQSELQIYEALYGNSKKGLKAYSLDACHQIPLSSDLSHLVAEVRALRGQLEQSIQGNNCLRLQLQQQLESGAGKASLSPSSINQNFPASTDPGNKQLLLQDSAVSPPVRDVGMNSPALVFPSSASSTPGSETPIINRANGLGLDTSPVMKTPPKLEGDATDGSFANKHGRHVIGHIDDYSALRQQIAEGKLLVKKIVSLVRSACSFPGLEAQGTEVLGSKGIHELRSSTSALHHALEESASLLTMFWRAALPSTHIPVLPGKVGESTERELLELRTKVSKQERLLQSTTEHLKNANQQKESMEQFIVSQLTRTHDVLKKARTNLEVKSLRALPCTPAL

SEQ ID NO: 65156 - protein, 88 aa, Homo sapiens
LNEQSRLLEQERWRVTAEQSKAESMQRALEEQRKVTAQQMAMERAELERAKSALLEEQKSVMLKCGEERRRLAAEWAEFSAQQKLRAG

SEQ ID NO: 65157 - protein, 467 aa, Homo sapiens
MGRSNSRSHSSRSKSRSQSSSRSRSRSHSRKKRYRSRSRTYSRSRSRDRMYSRDYRRDYRNNRGMRRPYGYRGRGRGYYQGGGGRYHRGGYRPVWNRRHSRSPRRGRSRSRSPKRRSVSSQRSRSRSRRSYRSSRSPRSSSSRSSSPYSKSPVSKRRGSQEKQTKKAEGEPQEESPLKSKSQEEPKDTFEHDPSESIDEFNKSSATSGDIWPGLSAYDNSPRSPHSPSPIATPPSQSSSCSDAPMLSTVHSAKNTPSQHSHSIQHSPERSGSGSVGNGSSRYSPSQNSPIHHIPSRRSPAKTIAPQNAPRDESRGRSSFYPDGGDQETAKTGKFLKSPPLHKNLDAREKSTFREESPLRIKMIASDSHRPEVKLKMAPVPLDDSNRPASLTKDRLLASTLVHSVKKEQEFRSIFDHIKLPQASKSTSESFIQHIVSLVHHVKGPGICFEMAKSMFQSKIAVERYRQS

SEQ ID NO: 65158 - protein, 50 aa, Homo sapiens
MQGPWVLLLLGLRLQLSLGVIPGNEAPQAVPHTGHPLSQADLISTLPLAS

SEQ ID NO: 65159 - protein, 94 aa, Homo sapiens
MTNSKGRSITDKTSGGPSSGGGFVDWTLRLNTIQSDKFLNLLLSMVPVIYQKNQEDRHKKANGIWQDGLSTAVQTFSNRSEQHMEYHSFSEQSF

SEQ ID NO: 65160 - protein, 262 aa, Homo sapiens
MSSQQFPRLGAPSTGLSQAPSQIANSGSAGLINPAATVNDESGRDSEVSAREHMSSSSSLQSREEKQEPVVVRPYPQVQMLSTHHAVASATPVAVTAPPAHLTPAVPLSFSEGLMKPPPKPTMPSRPIAPAPPSTLSLPPKVPGQVTVTMESSIPQASAIPVATISGQQGHPSNLHHIMTTNVQMSIIRSNAPGPPLHIGASHLPRGAAAAAVMSSSKVTTVLRPTSQLPNAATAQPAVQHIIHQPIQSRPPVTTSNAIPPA

SEQ ID NO: 65161 - protein, 28 aa, Homo sapiens
MAVSTVFSTSSLKLNQPQKYLKMKSWPC

SEQ ID NO: 65162 - protein, 108 aa, Homo sapiens
MEGVGHRDRLCYRHSRPFQLLEIVGREGVSLTAVLTTHHHWDHARGNPELARLRPGLAVLGADERIFSLTRRLAHGEELRFGAIHVRCLLTPGHTAGHMSYFLWEDDC

SEQ ID NO: 65163 - protein, 134 aa, Homo sapiens
MNSKGQYPTQPTYPVQPPGNPVYPQTLHLPQAPPYTDAPPAYSELYRPSFVHPGAATVPTMSAAFPGASLYLPMAQSVAVGPLGSTIPMAYYPVGPIYPPGSTVLVEGGYDAGARFGAGATAGNIPVCVLKLGR

SEQ ID NO: 65164 - protein, 48 aa, Homo sapiens
MAATLDLKSKEEKDAELDKRIEALRRKNEALIRRYQEIEEDRKKAELE

SEQ ID NO: 65165 - protein, 76 aa, Homo sapiens
  MOD_RES (1)..(1): Any amino acid
XDNESEEFLYGVQGSCAADLYRHPQLDADIEAVKEIYSENSVSIREYGTIDDVDIDLHINISFLDVSGASTCQQHV

SEQ ID NO: 65166 - protein, 336 aa, Homo sapiens
MGRRSSDTEEESRSKRKKKHRRRSSSSSSSDSRTYSRKKGGRKSRSKSRSWSRDLQPRSHSYDRRRRHRSSSSSSYGSRRKRSRSRSRGRGKSYRVQRSRSKSRTRRSRSRPRLRSHSRSSERSSHRRTRSRSRDRERRKGRDKEKREKEKDKGKDKELHNIKRGESGNIKAGLEHLPPAEQAKARLQLVLEAAAKADEALKAKERNEEEAKRRKEEGKDQATLVEQVKRVKEIEAIESDSFVQQTFRSSKEVKKSVEPSEVKQATSTSGPASAVADPPSTEKEIDPTSIPTAIKYQDDNSLAHPNLFIEKADAEEKWFKRLIALRQERLMGSPVA

SEQ ID NO: 65167 - protein, 69 aa, Homo sapiens
MAMIELGFGRQNFHPLKRKSSLLLKLIAVVFAVLLFCEFLIYYLAIFQCNWPEVKTTASDGEQTTREPV

SEQ ID NO: 65168 - protein, 199 aa, Homo sapiens
MSFSATILFSPPSGSEARCCCCACKSETNGGNTGSQGGNPPPSTPITVTGHGLAVQSSEQLLHVIYQRVDKAVGLAEAALGLARANNELLKRLQEEVGDLRQGKVSIPDEDGESRAHSSPPEEPGPLKESPGEAFKALSAVEEECDSVGSGVQVVIEELRQLGAASVGPGPLGFPATQRDMRLPGCTLAASEAAPLLNP

SEQ ID NO: 65169 - protein, 398 aa, Homo sapiens
MHLRIHARRSPPRRPAWTLGIWFLFWGCIVSSVWSSSNVASSSSTSSSPGSHSQHEHHFHGSKHHSVPISIYRSPVSLRGGHAGATYIFGKSGGLILYTWPANDRPSTRSDRLAVGFSTTVKDGILVRIDSAPGLGDFLQLHIEQGKIGVVFNIGTVDISIKEERTPVNDGKYHVVRFTRNGGNATLQVDNWPVNEHYPTGNTDNERFQMVKQKIPFKYNRPVEEWLQEKGRQLTIFNTQAQIAIGGKDKGRLFQGQLSGLYYDGLKVLNMAAENNPNIKINGSVRLVGEVPSILGTTQTTSMPPEMSTTVMETTTTMATTTTRKNRSTASIQPTSDDLVSSAECSSDDEDFVECEPSTGRSARSSNAARSLRAALTWTWRLTYTFTPIIFISCVVHS

SEQ ID NO: 65170 - protein, 730 aa, Homo sapiens
MAQSVLVPPGPDSFRFFTRESLAAIEQRIAEEKAKRPKQERKDEDDENGPKPNSDLEAGKSLPFIYGDIPPEMVSVPLEDLDPYYINKKTFIVLNKGKAISRFSATPALYILTPFNPIRKLAIKILVHSLFNMLIMCTILTNCVFMTMSNPPDWTKNVEYTFTGIYTFESLIKILARGFCLEDFTFLRDPWNWLDFTVITFAYVTEFVDLGNVSALRTFRVLRALKTISVIPGLKTIVGALIQSVKKLSDVMILTVFCLSVFALIGLQLFMGNLRNKCLQWPPDNSSFEINITSFFNNSLDGNGTTFNRTVSIFNWDEYIEDKSHFYFLEGQNDALLCGNSSDAGQCPEGYICVKAGRNPNYGYTSFDTFSWAFLSLFRLMTQDFWENLYQLTLRAAGKTYMIFFVLVIFLGSFYLINLILAVVAMAYEEQNQATLEEAEQKEAEFQQMLEQLKKQQEEAQAAAAAASAESRDFSGAGGIGVFSESSSVASKLSSKSEKELKNRRKKKKQKEQSGEEEKNDRVRKSESEDSIRRKGFRFSLEGSRLTYEKRFSSPHQSLLSIRGSLFSPRRNSRASLFSFRGRAKDIGSENDFADDEHSTFEDNDSRRDSLFVPHRHGERRHSNVSQASRASRVLPILPMNGKMHSAVDCNGVVSLVGGPSTLTSAGQLLPEGTTTETEIRKRRSSSYHVSMDLLEDPTSRQRAMSIASILTNTMEGKSFEDCLAFRSLP

SEQ ID NO: 65171 - protein, 72 aa, Homo sapiens
QHPLHVEVLHSEIMAHQKFALRLGSWMNKIMSYSSDFRQIFCQACLREEPDSENPCLISRLMLWDAKLYKVL

SEQ ID NO: 65172 - protein, 136 aa, Homo sapiens
MRGRQVAPETGGGCTGLSANTVCAGVRAVSLYEKILKLTADAKFESGDVKATVAVLSFILSSAAKHSVDGESLSSELQQLGLPKEHAASLCRCYEEKQSPLQKHLRVCSLRMNRLAGVGWRVDYTLSSSLLQSVEE

SEQ ID NO: 65173 - protein, 273 aa, Homo sapiens
RFAEGIRHMKSRLAALQNSVGRVGPDALPGISECSSQPCQNGGTCVEGVNQYRCICPPGRTGNRCQHQAQTAAPEGSVAGDSAFSRAPRCAQVERAQHCSCEAGFHLSGAAGDSVCQDVNECELYGQEGRPRLCMHACVNTPGSYRCTCPGGYRTLADGKSCEDVDECVGLQPVCPQGTTCINTGGSFQCVSPECPEGSGNVSYVKTSPFQCERNPCPMDSRPCRHLPKTISFHYLSLPSNLKTPITLFRMATASAPGRAGPNSLRFGIVGGN

SEQ ID NO: 65174 - protein, 176 aa, Homo sapiens
MDRRNDYGYRVPLFQGPLPPPGSLGLPFPPDIQTETTEEDSVLLMHTLLAATKDSLAMDPPVVNRPKKSKTKKAPIKTITKAAPAAPPVPAANEIATNKPKITWQALNLPVITQISQALPTTEVTNTQASSVTAQPKKANKMKRVTAKAAQGSQSPTGHEGGTIQLKSPLQVLKLP

SEQ ID NO: 65175 - protein, 970 aa, Homo sapiens
  MOD_RES (1)..(1): Any amino acid
XLDTLVAVIECQQPEADLYRFMGRMIITQQMEEIVRPLGPESLLLRGARLKNTKEIFGVAVYTGMETKMALNYKSKSQKRSAVEKSMNTFLIIYLVILISEAVISTILKYTWQAEEKWDEPWYNQKTEHQRNSSKILRFISDFLAFLVLYNFIIPISLYVTVEMQKFLGSFFIGWDLDLYHEESDQKAQVNTSDLNEELGQVEYVFTDKTGTLTENEMQFRECSINGMKYQEINGRLVPEGPTPDSSEGNLSYLSSLSHLNNLSHLTTSSSFRTSPENETELIKEHDLFFKAVSLCHTVQISNVQTDCTGDGPWQSNLAPSQLEYYASSPDEKALVEAAARIGIVFIGNSEETMEVKTLGKLERYKLLHILEFDSDRRRMSVIVQAPSGEKLLFAKGAESSILPKCIGGEIEKTRIHVDEFALKGLRTLCIAYRKFTSKEYEEIDKRIFEARTALQQREEKLAAVFQFIEKDLILLGATAVEDRLQDKVRETIEALRMAGIKVWVLTGDKHETAVSVSLSCGHFHRTMNILELINQKSDSECAEQLRQLARRITEDHVIQHGLVVDGTSLSLALREHEKLFMEVCRNCSAVLCCRMAPLQKAKVIRLIKISPEKPITLAVGDGANDVSMIQEAHVGIGIMGKEGRQAARNSDYAIARFKFLSKLLFVHGHFYYIRIATLVQYFFYKNVCFITPQFLYQFYCLFSQQTLYDSVYLTLYNICFTSLPILIYSLLEQHVDPHVLQNKPTLYRDISKNRLLSIKTFLYWTILGFSHAFIFFFGSYLLIGKDTSLLGNGQMFGNWTFGTLVFTVMVITVTVKMALETHFWTWINHLVTWGSIIFYFVFSLFYGGILWPFLGSQNMYFVFIQLLSSGSAWFAIILMVVTCLFLDIIKKVFDRHLHPTSTEKAQMYSNTVALSDEFIALQPLSRARNQLSKLSLLKQMQVSSAWTPCAVSRKEKQRVHLLEECWNEL

SEQ ID NO: 65176 - protein, 191 aa, Homo sapiens
MNFSGGGRQEAAGSRGRRAPRPREQDRDVQLSKALSYALRHGALKLGLPMGADGFVPLGTLLQLPQFRGFSAEDVQRVVDTNRKQRFALQLGDPSTGLLIRANQGHSLQVGVPKLELMPLETPQALPPMLVHGTFWKHWPSILLKGLSCQGRTHIHLAPGLPGDPGIISGMRSHCEIAVFIDGPLALADGI

SEQ ID NO: 65177 - protein, 187 aa, Homo sapiens
HPYWLPNFMDVFTWSLPFVGEKVTEMLVNVLSICSDDELMTEGEDQFDERLIYGNKKVGSAAARKEIIRNKIRAIGKMARVFSVLREESESVLTLKGLTPTGMLPSGVLAGGRQTLQSATVEAIEAEKAIRGFSPPHRICSFEEAKGLDRINERMPPRKDAVQQDGFNSLNTAHATENHGTGNHTAQ

SEQ ID NO: 65178 - protein, 420 aa, Homo sapiens
  MOD_RES (1)..(1): Any amino acid
XQLPRWWELGDPCAWTGQGRGTRRMSPATTGTFLLTVYSIFSKVHSDRNVYPSAGVLFVHVLEREYFKGEFPPYPKPGEISNDPITFNTNLMGYPDRPGWLRYIQRTPYSDGVLYGSPTAENVGKPTIIEITAYNRRTFETARHNLIINIMSAEEFFIKNMNVEEMLASEVLGDFLGAVKNVWQPERLNAINITSALDRGGRVPLPINDLKEGVYVMVGADVPFSSCLREVENPQNQLRCSQEMEPVITCDKKFRTQFYIDWCKISLVDKTKQVSTYQEVIRGEGILPDGGEYKPPSDSLKSRDYYTDFLITLAVPSAVALVLFLILAYIMCCRREGVIQLVHHSAIQKSTKELRDMSKNREIAWPLSTLPVFHPVTGEIIPPLHTDNYDSTNMPLMQTQQNLPHQTQIPQQQTTGKWYP

SEQ ID NO: 65179 - protein, 537 aa, Homo sapiens [sequence omitted]

SEQ ID NO: 65180 - protein, 167 aa, Homo sapiens
MPMLLPHPHQHFLKGLLRAPFRCYHFIFHSSTHLGSGIPCAQPFNSLGLHCTKWMLLSDGLKRKLCVQTTLKDHTEGLSDKEQRFVDKLYTGLIQGQRACLAEAITLVESTHSRKKELAQVLLQKVLLYHREQEQSNKGKPLAFRVGQSFLCVFSVNIFTNSLYSVF

SEQ ID NO: 65181 - protein, 245 aa, Homo sapiens
MTVVTMASARVQDLIGLICWQYTSEGREPKLNDNVSAYCLHIAEDDGEVDTDFPPLDSNEPIHKFGFSTLALVEKYSSPGLTSKESLFVRINAAHGFSLIQVDNTKVTMKEILLKAVKRRKGSQKVSGSRADGVFEEDSQIDIATVQDMLSSHHYKSFKVSMIHRLRFTTDVQLGISGDKVEIDPVTNQKASTKFWIKQKPISIDSDLLCACDLAEEKSPRFRSSLLAESKRGLSAVAVHRASAQ

SEQ ID NO: 65182 - protein, 250 aa, Homo sapiens; identical to SEQ ID NO: 59130

SEQ ID NO: 65183 - protein, 120 aa, Homo sapiens
MEQPKGVDWTVIILTCQYKDSVQVFQRELEVRQKREQIPAGTLLLAVEDPEKRVGSGGATLNALLVAAEHLSARAGFTVVTSDVLHSAWILILHMGRDFPFDDCGRAFTCLPVENPEAPV

SEQ ID NO: 65184 - protein, 37 aa, Homo sapiens
MALPPGPAALRHTLLLLPALLSSGPQKWPISQRLCHP

SEQ ID NO: 65185 - protein, 290 aa, Homo sapiens
YTVGVTTRTVNTESESLFLPLFQMMQCLKLGALSRTTASTQMNVQSSRSHAIFTIHVCQTRVCPQIDADNATDNKIISESAQMNEFETLTAKFHFVDLAGSERLKRTGATGERAKEGISINCGLLALGNVISALGDKSKRATHVPYRDSKLTRLLQDSLGGNSQTIMIACVSPSDRDFMETLNTLKYANRARNIKNKVMVNQDRASQQINALRSEITRLQMELMEYKTGKRIIDEEGVESINDMFHENAMLQTENNNLRVRIKAMQETVDALRSRITQLVSDQANHVLAR

SEQ ID NO: 65186 - protein, 126 aa, Homo sapiens
MQSPPHLAVCRSNKSPWVCLTCSSVHCGRYVNGHAKKHYEDAQVPLTNHKKSEKQDKVQHTVCMDCSSYSTYCYRCDDFVVNDTKLGLVQKVREHLQNLENSAFTADRHKKRKLLENSTLNSKLLK

SEQ ID NO: 65187 - protein, 249 aa, Homo sapiens
MDADEGQDMSQVSGDKGLSDTPYDSSASYEKENEMMKSHVMDQAINNAINYLGAESLRPLVQTPPGGSEVVPVISPMYQLHKPLAEGTPRSNHSAQDSAVENLLLLSKAKLVPSEREASPSNSCQDSTDTESNNEEQRSGLIYLTNHIAPHARNGLSLKEEHRAYDLLRAASENSQDALRVVSTSGEQMKVYKCEHCRVLFLDHVMYTIHMGCHGFRDPFECNMCGYHSQDRYEFSSHITRGEHRFHMS

SEQ ID NO: 65188 - protein, 1400 aa, Homo sapiens
MAALLRSARWLLRAGAAPRLPLSLRLLPGGPGRLHAASYLPAARAGPVAGGLLSPARLYAIAAKEKDIQEESTFSSRKISNQFDWALMRLDLSVRRTGRIPKKLLQKVFNDTCRSGGLGGSHALLLLRSCGSLLPELKLEERTEFAHRIWDTLQKLGAVYDVSHYNALLKVYLQNEYKFSPTDFLAKMEEANIQPNRVTYQRLIASYCNVGDIEGASKILGFMKTKDLPVTEAVFSALVTGHARAGDMENAENILTVMRDAGIEPGPDTYLALLNAYAEKGDIDHVKQTLEKVEKSELHLMDRDLLQIIFSFSKAGYPQYVSEILEKVTCERRYIPDAMNLILLLVTEKLEDVALQILLACPVSKEDGPSVFGSFFLQHCVTMNTPVEKLTDYCKKLKEVQMHSFPLQFTLHCALLANKTDLAKALMKAVKEEGFPIRPHYFWPLLVGRRKEKNVQGIIEILKGMQELGVHPDQETYTDYVIPCFDSVNSARAILQENGCLSDSDMFSQAGLRSEAANGNLDFVLSFLKSNTLPISLQSIRSSLLLGFRRSMNINLWSEITELLYKDGRYCQEPRGPTEAVGYFLYNLIDSMSDSEVQAKEEHLRQYFHQLEKMNVKIPENIYRGIRNLLESYHVPELIKDAHLLVESKNLDFQKTVQLTSSELESTLETLKAENQPIRDVLKQLILVLCSEENMQKALELKAKYESDMVTGGYAALINLCCRHDKVEDALNLKEEFDRLDSSAVLDTGKYVGLVRVLAKHGKLQDAINILKEMKEKDVLIKDTTALSFFHMLNGAALRGEIETVKQLHEAIVTLGLAEPSTNISFPLVTVHLEKGDLSTALEVAIDCYEKYKVLPRIHDVLCKLVEKGETDLIQKAMDFVSQEQGEMVMLYDLFFAFLQTGNYKEAKKIIETPGIRARSARLQWFCDRCVANNQVETLEKLVELTQKLFECDRDQMYYNLLKLYKINGDWQRADAVWNKIQEENVIPREKTLRLLAEILREGNQEVPFDVPENNFVLKLWYEDEKHSLNSSSASTTEPDFQKDILIACRLNQKKGAYDIFLNAKEQNIVFNAETYSNLIKLLMSEDYFTQAMEVKAFAETHIKGFTLNDAANSRLIITQVRRDYLKEAVTTLKTVLDQQQTPSRLAVTRVIQALAMKGDVENIEVVQKMLNGLEDSIGLSKMVFINNIALAQIKNNNIDAAIENIENMLTSENKVIEPQYFGLAYLFRKVIEEQLEPAVEKISIMAERLANQFAIYKPVTDFFLQLVDAGKVDDARALLQRCGAIAEQTPILLLFLLRNSRKQGKASTVKSVLELIPELNEKEEAYNSLMKSYVSEKDVTSAKALYEHLTAKNTKLDDLFLKRYASLLKYAGEPVPFIEPPESFEFYAQQLRKLRENSS

SEQ ID NO: 65189 - protein, 212 aa, Homo sapiens
QDLKIKLAVRMDKPQNMKHSGYLWAIGKNVWKRWKKRFFVLVQVSQYTFAMCSYREKKAEPQELLQLDGYTVDYTDPQPGLEGGRAFFNAVKEGDTVIFASDDEQDRILWVQAMYRATGQSHKPVPPTQVQKLNAKGGNVPQLDAPISQFSGLKDADRAQKHGMDEFISSNPCNFDHASLFEMVQRLTLDHRLNDSYSCLGWFSPGQVFVLD

SEQ ID NO: 65190 - protein, 409 aa, Homo sapiens
MAALTIATGTGNWFSALALGVTLLKCLLIPTYHSTDFEVHRNWLAITHSLPISQWYYEATSEWTLDYPPFFAWFEYILSHVAKYFDQEMLNVHNLNYSSSRTLLFQRFSVIFMDVLFVYAVRECCKCIDGKKVGKELTEKPKFILSVLLLWNFGLLIVDHIHFQYNGFLFGLMLLSIARLFQKRHMEGAFLFAVLLHFKHIYLYVAPAYGVYLLRSYCFTANKPDGSIRWKSFSFVRVISLGLVVFLVSALSLGPFLALNQLPQVFSRLFPFKRGLCHAYWAPNFWALYNALDKVLSVIGPRGFLRCLTLCALSSFMFGWHVHEKAILLAILPMSLLSVGKAGDASIFLILTTTGHYSLFPLLFTAPELPIKILLMLLFTIYSISSLKTLFRRSFTLVAQAGVQWHDLS

SEQ ID NO: 65191 - protein, 122 aa, Homo sapiens
MAQGLIEVERKFLPGPGTEERLQELGGTLEYRVTFRDTYYDTPELSLMQADHWLRRREDSGWELKCPGAAGVLGPHTEYKELTAEPTIVAQLCKVLRADGLGAGDVAAVLGPLGLQEVASFV

SEQ ID NO: 65192 - protein, 293 aa, Homo sapiens
MPQAEKEKLLAEISSDIDQLNPESADLRALAKHLYDSYIKSFPLTKAKARAILTGKTTDKSPFVIYDMNSLMMGEDKIKFKHITPLQEQSKEVAIRIFQGCQFRSVEAVQEITEYAKSIPGFVNLDLNDQVTLLKYGVHEIIYTMLASLMNKDGVLISEGQGFMTREFLKSLRKPFGDFMEPKFEFAVKFNALELDDSDLAIFIAVIILSGDRPGLLNVKPIEDIQDNLLQALELQLKLNHPESSQLFAKLLQKMTDLRQIVTEHVQLLQVIKKTETDMSLHPLLQEIYKDLY

SEQ ID NO: 65193 - protein, 472 aa, Homo sapiens
  MOD_RES (1)..(1): Any amino acid
XEKRYHVWWGIIESFLKERQGALAPWPIVGLGKFLLKVDSKMIIWLEKMLDKIISIFIIFLLVIGTLLLALLLTAKVHQESVHMIEVTSNLINETLANHPEWANWLPEAQVVQRALNSAANNVYQYGREWITHKLHKILGDKVNNTAVIEKQVLELWDRLYHSWFVKNVTHSGRHKGQKLHVSRQNSWLGDILDWQDIVSFVHENIETFLSILESLWIVMSRNVSLLFTTVTTLLTILFYSGTALLNFVLSLIIFLTTLFYLLSSSDEYYKPVKWVISLTPLSQPGPSSNIIGQSVEEAIRGVFDASLKMAGFYGLYTWLTHTMFGINIVFIPSALAAILGAVPFLGTYWAAVPAVLDLWLTQGLGCKAILLLIFHLLPTYFVDTAIYSDISGGGHPYLTGLAVAGGAYYLGLEGAIIGPILLCILVVASNIYSAMLVSPTNSVPTPNQTPWPAQPQRTFRDISEDLKSSVG

SEQ ID NO: 65194 - protein, 157 aa, Homo sapiens
MGTSEQRLAGMPGPGIRASTGQPEDDTETTGLEGGVAMPGAEDDVVTPGTSEDRYKSGLTTLVATSVNSVTGIRIEDLPTSESTVHAQEQSPSATASNVATSHSTEKVDGDTQTTVEKDGLSTVTLVGIIVGVLLAIGFIGAIIVVVMRKMSGRYSP

SEQ ID NO: 65195 - protein, 57 aa, Homo sapiens
MELILSTSPAELTLDPACQPKLPLDSTCQPEMTFNPGPTELTLDPEHQPEETPAPSL

SEQ ID NO: 65196 - protein, 127 aa, Homo sapiens
LLLSLTVFSIVSVTAYIALALLSVTISFRIYKGVIQAIQKSDEGHPFRAYLESEVAISEELVQKYSNSALGHVNCTIKELRRLFLVDDLVDSLKAQIDHYLGLANKNVKDAMAKIQAKIPGLKRKAE

SEQ ID NO: 65197 - protein, 81 aa, Homo sapiens
MDGSRRVRATSVLPRYGPPCLFKGHLSTKSNAFCTDSSSLRLSTLQLVKNHMAVHYNKILSAKAAVDCSVPVSVSTSIKCI

SEQ ID NO: 65198 - protein, 525 aa, Homo sapiens
MAAVDSDVESLPRGGFRCCLCHVTTANRPSLDAHLGGRKHRHLVELRAARKAQGLRSVFVSGFPRDVDSAQLSEYFLAFGPVASVVMDKDKGVFAIVEMGDVGAREAVLSQSQHSLGGHRLRVRPREQKEFQSPASKSPKGAAPDSHQLAKALAEAADVGAQMIKLVGLRELSEAERQLRSLVVALMQEVFTEFFPGCVVHPFGSSINSFDVHGCDLDLFLDLGDLEEPQPVPKAPESPSLDSALASPLDPQALACTPASPPDSQPPASPQDSEALDFETPSSSLAPQTPDSALASETLASPQSLPPASPLLEDREEGDLGKASELAETPKEEKAEGAAMLELVGSILRGCVPGVYRVQTVPSARRPVVKFCHRPSGLHGDVSLSNRLALHNSRFLSLCSELDGRVRPLVYTLRCWAQGRGLSGSGPLLSNYALTLLVIYFLQTRDPPVLPTVSQLTQKAGEGEQVEVDGWDCSFPRDASRLEPSINVEPLIRTARGECGGSTARGTWHPRRVPEWQSGGWLQQY

SEQ ID NO: 65199 - protein, 176 aa, Homo sapiens
  MOD_RES (1)..(1): Any amino acid
XEQAHSTGTVPGHIPSTVQAQSQPHGVYPPSSVAQGQSQGQPSSSSLTGVSSSQPIQHPQQQQGIQQTAPPQQTVQYSLSQTSTSSEATTAQPVSQPQAPQVLPQVSAGKQGFPPRLPPQYPGDSNIAPSSNVASVCIHSTVLSPPMPTEVLATPGYFPTVVQPYVESNLLVPMGG

SEQ ID NO: 65200 - protein, 78 aa, Homo sapiens
MHEQIENEYIIGLLQQRSQTIYNVHSDNKLSEMLSLFEKGLKNVKNEYEQLNYAKQLKERLEAFTRDFLPHMKEEEEV

SEQ ID NO: 65201 - protein, 223 aa, Homo sapiens
VETSSLKCFAETPNKKNKITMIAEPLEKGLAEDIENEVVQITWNRKKLGEFFQTKYDWDLLAARSIWAFGPDATGPNILVDDTLPSEVDKALLGSVKDSIVQGFQWGTREGPLCDELIRNVKFKILDAVVAQEPLHRGGGQIIPTARRVVYSAFLMIVPGDPLDKSIVIRPLEPQPAPHLAREFMIKTRRRKGLSEDVSISKFFDDPMLLELAKQDVVLNYPM

SEQ ID NO: 65202 - protein, 401 aa, Homo sapiens
EKEKAEREVIVREFQEELVDHLKKFSMSESPLEGTSHCHINLDETWTSKKKLFQVEIQPEEKHEEFRKVFELISLLNYTADQIRKKNRELEEEATGYKKCLEMTINMLNAFANEDFSCHGDLNTDQLKMDILFKKLKQKFDDLMAEKEAVSSKCVNLAKDNEVLHQELLSMGKVQEKCEKLEKDKKMLEEKVLNLKTHMEKDMVELGKVQEYKSELDERAMQAIEKLEEIHLQKQAEYEKQLEQLNKDNTASLKKKELTLKDVECKFSKMKTAYEDVTTELEEYKEAFAVALKANSSMSEKITKSDKKIAVISTKLFMEKERMEYFLSTLPMRPDPELPCVENLNSIELNRKYIPKMAIRIPTSNPQTSNNCKNSLTEMELDCAEQIITETKKSMLPKCIN

SEQ ID NO: 65203 - protein, 375 aa, Homo sapiens
MEMQQNCSISCFWETQPLGCVKISCIFYHSKPRNINGLFLPPSSNITLQKEIQEGIPLQSQSQEPLKPQENISRPIHHPLVLKTNFEEEEEVDEQNDASSLWTKTPEEIEEKRAIKEMCYKSGEYYRFHTPPDILSSKSMTPTAEKQLEKPLENGSELQEGDSLTVPTKLSQYERQGEIKTSLHGKPKTDIAAFENGGGDCYVPQRVIFLGVDESEALTEEKEITISKCSNTKVNDVQPVKKPHFKGVKKRKWIYDEPQNFPNSGMQRAVQAPRPQNKMSYHRNNKNRNAENASYIHVQRDAVRTVALNAPSRSRPTHGSYNKVHANREPKPNLSPDKYTSTSYNDSAWRKRIPFSKTYSKSEKIYPEPRRNGSK

SEQ ID NO: 65204 - protein, 99 aa, Homo sapiens
  MOD_RES (1)..(1): Any amino acid
XGYGGGGPGYSGGSRGYGSGGQGYGNQGSGYGGSGSYDSYNNGGGGGFGGGSGGGSYNDFGNYNNQSSNFGPMKGGNFGGRSSGPYGGGGQYFAKPRNQ

SEQ ID NO: 65205 - protein, 562 aa, Homo sapiens
MHETHRLLQAGCPLWMKDVSWNEPEQWRWISRAAAAAAATSVPPETLGRDPVVSAGAVLRPCTAHGRTGVASRNSQSWQKGKQTHPSSHGGSKEKCRERRKSLIKPSDLMRTHSLSQEQHGGFDDLQVCADPGIPENGFRTPSGGVFFEGSVARFHCQDGFKLKGATKRLCLKHFNGTLGWIPSDNSICVQEDCRIPQIEDAEIHNKTYRHGEKLIITCHEGFKIRYPDLHNMVSLCRDDGTWNNLPICQGCLRPLASSNGYVNISELQTSFPVGTVISYRCFPGFKLDGSAYLECLQNLIWSSSPPRCLALEVCPLPPMVSHGDFVCHPRPCERYNHGTVVEFYCDPGYSLTSDYKYITCQYGEWFPSYQVYCIKSEQTWPSTHETLLTTWKIVAFTATSVLLVLLLVILARMFQTKFKAHFPPRGPPRSSSSDPDFVVVDGVPVMLPSYDEAVSGGLSALGPGYMASVGQGCPLPVDDQSPPAYPGSGDTDTGPGESETCDSVSGSSELLQSLYSPPRCQESTHPASDNPDIIASTAEEVASTSPGIDIADEIPLMEEDP

SEQ ID NO: 65206 - protein, 96 aa, Homo sapiens
  MOD_RES (1)..(1): Any amino acid
XVLKEAVANKGPVSVGVDARHPSFFLYRSGVYYEPSCTQNVNHGVLVVGYGDLNGKEYWLVKNSWGHNFGEEGYIRMARNKGNHCGIASFPSYPEI

SEQ ID NO: 65207 - protein, 84 aa, Homo sapiens
  MOD_RES (1)..(1): Any amino acid
XYDTWCGVAHGCTRKLGLKICGFLQRTNSLEEKSRLVSAFKERQSSKNLLSCENSDRDARFRRTETDFSNLFARGSPCPTPAPC

SEQ ID NO: 65208 - protein, 277 aa, Homo sapiens [sequence omitted]

SEQ ID NO: 65209 - protein, 275 aa, Homo sapiens
MAAGVEAAAEVAATEIKMEEESGAPGVPSGNGAPGPKGEGERPAQNEKRKEKNIKRGGNRFEPYANPTKRYRAFITNIPFDVKWQSLKDLVKEKVGEVTYVELLMDAEGKSRGCAVVEFKMEESMKKAAEVLNKHSLSGRPLKVKEDPDGEHARRAMQKLDYKVGWKKLKEVFSMAGVVVRADILEDKDGKSRGIGTVTFEQSIEAVQAISMFNGQLLFDRPMHVKMDERALPKGDFFPPERPQQLPHGLGGIGMGLGPGGQPIDANHLNKGIGM

SEQ ID NO: 65210 - protein, 372 aa, Homo sapiens
MRVMAPRALLLLLSGGLALTETWACSHSMRYFDTAVSRPGRGEPRFISVGYVDDTQFVRFDSDAASPRGEPRAPWVEQEGPEYWDRETQKYKRQAQADRVSLRNLRGYYNQSEDGSHTLQRMSGCDLGPDGRLLRGYDQSAYDGKDYIALNEDLRSWTAADTAAQITQRKLEAARAAEQLRAYLEGTCVEWLRRYLENGKETLQRAEPPKTHVTHHPLSDHEATLRCWALGFYPAEITLTWQRDGEDQTQDTELVETRPAGDGTFQKWAAVVVPSGQEQRYTCHMQHEGLQEPLTLSWEPSSQPTIPIMGIVAGLAVLVVLAVLGAVVTAMMCRRKSSGHFLPTGGKGGSCSQAACSNSAQGSDESLITCKA

SEQ ID NO: 65211 - protein, 82 aa, Homo sapiens
  MOD_RES (1)..(1): Any amino acid
XRVEGSGDPEEGKMDDEDPLVPGRDRGQELRVVLKVLDPSHHDIALAFYETASLMSQVSHTHLAFVHGVCVRGPESSSKLLV

SEQ ID NO: 65212 - protein, 488 aa, Homo sapiens
LDCGPRLPVEVGPSLSSPSSGCGEGSISVGENVSDVAPTQPWWPNTPGDSVSEELGPGRSGDTEDLSPNWPLNSQEDTAAQSSPGRGEEAEASAAEAQGGEQAYLAGLAGQYHLERYPDSYESMSEPPIAHLLRPVLPRAFAFPVDPQVQSAADETAVQLSELLTLPVLMKRSITAPLAAHISLVNKAAVDYFFVELHLEAHYEALRHFLLMEDGEFAQSLSDLLFEKLGAGQTPGELLNPLVLNSVLSKALQCSLHGDTPHASNLSLALKYLPEVFAPNAPDVLSCLELRYKVDWPLNIVITEGCVSKYSGVFSFLLQLKLMMWALKDVCFHLKRTVPSAAAVQARDAAFREGHPGLHRQPDPARHLVRVQGQVGHRGRPGGDPACARRVPAQGRLQAAPVMNVIHSIFSLVLKFRSQLISQAWGPPGGPRGAEHPNFALMQQSYNTFKYYSHFLFKVVTKLVNRGYQPHLEDFLLRINFNNYYQDA

SEQ ID NO: 65213 - protein, 497 aa, Homo sapiens
MPREIITLQLGQCGNQIGFEFWKQLCAEHGISPEGIVEEFATEGTDRKDVFFYQADDEHYIPRAVLLDLEPRVIHSILNSPYAKLYNPENIYLSEHGGGAGNNWASGFSQGEKIHEDIFDIIDREADGSDSLEGFVLCHSIAGGTGSGLGSYLLERLNDRYPKKLVQTYSVFPNQDEMSDVVVQPYNSLLTLKRLTQNADCVVVLDNTALNRIATDRLHIQNPSFSQINQLVSTIMSASTTTLRYPGYMNNDLIGLIASLIPTPRLHFLMTGYTPLTTDQSVRAAFSVPGQAGPGPNRPCPSLSLFPTAPGATLCGPQGAALRDWHRVASVRKTTVLDVMRRLLQPKNVMVSTGRDRQTNHCYIAILNIIQGEVDPTQVHKSLQRIRERKLANFIPWGPASIQVALSRKSPYLPSAHRVSGLMMANHTSISSLFERTCRQYDKLRKREAFLEQFRKEDMFKDNFDEMDTSREIVQQLIDEYHAATRPDYISWGTQEQ

SEQ ID NO: 65214 - protein, 160 aa, Homo sapiens
MVAHDETGGLLPIKRTIRVLDVNNQSFREQEELTHIFGDLDSYIPLHEDLLTRIGEATKPDGTVEQIGHILVSWLPRLNAYRGYCSNQLAAKALLDQKKQDPRVQDFLQRCLESPFSRKLDLWSFLDIPRSRLVKYPLLLKEILKHTPKEHPDVQLLEDA

SEQ ID NO: 65215 - protein, 129 aa, Homo sapiens
KQLQQAVTGISNAAQATASDDASQHQGGGGGELAYALNNFDKQIIVDPLSFSEERFRPSLEERLESIISGAALMADSSCTRDDRRERIVAECNAVRQALQDLLSEYMGNQHVSIPSAVEMLIPPCIAHC

SEQ ID NO: 65216 - protein, 371 aa, Homo sapiens
MVNENTRMYIPEENHQGSNYGSPRPAHANMNANAAAGLAPEHIPTPGAALSWQAAIDAARQAKLMGSAGNATISTVSSTQRKRQQYGKPKKQGSTTATRPPRALLCLTLKNPIRRACISIVEWKPFEIIILLTIFANCVALAIYIPFPEDDSNATNSNLERVEYLFLIIFTVEAFLKVIAYGLLFHPNAYLRNGWNLLDFIIVVVGLFSAILEQATKADGANALGGKGAGFDVKALRAFRVLRPLRLVSGVPSLQVVLNSIIKAMVPLLHIALLVLFVIIIYAIIGLELFMGKMHKTCYNQEGIADVPAEDDPSPCALETGHGRQCQNGTVCKPGWDGPKHGITNFDNFAFAMLTVFQCITMEGWTDVLYW

SEQ ID NO: 65217 - protein, 497 aa, Homo sapiens
MKLEGIDPQHPSMYFILTVAEVCGYRLRLHFDGYSECHDFWVNANSPDIHPAGWFEKTGHKLQPPKGYKEEEFSWSQYLRSTRAQAAPKHLFVSQSHSPPPLGFQVGMKLEAVDRMNPSLVCVASVTDVVDSRFLVHFDNWDDTYDYWCDPSSPYIHPVGWCQKQGKPLTPPQDYPDPDNFCWEKYLEETGASAVPTWAFKVRPPHSFLVNMKLEAVDRRNPALIRVASVEDVEDHRIKIHFDGWSHGYDFWIDADHPDIHPAGWCSKTGHPLQPPLGPREPSSASPGGCPPLSYRSLPHTRTSKYSFHHRKCPTPGCDGSGHVTGKFTAHHCLSGCPLAERNQSRLKAELSDSEASARKKNLSGFSPRKKPRHHGRIGRPPKYRKIPQEDFQTLTPDVVHQSLFMSALSAHPDRSLSVCWEQHCKLLPGVAGISASTVAKWTIDEVFGFVQTLTGCEDQARLFKDEVRCKCRVGDRAGVTVLKTAGSRCPPQRHFC

SEQ ID NO: 65218 - protein, 192 aa, Homo sapiens
MAATRCLRWGLSRAGVWLLPPPARCPRRALHKQKDGTEFKSIYSLDKLYPESQGSDTAWRVPNGAKQADSDIPLDRLTISYCRSSGPGGQNVNKVNSKAEVRFHLATAEWIAEPVRQKIAITFFICSLQHKNKINRLGELILTSESSRYQFRNLADCLQKIRDMITEASQTPKEPTKEDVKLHRIRIENMNR

SEQ ID NO: 65219 - protein, 98 aa, Homo sapiens
MRLSALLALASKVTLPPHYRYGMSPPGSVADKRKNPPWIRRRPVVVEPISDEDWYLFCGDTVEILEGKDAGKQGKVVQVIRQRNWVVVGGLNTHYRYI

SEQ ID NO: 65220 - protein, 159 aa, Homo sapiens
AMAKQLQARRLDGIDYNPWVEFVKLASEHDVVNLGQGFPDFPPPDFAVEAFQHAVSGDFMLNQYTKTFVSLCYPGWSAMVRSWSTAALTLPVSSGPPTSASGVTGTTGWSQSWLESSFFDPKKKKIIWGYPPLTKILASFFGELLGQEIDPLRNVLVTV

SEQ ID NO: 65221 - protein, 56 aa, Homo sapiens
MAIDSGFRNSGITVGKRGKTMLAVRSTHGLEVPLSHKGKLMVTEEYIDFLLNVANQ

SEQ ID NO: 65222 - protein, 84 aa, Homo sapiens
  MOD_RES (1)..(1): Any amino acid
XRACANGIHMNRGCPSAAVGYPGMKPQQHCPGELQQQSDTSSLLRQTHLGNGYDPQSHQITSCCSPITTAANARSSLLLWASQG

SEQ ID NO: 65223 - protein, 46 aa, Homo sapiens
LDQVIRQRSLSSLELFLSCAQKQDTEGLLVRWQKRDMATRISLSRP

SEQ ID NO: 65224 - protein, 29 aa, Homo sapiens
MRLFLSLPVLVVVLSIVLEGSGFQRHFRK

SEQ ID NO: 65225 - protein, 68 aa, Homo sapiens
MAVTAQAARRKERVLCLFDVDGTLTPARQSWSREGFFSNSFMSSTHPDVRGSRPSLFAVRTLRNSEEN

SEQ ID NO: 65226 - protein, 700 aa, Homo sapiens
  MOD_RES (1)..(1): Any amino acid
XGIMFTKESKPSKNRSLVPETSRHTGDTSNGCADVKGLSNHVHQLIADAVSSPNHGDSPNLLIADNPQLSALLIGKANGNVGTGTCDKVNNIHPAVHTKTDHSVASSPSSAISTATPSPKSTEQRSINSVTSLNSPHSGLHTVNGEGLGKSQSSTKVDLPLASHRSTSQILPSMSVSICPSSTEVLKACRNPGKNGLSNSCILLDKCPPPRPPTSPYPPLPKDKLNPPTPSIYLENKRDAFFPPLHQFCTNPKNPVTVIRGLAGALKLDLGLFSTKTLVEANNEHMVEVRTQLLQPADENWDPTGTKKIWRCESNRSHTTIAKYAQYQASSFQESLREENEKRTQHKDHSDNESTSSENSGRRRKGPFKTIKFGTNIDLSDNKKWKLQLHELTKLPAFARVVSAGNLLTHVGHTILGMNTVQLYMKVPGSRTPGHQENNNFCSVNINIGPGDCEWFVVPEDYWGVLNDFCEKNNLNFLMSSWWPNLEDLYEANVPVYRFIQRPGDLVWINAGTVHWVQAVGWCNNIAWNVGPLTACQYKLAVERYEWNKLKSVKSPVPMVHLSWNMARNIKVSDPKLFEMIKYCLLKILKQYQTLREALVAAGKEVIWHGRTNDEPAHYCSICEASPWPPMDQSAFTSSLLRPIKALGSGRAEQTSGDQLQKGATHSRASSLLRAAEMTRRPASREELPDPGLFCHSIKL

SEQ ID NO: 65227 - protein, 218 aa, Homo sapiens
MASRERLFELWMLYCTKKDPDYLKLWLDTFVSSYEQFLDVDFEKLPTRVDDMPPGISLLPDNILQVLRIQLLQCVQKMADGLEEQQQALSILLVKFFIILCRNLSNVEEIGTCSYINYVITMTTLYIQQLKSKKKEKEMADQTCIEEFVIHALAFCESLYDPYRNWRHRISGRILSTVEKSRQKYKPASLTVEFVPFFYLLSFPCEMKEDRNNPLIAC

SEQ ID NO: 65228 - protein, 203 aa, Homo sapiens
MATPYVPVPMPIGNSASSFTTNRNQRSSSFGSVSTSSNSSKGQLEDSNMGNFKQTSVPDQMDNTSSVCSSPLIRTKFTGTASSIEYSTRPRDTEEQNPETVNWEDRPSTPTILGYEVMEERAKFTVYKILVKKTPEESWVVFRRYTDFSRLNDKLKEMFPGFRLALPPKRWFKDNYNADFLEDRQLGLQAFLQNLVAHKDIAN

SEQ ID NO: 65229 - protein, 52 aa, Homo sapiens
MRVEHARMHAKHRGHEAMHAEMVLILIATLVVAQLLLVQWKQRHPRSYNVGL

SEQ ID NO: 65230 - protein, 48 aa, Homo sapiens
MLRVLCLLRPWRPLRARGCASDGAAGGSEIQVRALAGPDQDKAEDPGR

SEQ ID NO: 65231 - protein, 118 aa, Homo sapiens
MPSLLLLFTAALLSSWAQLLTDANSWWSLALNPVQRPEMFIIGAQPVCSQLPGLSPGQRKLCQLYQEHMAYIGEGAKTGIKECQHQFRQRRWNCSTADNASVFGRVMQIGSRETAFTH

SEQ ID NO: 65232 - protein, 160 aa, Homo sapiens
MAAFSEMGVMPEIAQAVEEMDWLLPTDIQAESIPLILGGGDVLMAAETGSGKTGAFSIPVIQIVYETLKDQQEGKKGKTTIKTGASVLNKWQMNPYDRGSAFAIGSDGLCCQSREVKEWHGCRATKGLMKGKHYYEVSCHDQGLCRVGWSTMQASLDLEK

SEQ ID NO: 65233 - protein, 134 aa, Homo sapiens
  MOD_RES (1)..(1): Any amino acid
XKHLTPVTLELGGKSPCYIDKDCDLDIVCSCSGCFPLRRITWGKYMNCGQTCIAPDYILCEASLQNQIVWKIKETVKEFYGENIKESPDYERIINLRHFKRILSLLEGQKIAFGGETDEATRYIAPTVLTDVDP

SEQ ID NO: 65234 - protein, 497 aa, Homo sapiens
  MOD_RES (1)..(1): Any amino acid
XLLGSPATSSSQSVAPRPGAGLKVLFTKETAGYLRGRPQDTVRIFPPWQKLIIPSGSCPVILNTYFCEKVVAKEDSEKTCEVYCPDIPLPRRSISLAQMFVIKGLTNNSPEIQVVCSGVATTGTAWTHGHKEAKQRIPTSTPLRDSLLDVVESQGAASWPGAGVRVVVQRVYSLPSRDSTRGQQGASSGHTDPAGTRACLLVQDACGMFGEVHLEFTMSKARQLEGKSCSLVGMKVLQKVTRGRTAGIFSLIDTLWPPAIPLKTPGRDQPCEEIKTHLPPPALCYILTAHPNLGQIDIIDEDPIYKLYQPPVTRCLRDILQMNDLGTRCSFYATVIYQKPQLKSLLLLEQREIWLLVTDVTLQTKEERDPRLPKTLLVYVAPLCVLGSEVLEALAGAAPHSLFFKDALRDQGRIVCAERTVLLLQKPLLSVVSGASSCELPGPVMLDSLDSATPVNSICSVQGTVVGVDESTAFSWPVCDMCGNGRLEQRPEDRATK

SEQ ID NO: 65235 - protein, 63 aa, Homo sapiens
MRREPRYQGQVGPDIHTDSERAGQADFVQPSATASRQHQDGSQSCPVRRGCPPGEVRASAGAA

SEQ ID NO: 65236 - protein, 251 aa, Homo sapiens
  MOD_RES (1)..(1): Any amino acid
XSFSSQKVRLVIAEKGLVCEERDVSLPQSEHKEPWFMRLNLGEEVPVIIHRDNIISDYDQIIDYVERTFTGEHVVALMPEVGSLQHARVLQYRELLDALPMDAYTHGCILHPELTTDSMIPKYATAEIRRHLANATTDLMKLDHEEEPQLSEPYLSKQKKLMAKILEHDDVSYLKKILGELAMVLDQIEAELEKRKLENEGGCQPWGRWGLQPTQPTLPLPSLSLFFPQKSQRTSQVVKRMGYGVRLRFKS

SEQ ID NO: 65237 - protein, 106 aa, Homo sapiens
MSQSRHRAEAPPLEREDSGTFSLGKMITAKPGKTPIQVLHEYGMKTKNIPVYECERSDVQIHVPTFTFRVTVGDITCTGEGTSKKLAKHRAAEAAINILKANLCSS

SEQ ID NO: 65238 - protein, 104 aa, Homo sapiens
MTCSQCNTNFCYRCGERYRQLRFFGDHTSNLSIFGCKYRYLPERPHLRRLVRGSVCAGKLFIAPLIMVLGLALGAIAVVIGLFVFPIYCLCKKQRKRSRTGMHW

SEQ ID NO: 65239 - protein, 77 aa, Homo sapiens
MEEMSGESVVSSAVPAAATRTTSFKGTSPSSKYVKLNVGGALYYTTMQTLTKQDTMLKAMFSGRMEVLTDSEEQRYL

SEQ ID NO: 65240 - protein, 228 aa, Homo sapiens
MKDIFFQFIIARVRKCYSLSCLHTLPVVPTLRKTERGSYSSYGRESNLQGCHQQSLLGGDMDMGNPGTLSPTKPGSQYYQYSSNNPRRRPLHSSAMEVQTKKVRKVPPGLPSSVYAPSASTADYNRDSPGYPSSKPATSTFPSSFFMQDGHHSSDPWSSSSGMNQPGYAGMLGNSSHIPQSSSYCSLHPHERLSYPSHSSADINSSLPPMSTFHRSGTNHYSTSSCTP

SEQ ID NO: 65241 - protein, 113 aa, Homo sapiens
  MOD_RES (1)..(1): Any amino acid
XPALSYTQPQGIPDTESPVPVINLKDGTRLAGDDAPKRKDLEKWLKEHPGYVEDLGAFIPRMQLHEGRPKQKRHRCRNPNKLDVNSLTGEERVQLINRRNARKIRKLRLKEIY

SEQ ID NO: 65242 - protein, 1300 aa, Homo sapiens
MYKEDPVQGKSNGELSLSRESEGQKNVSSIPGKTGKRRGRPPKRKKLQEEILLSEKQEENSLASEPQTRHGSQGPGQGTWWLLCQTEEEWRQVTESFRERTSLRERQLYKLLSEDFLPEICNMIAQKGKRPQRTKAELHPRWMSDHLSIKPVKQEETPVLTRIEKQKRKEEEEERQILLAVQKKEQEQMLKEERKRELEEKVKAVEDRAKRRKLREERAWLLAQGKELPPELSHLDPNSPMREEKKTKDLFELDDDFTAMYKVLDVVKAHKDSWPFLEPVDESYAPNYYQIIKAPMDISSMEKKLNGGLYCTKEEFVNDMKTMFRNCRKYNGESSEYTKMSDNLERCFHRAMMKHFPGEDGDTDEEFWIREDEKREKRRSRAGRSGGSHVWTRSRDPEGSSRKQQPMENGGKSLPPTRRAPSSGDDQSSSSTQPPREVGTSNGRGFSHPLHCGGTPSQAPFLNQMRPAVPGTFGPLRGSDPATLYGSSGVPEPHPGEPVQQRQPFTMQPPVGINSLRGPRLGTPEEKQMCGGLTHLSNMGPHPGSLQLGQISGPSQDGSMYAPAQFQPGFIPPRHGGAPARPPDFPESSEIPPSHMYRSYKYLNRVHSAVWNGNHGATNQGPLGPDEKPHLGPGPSHQPRTLGHVMDSRVMRPPVPPNQWTEQSGFLPHGVPSSGYMRPPCKSAGHRLQPPPVPAPSSLFGAPAQALRGVQGGDSMMDSPEMIAMQQLSSRVCPPGVPYHPHQPAHPRLPGPFPQVAHPMSVTVSAPKPALGNPGRAPENSEAQEPENDQEPLPGLEEKPPGVGTSEGVYLTQLPHPTPPLQTDCTRQSSPQERETVGPELKSSSSESADNCKAMKGKNPWPSDSSYPGPAAQGCVRDLSTVADRGALSENGVIGEASPCGSEGKGLGSSGSEKLLCPRGRTLQETMPCTGQNAATPPSTDPGLTGGTVSQFPPLYMPGLEYPNSAAHYHISPGLQGVGPVMGGKSPASHPQHFPPRGFQSNHPHSGGFPRYRPPQGMRYSYHPPPQPSYHHYQRTPYYACPQSFSDWQRPLHPQGSPSGPPASQPPPPRSLFSDKNAMASLQGCETLNAALTSPTRMDAVAAKVPNDGQNPGPEEEKLDESMERPESPKEFLDLDNHNAATKRQSSLSASEYLYGTPPPLSSGMGFGSSAFPPHSVMLQTGPPYTPQRPASHFQPRAYSSPVAALPPHHPGATQPNGLSQEGPIYRCQEEGLGHFQAVMMEQIGTRSGIRGPFQEMYRPSGMQMHPVQSQASFPKTPTAATSQEEVPPHKPPTLPLDQS

SEQ ID NO: 65243 - protein, 102 aa, Homo sapiens
MASRLLLNNGAKMPILGLGTWKSPPGQVTEAVKVAIDVGYRHIDCAHVYQNENEVGVAIQEKLREQVVKREELFIVSKPGSCLVAGNDDMCPLAGLAVVHVP

SEQ ID NO: 65244 - protein, 90 aa, Homo sapiens
MGCTVSLVCCEELRPGPLCGPQPPGSPWVSARAECWESGGLACAERRQLPLQPEDLEAPKTHRFKVKTFKKVKPCGICRQVITQEGCTCK

SEQ ID NO: 65245 - protein, 154 aa, Homo sapiens
  MOD_RES (1)..(1): Any amino acid
XDFFTVPPVFVSVYLNRSWLGLRFLRALRLIQFSEILQFLNILKTSNSIKLVNLLSIFISTWLTAAGFIHLVENSGDPWENFQNNQALTYWECVYLLMVTMSTVGYGDVYAKTTLGRLFMVFFILGGLAHCGLRTHHSGECFQLPEGLSAQGPG

SEQ ID NO: 65246 - protein, 82 aa, Homo sapiens
  MOD_RES (1)..(1): Any amino acid
XANEGNCGGSAPSTPGRPERAARPSAGQLNYVDPATGYVVLTQIAHLQRGECCGSACRHCPYGQVNVKDPSKKKQFNSYFYV

SEQ ID NO: 65247 - protein, 113 aa, Homo sapiens
MLPGSRMTPQGPSMGPPGYGGNPSVRPGLAQSGMDQSRKRPAPQQIQQVQQQAVQNRNHNAKKKKMADKILPQRIRELVPESQAYMDLLAFERKLDQTIMRKRLDIQEALKRP

SEQ ID NO: 65248 - protein, 128 aa, Homo sapiens
MIFTQSSEKTAVSCLSQNDWKLDVATDNFFQNPELYIRESVKGSLDRKKLEQLYNRYKDPQDENKIGIDGIQQFCDDLALDPASISVLIIAWKFRAATQCEFSKQEFMDGMTELGCDSIEKLKAQIPK

SEQ ID NO: 65249 - protein, 218 aa, Homo sapiens
EYQVVIGNDTTHYIIDDLEPASNYTFYIVAYMPMGASQMSDHVTQNTLEDVPLRPPEISLTSRSPTDILISWLPIPAKYRRGQVVLYRLSFRLSTENSIQVLELPGTTHEYLLEGLKPDSVYLVRITAATRVGLGESSVWTSHRTPKATSVKAPKSPELHLEPLNCTTISVRWQQDVEDTAAIQGYKLYYKEEGQQENGPIFLDTKDLLYTLSGLARI

SEQ ID NO: 65250 - protein, 110 aa, Homo sapiens
  MOD_RES (1)..(1): Any amino acid
XKITAKELETKQSYKEKRGGFVLVHAGAGYHSESKAKEYKHVCKRACQKAIEKLQAGALATDAVTAALVELELMWKGQFQVLCVLTNLFLDIIKNPTKTKFKTISNVKVY

SEQ ID NO: 65251 - protein, 51 aa, Homo sapiens
MAHQTGIHATEELKEFFAKARAGSVRLIKVVIEDARAGCLAGASRPLGSGL

SEQ ID NO: 65252 - protein, 185 aa, Homo sapiens
MAASAKKKNKKGKTISLTDFLAEDGGTGGGSTYVSKPVSWADETDDLEGDVSTTWHSNDDDVYRAPPIDRSILPTAPRAAREPNIDRSRLPKSPPYTAFLGNLPYDVTEESIKEFFRGLNISAVRLPREPSNPERLKGFGYAEFEDLDSLLSALSLNEESLGNRRIRVDVADQAQDKGTPGPYRI

SEQ ID NO: 65253 - protein, 232 aa, Homo sapiens
MSAMESFIEKQTKLLEMQPTKAPEKDPEQPPKGRVDSCVSDAAVPAQDPSNSDPGTETELADTALDLLLLLLTEQWKWLCTENMQKFLRLIFGTLVQRWLEVQVANLTSPQRWVQYLLLLQESIWPGGVLPKFPRPVRTQEQKLAAEKQALQSLMGVLPDLVVEILGVNKCRLSWGLVLESLQQPLINRHLIYCLGDIILEFLDLSASVEESAATTSASDTPGNSKRMGVSS

SEQ ID NO: 65254 - protein, 930 aa, Homo sapiens
MSERTFARNLQNRGGRDPYVKLSLYVADENRELALVQTKTIKKTLNPKWNEEFYFRVNPSNHRLLFEVFDENRLTRDDFLGQVDVPLSHLPTEDPTMERPYTFKDFLLRPRSHKSRVKGFLRLKMAYMPKNGGQDEENSDQRDDMEHGWEVVDSNDSASQHQEELPPPPLPPGWEEKVDNLGRTYYVNHNNRTTQWHRPSLMDVSSESDNNIRQINQEAAHRRFRSRRHISEDLEPEPSEGGDVPEPWETISEEVNIAGDSLGLALPPPPASPGSRTSPQELSEELSRRLQITPDSNGEQFSSLIQREPSSRLRSCSVTDAVAEQGHLPPPSVAYVHTTPGLPSGWEERKDAKGRTYYVNHNNRTTTWTRPIMQLAEDGASGSATNSNNHLIEPQIRRPRSLSSPTVTLSAPLEGAKDSPVRRAVKDTLSNPQSPQPSPYNSPKPQHKVTQSFLPPGWEMRIAPNGRPFFIDHNTKTTTWEDPRLKFPVHMRSKTSLNPNDLGPLPPGWEERIHLDGRTFYIDHNSKITQWEDPRLQNPAITGPAVPYSREFKQKYDYFRKKLKKPADIPNRFEMKLHRNNIFEESYRRIMSVKRPDVLKARLWIEFESEKGLDYGGVAREWFFLLSKEMFNPYYGLFEYSATDNYTLQINPNSGLCNEDHLSYFTFIGRVAGLAVFHGKLLDGFFIRPFYKMMLGKQITLNDMESVDSEYYNSLKWILENDPTELDLMFCIDEENFGQTYQVDLKPNGSEIMVTNENKREYIDLVIQWRFVNRVQKQMNAFLEGFTELLPIDLIKIFDENELELLMCGLGDVDVNDWRQHSIYKNGYCPNHPVIQWFWKAVLLMDAEKRIRLLQFVTGTSRVPMNGFAELYGSNGPQLFTIEQWGSPEKLPRAHTCFNRLDLPPYETFEDLREKLLMAVENAQGFEGVD

SEQ ID NO: 65255 - protein, 95 aa, Homo sapiens
MFPALETHLKQTIPDPYEDFMYRHLQYYGYFKAQRGSLPNSATHQHVRKNNPQCLLNGSLGEKDDLIPDTLQKEKLLWPISLSSAVHRQIEAINR

SEQ ID NO: 65256 - protein, 238 aa, Homo sapiens
IVLSGDSGKATEGPFAMDPDSGFLLVTRALDREEQAEYQLQVTLEMQDGHVLWGPQPVLVHVKDENDQVPHFSQAIYRARLSRGTRPGIPFLFLEASDRDEPGTANSDLRFHILSQAPAQPSPDMFQLEPRLGALALSPKGSTSLDHALERTYQLLVQVKDMGDQASGHQATATVEVSIIESTWVSLEPIHLAENLKVLYPHHMAQYLLQVRAQNSHGEDYAAPLELHVLVMDENDNV

SEQ ID NO: 65257 - protein, 169 aa, Homo sapiens
MAYNDTDRNQTEKLLKRVRELEQEVQRLKKEQAKNKEDSNIRENSAGAGKTKRAFDFSAHGRRHVALRIAYMGWGYQGFASQENTNNTIEEKLFEALTKTRLVESRQTSNYHRCGRTDKGVSAFGQVISLDLRSQFPRGRDSEDFNVKEEANAAAEEIRYTHILNRVLP

SEQ ID NO: 65258 - protein, 368 aa, Homo sapiens
MLTDSGGGGTSFEEDLDSVAPRSAPAGASEPPPPGGVGLGIRTVRLFGEAGPASGVGSSGGGGSGSGTGGGDAALDFKLAAAVLRTGGGGGASGSDEDEVSEVESFILDQEDLDNPVLKTTSEIFLSSTAEGADLRTVDPETQARLEALLEAADPEVLRRLTSSVSCALDEAAAALTRMKAENSHNAGQVDTRSLAEACSDGDVNAVRKLLDEGRSVNEHTEEGESLLCLACSAGYYELAQVLLAMHANVEDRGNKGDITPLMAASSGGYLDIVKLLLLHDADVNSQSATGNTALTYACAGGFVDIVKVLLNEGANIEDHNENGHTPLMEAASAGHVEVARVLLDHGAGINTHSNEFKESALTLACYK

SEQ ID NO: 65259 - protein, 231 aa, Homo sapiens
IILLLVPSEETDENDLILEVTAGVGGGLRHASASIGGSEAYRHMKFEGGVHRVQRVPKTEKQGRVHTSTMTVAILPQPTEINLVINPKDLRIDTKRASGAGGQHVNTTDSAVRIVHLPTGVVSECQQERSQLKNKELAMTKLRAKLYSMHLEEEINKRQNARKIQIGSKGRSEKIRTYNFPQNRVTDHRINKTLHDLETFMQGDYLLDELVQSLKEYADYESLVEIISQKV

SEQ ID NO: 65260 - protein, 74 aa, Homo sapiens
PNAAPKPEKKDGVSFCAEHVRRNALALHAQMKKTNPGPVGETLLCQLSSYAKTELGSQTPESSRSEASRILGLG

SEQ ID NO: 65261 - protein, 255 aa, Homo sapiens
  MOD_RES (1)..(1): Any amino acid
XRDGAAASLAQGGLLPENALFTSIQSLQSESEPLSLIANVVAGSSCRGPPLPRDLQGSRHRAEVASALRSFSPLQPGQAPTGRAHSTMTGSGVDARTASSGSSVWEGQLQSLVLSEYASTEMSLHALYMHQLHKQQAQAEPERHVWHRRESDESGESAPDEGGEGARAPQSIPRSASYPCAAPRPGAPETTALHGGFQRRYGGITDPGTVPRVPSHFSRLPLGGWAEDGQSASRHPEPVPEEGSEDELPPQVHKV

SEQ ID NO: 65262 - protein, 255 aa, Homo sapiens
MACRPCRGAGRIWCCRSHKSEPRSWSLLEQLGLAGADLAAPGVQQQLELERERLRREIRKELKLKEGAENLRRATTDLGRSLGPVELLLRGSSRRLDLLHQQLQELHAHVVLPDPAATHDGPQSPGAGGPTCSATNLSRVAGLEKQLAIELKVKQGAENMIQTYSNGSTKDRKLLLTAQQMLQDSKTKIDIIRMQLRRALQAGQLENQAAPDDTQGEVSTVLKLDNTVVGQTSWKPCGPNAWDQSFTLELERARE

SEQ ID NO: 65263 - protein, 290 aa, Homo sapiens
MGTALLQRGGCFLLCLSLLLLGCWAELGSGLEFPGAEGQWTRFPKWNACCESEMSFQLKTRSARGLVLYFDDEGFCDFLELILTRGGRLQLSFSIFCAEPATLLADTPVNDGAWHSVRIRRQFRNTTLFIDQVEAKWVEVKSKRRDMTVFSGLFVGGLPPELRAAALKLTLASVREREPFKGWIRDVRVNSSQVLPVDSGEVKLDDEPPNSGGGSPCEAGEEGEGGVCLNGGVCSVVDDQAVCDCSRTGFRGKDCSQEDNNVEGLAHLMMGDQGKSKGITLFYFFLISSV

SEQ ID NO: 65264 - protein, 96 aa, Homo sapiens
MNLDSLSLALSQISYLVDNLTKKNYRASQQEIQHIVNRHGPEADRHLLRCLFSHVDFSGDGKSSGKDFHQTQFLIQECALLITKPNCLEYLMWPRT

SEQ ID NO: 65265 - protein, 55 aa, Homo sapiens
MPSKVNYQANIWALKEEGCTHVIVTTACGSLREEIQPGDIVIIDQFIDRTTMRPQ

SEQ ID NO: 65266 - protein, 105 aa, Homo sapiens
MAMDEYLWMVILGFIIAFILAFSVGANDVANSFGTAVGSGVVTLRQACILASIFETTGSVLLGAKVGETIRKGIIDVNLYNETVETLMAGEVSAMVGRDDDTTDS

SEQ ID NO: 65267 - protein, 63 aa, Homo sapiens
MNGAPSPEDGASPSSPPLPPPPPPSWREFCESHARAAALDFARRFRLYLASHPQYAGPGAEAA

SEQ ID NO: 65268 - protein, 1579 aa, Homo sapiens
MYVRVSFDTKPDLLLHLMTKEWQLELPKLLISVHGGLQNFELQPKLKQVFGKGLIKAAMTTGAWIFTGGVNTGVIRHVGDALKDHASKSRGKICTIGIAPWGIVENQEDLIGRDVVRPYQTMSNPMSKLTVLNSMHSHFILADNGTTGKYGAEVKLRRQLEKHISLQKINTRCLPFFSLDSRLFYSFWGSCQLDSVGIGQGVPVVALIVEGGPNVISIVLEYLRDTPPVPVVVCDGSGRASDILAFGHKYSEEGGLINESLRDQLLVTIQKTFTYTRTQAQHLFIILMECMKKKELITVFRMGSEGHQDIDLAILTALLKGANASAPDQLSLALAWNRVDIARSQIFIYGQQWPVGSLEQAMLDALVLDRVDFVKLLIENGVSMHRFLTISRLEELYNTRHGPSNTLYHLVRDVKKGNLPPDYRISLIDIGLVIEYLMGGAYRCNYTRKRFRTLYHNLFGPKRPKALKLLGMEDDIPLRRGRKTTKKREEEVDIDLDDPEINHFPFPFHELMVWAVLMKRQKMALFFWQHGEEAMAKALVACKLCKAMAHEASENDMVDDISQELNHNSRDFGQLAVELLDQSYKQDEQLAMKLLTYELKNWSNATCLQLAVAAKHRDFIAHTCSQMLLTDMWMGRLRMRKNSGLKVILGILLPPSILSLEFKNKDDMPYMSQAQEIHLQEKEAEEPEKPTKEKEEEDMELTAMLGRNNGESSRKKDEEEVQSKHRLIPLGRKIYEFYNAPIVKFWFYTLAYIGYLMLFNYIVLVKMERWPSTQEWIVISYIFTLGIEKMREILMSEPGKLLQKVKVWLQEYWNVTDLIAILLFSVGMILRLQDQPFRSDGRVIYCVNIIYWYIRLLDIFGVNKYLGPYVMMIGKMMIDMMYFVIIMLVVLMSFGVARQAILFPNEEPSWKLAKNIFYMPYWMIYGEVFADQIDPPCGQNETREDGKIIQLPPCKTGAWIVPAIMACYLLVANILLVNLLIAVFNNTFFEVKSISNQVWKFQRYQLIMTFHERPVLPPPLIIFSHMTMIFQHLCCRWRKHESDPDERDYGLKLFITDDELKKVHDFEEQCIEEYFREKDDRFNSSNDERIRVTSERVENMSMRLEEVNEREHSMKASLQTVDIRLAQLEDLIGRMATALERLTGLERAESNKIRSRTSSDCTDAAYIVRQSSFNSQEGNTFKLQESIDPAGEETMSPTSPTLMPRMRSHSFYSVNMKDKGGIEKLESIFKERSLSLHRATSSHSVAKEPKAPAAPANTLAIVPDSRRPSSCIDIYVSAMDELHCDIDPLDNSVNILGLGEPSFSTPVPSTAPSSSAYATLAPTDRPPSRSIDFEDITSMDTRSFSSDYTHLPECQNPWDSEPPMYHTIERSKSSRYLATTPFLLEEAPIVKSHSFMFSPSRSYYANFGVPVKTAEYTSITDCIDTRCVNAPQAIADRAAFPGGLGDKVEDLTCCHPEREAELSHPSSDSEENEAKGRRATIAISSQEGDNSERTLSNNITVPKIERANSYSAEEPSAPYAHTRKSFSISDKLDRQRNTASLRNPFQRSKSSKPEGRGDSLSMRRLSRTSAFQSFESKHN

SEQ ID NO: 65269 - protein, 101 aa, Homo sapiens
MHQIFTELRHCAVPNFVLEANKTQIYFECHSEEASGIKRPMASEVPYASGMPIKKIGHRSVDSSGETTYKKTTSSALKGAIQLGITHTVGSLSTKPERDVL

SEQ ID NO: 65270 - protein, 87 aa, Homo sapiens
MTEDSQRNFRSVYYEKVGFRGVEEKKSLEILLKDDRLDTEKLCTFSQRFPLPSMYRALVWKVLLGLEKPAALSGYVIWRQRGNISGT

SEQ ID NO: 65271 - protein, 234 aa, Homo sapiens
  MOD_RES (1)..(1): Any amino acid
XHANVQLLRSAADWSAGIKYHEESIHAAYVHVIENSRHYIYIENQFFISCADDKVVFNKIGDAIAQRILKAHRENQKYRVYVVIPLLPGFEGDISTGGGNALQAIMHFNYRTMCRGENSILGQLKAELGNQWINYISFCGLRTHAELEGNLVTELIYVHSKLLIADDNTVIIGSANINDRSMLGKRDSEMAVIVQDTETVPSVMDGKEYQAGRFARGLRLQCFRSKMTPGVEDP

SEQ ID NO: 65272 - protein, 109 aa, Homo sapiens
MSKPELKEDKMLEVHFVGDDDVLNHILDREGGAKLKKERAQLLVNPKKIIKKPEYDLEEDDQEVLKDQNYVEIMGRDVQESLKNGSATGGGNKVYSFQNRKHSEKMAKL

SEQ ID NO: 65273 - protein, 117 aa, Homo sapiens
MTKEYQDLQHLDNEESDHHQLRKGPPPPQPLLQRLCSGPRLLLLSLGLSLLLLVVVCVIGSQNSQLQEELRGLRETFSNFTASTEAQVKGLSTQGGNVGRKMKSLESQLEKQQKDLS

SEQ ID NO: 65274 - protein, 1706 aa, Homo sapiens
MGSKDHAVFFREMTQLILNEMPKAGYSSILNDFVESNFFVIDGDSLLVTCLGVKSFKWGQNLHFFYLVECYLVDLLSNGGQFTIVFFKDAEYAYFDFPELLSLRTALILHLQHNTNIDVQTEFSGCLSQDWKLFLEQHYPYFLIVSEEGLSDLQTYLFNFLIIHSWGMKVNVVLSSGHESDTLRFYAYTMESTDRNQTFSKENETVIQSAYKSLIQHLEEIRVLVLATHFEHLKWNDMMEEAYQTLFLLQHLWSEGSDIQRVLCVTSCSLSLRMYHRVLVHSNCLSLQEVEDFCRLRCLCVAFQLHLPLSQRACSRVITCSWIRNSDSFLKMNKWCEYFILSNLNVFGCWNLNLNHVSDLYDEQLLKNIAFYYEFESTQEPHLNLGDSIRRDYEDLWNVVSHLVKEFNVGKSFPLRTTRRHFLRQEKSVIQEISLEKMPSVGFIPMTSAVIDEFVGDMMKDLPILKSDDPVVPSLFKQKTSDELLHWHAQRLLSDDYDRIKCHVDEQSRDPHVLDFLKKIQDYQQFYGKSLESISTKVIVTQTTRPKEDSSGASGEILQNTKPHQITKKSKKKSFLKEDQNKAQQNDDLLFSIEEEMKNNLHSGIRKLEDYLTSCASNSVKFGVEMLGLIACFKAWKKHCRGEGKISKDLSIAVQMMKRIHSLLERYPEILEAEHHQYIAKCLKYLGFNDLANSLDPTLIGDDKNKKKYSIDIGPARFQLQYMGHYLIRDERKDRDPRVQDFIPNAWQQELLDVVDKNESAVIVAPTSSGKTYASYYCMEKVLRESDVGVVVYVAPAKSLVGQVAATVENRFTKTLPAGRTLCGAFTRDYCHNVLNCQVLITVPECFEILLLAPHRQKWVERIRYVIFDEVHYLGREVGAKFWELLLVIIRCPFLVLSATINNPNLLTKWLQSVKQYWKQADKIMEEKCISEKQADKCLNFLQDHSYKNQSYEVRLVLCGERYNDLEKHICSVKHDDVYFDHFHPCAALTTDIIEKYGFPPDLTLTPQESIQLYDTMAQVWETWPRAQELCPEEFILFKNKIVIKKLDARKYEENLKAELTNWIKNGQVKKVKRVLKNLSPDSLSSSKDMVKMFPLLVEKLRQMDKLPAIFFLFKNDDVGKRAGSVCTFLEKTETKSHPHTECHSYVFAIDEVLEKVRKTQKRITKKNPKKAEKLERKKVYRAEYINFLENLKILEISEDCTYADVKALHTEITRNKDSTLERVLPRVRFTRHGKELKALAQRGIGYHHSSMYFKEKEFVEILFVKGLIRVVTATETLALGIHMPCKSVVFAQDSVYLDALNYRQMSGRAGRRGQDLLGNVYFFDIPLPKIKRLLASSVPELRGQFPLSITLVLRLMLLASKGDDPEDAKAKVLSVLKHSLLSFKRRRAMETLKLYFLFSLQLLIKEDYLNKKGNPKKFAGLASYLHGHEPSNLVFVNFLKRGLFHNLCKPAWKGSQQFSQDVMEKLVLVLANLFGRKYIPAKFQNANLSFSQSKVILAELPEDFKAALYEYNLAVMKDFASFLLIASKSVNMKKEHQLPLSRIKFTGKECEDSQLVSHLMSCKKGRVAISPFVCLSGNTDNDLLRPETINQVILRTVGVSGTQAPLLWPWKLDNRGRRMPLNAYVLNFYKHNCLTRLDQKNGMRMGQLLKCLKDFAFNIQAISDSLSELCENKRDNVVLAFKQLSQTFYEKLQEMQIQMSQNHLE

SEQ ID NO: 65275 - protein, 508 aa, Homo sapiens
MYSPLCLTQDEFHPFIEALLPHVRAFAYTWFNLQARKRKYFKKHEKRMSKEEERAVKDELLSEKPEVKQKWASRLLAKLRKDIRPEYREDFVLTVTGKKPPCCVLSNPDQKGKMRRIDCLRQADKVWRLDLVMVILFKGIPLESTDGERLVKSPQCSNPGLCVQPHHIGVSVKELDLYLAYFVHAADSSQSESPSQPSDADIKDQPENGHLGFQDSFVTSGVFSVTELVRVSQTPIAAGTGPNFSLSDLESSSYYSMSPGAMRRSLPSTSSTSSTKRLKSVEDEMDSPGEEPFYTGQGRSPGSGSQSSGWHEVEPGMPSPTTLKKSEKSGFSSPSPSQTSSLGTAFTQHHRPVITGPRASPHATPSTLHFPTSPIIQQPGPYFSHPAIRYHPQETLKEFVQLVCPDAGQQAGQVGFLNPNGSSQGKVHNPFLPTPMLPPPPPPPMARPVPLPVPDTKPPTTSTEGGAASPTSPTYSTPSTSPANRFVSVGPRDPSFVNIPQQTQGCSC

SEQ ID NO: 65276 - protein, 659 aa, Homo sapiens
MSSQPAGNQTSPGATEDYSYGSWYIDEPQGGEELQPEGEVPSCHTSIPPGLYHACLASLSILVLLLLAMLVRRRQLWPDCVRGRPGLPSPVDFLAGDRPRAVPAAVFMVLLSSLCLLLPDEDALPFLTLASAPSQGAWKILGLFYYAALYYPLAACATAGHTAAHLLGSTLSWAHLGVQVWQRAECPQVPKIYKYYSLLASLPLLLGLGFLSLWYPVQLVRSFSRRTGAGSKGLQSSYSEEYLRNLLCRKKLGSSYHTSKHGFLSWARVCLRHCIYTPQPGFHLPLKLVLSATLTGTAIYQVALLLLVGVVPTIQKVRAGVTTDVSYLLAGFGIVLSEDKQEVVELVKHHLWALEVCYISALVLSCLLTFLVLMRSLVTHRTNLRALHRGAALDLSPLHRSPHPSRQAIFCWMSFSAYQTAFICLGLLVQQIIFFLGTTALAFLVLMPVLHGRNLLLFRSLESSWPFWLTLALAVILQNMAAHWVFLETHDGHPQLTNRRVLYAATFLLFPLNVLVGAMVATWRVLLSALYNAIHLGQMDLSLLPPRAATLDPGYYTYRNFLKIEVSQSHPAMTAFCSLLLQAQSLLPRTMAAPQDSLRPGEEDEGMQLLQTKDSMAKGARPGASRGRARWGLAYTLLHNPTLQVFRKTALLGANGAQP

SEQ ID NO: 65277 - protein, 4001 aa, Homo sapiens
MSEPGGGGGEDGSAGLEVSAVQNVADVSVLQKHLRKLVPLLLEDGGEAPAALEAALEEKSALEQMRKFLSDPQVHTVLVERSTLKEDVGDEGEEEKEFISYNINIDIHYGVKSNSLAFIKRTPVIDADKPVSSQLRVLTLSEDSPYETLHSFISNAVAPFFKSYIRESGKADRDGDKMAPSVEKKIAELEMGLLHLQQNIEIPEISLPIHPMITNVAKQCYERGEKPKVTDFGDKVEDPTFLNQLQSGVNRWIREIQKVTKLDRDPASGTALQEISFWLNLERALYRIQEKRESPEVLLTLDILKHGKRFHATVSFDTDTGLKQALETVNDYNPLMKDFPLNDLLSATELDKIRQALVAIFTHLRKIRNTKYPIQRALRLVEAISRDLSSQLLKVLGTRKLMHVAYEEFEKVMVACFEVFQTWDDEYEKLQVLLRDIVKRKREENLKMVWRINPAHRKLQARLDQMRKFRRQHEQLRAVIVRVLRPQVTAVAQQNQGEVPEPQDMKVAEVLFDAADANAIEEVNLAYENVKEVDGLDVSKEGTEAWEAAMKRYDERIDRVETRITARLRDQLGTAKNANEMFRIFSRFNALFVRPHIRGAIREYQTQLIQRVKDDIESLHDKFKVQYPQSQACKMSHVRDLPPVSGSIIWAKQIDRQLTAYMKRVEDVLGKGWENHVEGQKLKQDGDSFRMKLNTQEIFDDWARKVQQRNLGVSGRIFTIESTRVRGRTGNVLKLKVNFLPEIITLSKEVRNLKWLGFRVPLAIVNKAHQANQLYPFAISLIESVRTYERTCEKVEERNTISLLVAGLKKEVQALIAEGIALVWESYKLDPYVQRLAETVFNFQEKVDDLLIIEEKIDLEVRSLETCMYDHKTFSEILNRVQKAVDDLNLHSYSNLPIWVNKLDMEIERILGVRLQAGLRAWTQVLLGQAEDKAEVDMDTDAPQVSHKPGGEPKIKNVVHELRITNQVIYLNPPIEECRYKLYQEMFAWKMVVLSLPRIQSQRYQVGVHYELTEEEKFYRNALTRMPDGPVALEESYSAVMGIVSEVEQYVKVWLQYQCLWDMQAENIYNRLGEDLNKWQALLVQIRKARGTFDNAETKKEFGPVVIDYGKVQSKVNLKYDSWHKEVLSKFGQMLGSNMTEFHSQISKSRQELEQHSVDTASTSDAVTFITYVQSLKRKIKQFEKQVELYRNGQRLLEKQRFQFPPSWLYIDNIEGEWGAFNDIMRRKDSAIQQQVANLQMKIVQEDRAVESRTTDLLTDWEKTKPVTGNLRPEEALQALTIYEGKFGRLKDDREKCAKAKEALELTDTGLLSGSEERVQVALEELQDLKGVWSELSKVWEQIDQMKEQPWVSVQPRKLRQNLDALLNQLKSFPARLRQYASYEFVQRLLKGYMKINMLVIELKSEALKDRHWKQLMKRLHVNWVVSELTLGQIWDVDLQKNEAIVKDVLLVAQGEMALEEFLKQIREVWNTYELDLVNYQNKCRLIRGWDDLFNKVKEHINSVSAMKLSPYYKVFEEDALSWEDKLNRIMALFDVWIDVQRRWVYLEGIFTGSADIKHLLPVETQRFQSISTEFLALMKKVSKSPLVMDVLNIQGVQRSLERLADLLGKIQKALGEYLERERSSFPRFYFVGDEDLLEIIGNSKNVAKLQKHFKKMFAGVSSIILNEDNSVVLGISSREGEEVMFKTPVSITEHPKINEWLTLVEKEMRVTLAKLLAESVTEVEIFGKATSIDPNTYITWIDKYQAQLVVLSAQIAWSENVETALSSMGGGGDAAPLHSVLSNVEVTLNVLADSVLMEQPPLRRRKLEHLITELVHQRDVTRSLIKSKIDNAKSFEWLSQMRFYFDPKQTDVLQQLSIQMANAKFNYGFEYLGVQDKLVQTPLTDRCYLTMTQALEARLGGSPFGPAGTGKTESVKALGHQLGRFVLVFNCDETFDFQAMGRIFVGLCQVGAWGCFDEFNRLEERMLSAVSQQVQCIQEALREHSNPNYDKTSAPITCELLNKQVKVSPDMAIFITMNPGYAGRSNLPDNLKKLFRSLAMTKPDRQLIAQVMLYSQGFRTAEVLANKIVPFFKLCDEQLSSQSHYDFGLRALKSVLVSAGNVKRERIQKIKREKEERGEAVDEGEIAENLPEQEILIQSVCETMVPKLVAEDIPLLFSLLSDVFPGVQYHRGEMTALREELKKVCQEMYLTYGDGEEVGGMWVEKVLQLYQITQINHGLMMVGPSGSGKSMAWRVLLKALERLEGVEGVAHIIDPKAISKDHLYGTLDPNTREWTDGLFTHVLRKIIDSVRGELQKRQWIVFDGDVDPEWVENLNSVLDDNKLLTLPNGERLSLPPNVRIMFEVQDLKYATLATVSRCGMVWFSEDVLSTDMIFNNFLARLRSIPLDEGEDEAQRRRKGKEDEGEEAASPMLQIQRDAATIMQPYFTSNGLVTKALEHAFQLEHIMDLTRLRCLGSLFSMLHQACRNVAQYNANHPDFPMQIEQLERYIQRYLVYAILWSLSGDSRLKMRAELGEYIRRITTVPLPTAPNIPIIDYEVSISGEWSPWQAKVPQIEVETHKVAAPDVVVPTLDTVRHEALLYTWLAEHKPLVLCGPPGSGKTMTLFSALRALPDMEVVGLNFSSATTPELLLKTFDHYCEYRRTPNGVVLAPVQLGKWLVLFCDEINLPDMDKYGTQRVISFIRQMVEHGGFYRTSDQTWVKLERIQFVGACNPPTDPGRKPLSHRFLRHVPVVYVDYPGPASLTQIYGTFNRAMLRLIPSLRTYAEPLTAAMVEFYTMSQERFTQDTQPHYIYSPREMTRWVRGIFEALRPLETLPVEGLIRIWAHEALRLFQDRLVEDEERRWTDENIDTVALKHFPNIDREKAMSRPILYSNWLSKDYIPVDQEELRDYVKARLKVFYEEELDVPLVLFNEVLDHVLRIDRIFRQPQGHLLLIGVSGAGKTTLSRFVAWMNGLSVYQIKVHRKYTGEDFDEDLRTVLRRSGCKNEKIAFIMDESNVLDSGFLERMNTLLANGEVPGLFEGDEYATLMTQCKEGAQKEGLMLDSHEELYKWFTSQVIRNLHVVFTMNPSSEGLKDRAATSPALFNRCVLNWFGDWSTEALYQVGKEFTSKMDLEKPNYIVPDYMPVVYDKLPQPPSHREAIVNSCVFVHQTLHQANARLAKRGGRTMAITPRHYLDFINHYANLFHEKRSELEEQQMHLNVGLRKIKETVDQVEELRRDLRIKSQELEVKNAAANDKLKKMVKDQQEAEKKKVMSQEIQEQLHKQQEVIADKQMSVKEDLDKVEPAVIEAQNAVKSIKKQHLVEVRSMANPPAAVKLALESICLLLGESTTDWKQIRSIIMRENFIPTIVNFSAEEISDAIREKMKKNYMSNPSYNYEIVNRASLACGPMVKWAIAQLNYADMLKRVEPLRNELQKLEDDAKDNQQKANEVEQMIRDLEASIARYKEEYAVLISEAQAIKADLAAVEAKVNRSTALLKSLSAERERWEKTSETFKNQMSTIAGDCLLSAAFIAYAGYFDQQMRQNLFTTWSHHLQQANIQFRTDIARTEYLSNADERLRWQASSLPADDLCTENAIMLKRFNRYPLIIDPSGQATEFIMNEYKDRKITRTSFLDDAFRKNLESALRFGNPLLVQDVESYDPVLNPVLNREVRRTGGRVLITLGDQDIDLSPSFVIFLSTRDPTVEFPPDLCSRVTFVNFTVTRSSLQSQCLNEVLKAERPDVDEKRSDLLKLQGEFQLRLRQLEKSLLQALNEVKGRILDDDTIITTLENLKREAAEVTRKVEETDIVMQEVETVSQQYLPLSTACSSIYFTMESLKQIHFLYQYSLQFFLDIYHNVLYENPNLKGVTDHTQRLSIITKDLFQVAFNRVARGMLHQDHITFAMLLARIKLKGTVGEPTYDAEFQHFLRGNEIVLSAGSTPRIQGLTVEQAEAVVRLSCLPAFKDLIAKVQADEVIVLLNVPSSNLASGWTAAPRSRLCPTSGVKKHLQHPLARPSTACS

SEQ ID NO: 65278 - protein, 193 aa, Homo sapiens
MSTPTDPGAMPHPGPSPGPGPSPGPILGPSPGPGPSPGSVHSMMGPSPGPPSVSHPMPTMGSTDFPQEGMHQMHKPIDGIHDKGIVEDIHCGSMKGTGMRPPHPGMGPPQSPMDQHSQGYMSPHPSPLGAPEHVSSPMSGGGPTPPQMPPSQPGALIPGDPQAMSQPNRGPSPFSPVQLHQLRAQILAYKMLA

SEQ ID NO: 65279 - protein, 49 aa, Homo sapiens
  MOD_RES (1)..(1): Any amino acid
XYVFGELLELANVQELAEGANAAYLQLLNLFAYGTYPDYIDEILEDWCL

SEQ ID NO: 65280 - protein, 543 aa, Homo sapiens
MLGFLSRGPSMKLCMGLACVLSLWNTVSGIKGEAKKEKGMTFLPTTGKWVIRAPFQLTCLEIKMLRRKKMGHSRAALNPDLLLSGLREEERKEKGVAFLATTELPARSIDLSALNLTELVNGMLSRALKDSKKFFSLLSVTSYSSFAFHKFSVAVYNISNLKTVDPAKFPTRYCYCLNNRTNDLSDFTALLVDIIGNSTSYLTEIFKSTSILSVNQSNESDCIFICVMTGKSGRNLSDFWEIEEKYPIINYTFTSGLSGVLGAATRGTARTSKPTTKSQKTLPSTSPGHWTQSTPWASALRSSPWTETAAPSETEETLNTGRPPELPARATATWFSASHTLPALATRRVARTQWLTADRQTWASISSVPWAQTISEKKPGGSLWETRSSPPTTAGTEEAMNTTSLLAPAAEIMATPGSPSQASPTLGAFTHGTQTPSPTKATAPRYPQTGDLSAEWPFTAGEEPVLVPRPHQVSRCPQPLFKVGAMAAAPLTLAIQRLNPCLMELCQFFQQCLCMSQRSPRTEDMSSFINPYQSSTSKISWKT

SEQ ID NO: 65281 - protein, 63 aa, Homo sapiens
  MOD_RES (1)..(1): Any amino acid
XYCRSKGEQIALNVDGACADETSTYSSKLMDKQTFCSSQTTSNTSRYAAALYRQAAAQLLLPG

SEQ ID NO: 65282 - protein, 110 aa, Homo sapiens
MSNNGADLTFGYISCFVAILLFGSNFVPLKKFDTGDGMFLQWVLCAAIWLVALVVNLILHCPKFWPFAMLGGCIWATGNIAVVPIIKTIGLGLGILIWGSFNALTGWASS

SEQ ID NO: 65283 - protein, 219 aa, Homo sapiens
  MOD_RES (1)..(1): Any amino acid
XQMPRVQTQQYYPHVRIAPTVTTWSNKTPTALPSHPPAASPSDTQGENPPPPGFIMHGNVNPNAAGQLPTSPGHMHTQVPPYPQPQRPQNGWNDPPALNRVPKKKKMPENFMPPVPITSPIMNPLGDPQSQMLQQQPSAPVPLSSQSSFPQPHLPGGQPFHGVQQPLGQTGMPPSFSKPNIEGAPGAPIGNTFQHVQSLPTKKITKKPIPDEHLILKTT

SEQ ID NO: 65284 - protein, 215 aa, Homo sapiens
MQMVPKFCFPFDVEREPPSPAVQHFTFALTDLAGNRRFGFCRLRAGTQSCLCILSHLPWFEVFYKLLNTVGDLLAQDQVTEAEELLQNLFQQSLSGPQASVGLELGSGVTVSSGQGIPPPTRGNSKPLSCFVAPDSGRLPSIPENRNLTELVVAVTDENIVGLFAALLAERRVLLTASKLSTLTSCVHASCALLYPMRWEHVLIPTLPPHLLDYC

SEQ ID NO: 65285 - protein, 305 aa, Homo sapiens [sequence omitted]

SEQ ID NO: 65286 - protein, 333 aa, Homo sapiens
MLTLQTWLVQALFIFLTTESTGELLDPCGYISPESPVVQLHSNFTAVCVLKEKCMDYFHVNANYIVWKTNHFTIPKEQYTIINRTASSVTFTDIASLNIQLTCNILTFGQLEQNVYGITIISGLPPEKPKNLSCIVNEGKKMRCEWDGGRETHLETNFTLKSEWATHKFADCKAKRDTPTSCTVDYSTVYFVNIEVWVEAENALGKVTSDHINFDPVYKVKPNPPHNLSVINSEELSSILKLTWTNPSIKSVIILKYNIQYRTKDASTWSQIPPEDTASTRSSFTVQDLKPFTEYVFRIRCMKEDGKGYWSDWSEEASGITYEDTLDKPLGSG

SEQ ID NO: 65287 - protein, 311 aa, Homo sapiens
MGRRNNTNVADFILMGLTLSEEIQMALFMLFLLIYLITMLGNVGMILIIRLDLQLHTPMYFFLTHLSFIDLSYSTVVTPKTLANLLTSNYISFTGCFAQMFFFAFLGTAECYLLSSMAHDRYAAICSPLHYTVIMSKRLCLALITGPYVIGFIDSFVNVVSMSRLHFYDSNVIHHFFCDTSPILALSCTDTYNTEILIFIIVGSTLMVSLFTISASYVFILFTILKINSTSGKQKAFSTCVSHLLGVTIFYSTLIFTYLKPRKSYSLGRDQVASVFYTIVIPVLNPLIYSLRNKEVKNAVIRVMQRRQDSR

SEQ ID NO: 65288 - protein, 43 aa, Homo sapiens
MQAFLKGTSISTKPPLTKDRGVAASAGSSGENKKAKPVPWVEK

SEQ ID NO: 65289 - protein, 79 aa, Homo sapiens
MAAAATLRLSAQGTVTFEDVAVNFTWEEWNLLSEAQRCLYRDVTLENLALISSLGCWCGVEDEAAPSKQSIYIQRETQG

SEQ ID NO: 65290 - protein, 164 aa, Homo sapiens
MAAGGDHGSPDSYRSPLASRYASPEMCFVFSDRYKFRTWRQLWLWLAEAEQTLGLPITDEQIQEMKSNLENIDFKMAAEEEKRLRHDVMAHVHTFGHCCPKAAGIIHLGATSCYVGDNTDLIILRNALDLLLPKACTADHSWETLLSLDSGSLHGSPELEACPR

SEQ ID NO: 65291 - protein, 178 aa, Homo sapiens
MASGGGGGNTGAGGGPGMGLSLGLGLGLSLGMSEATSEAEEEAATAEAVGRLATTLWLRLRGWEAVLAAAQRLLVWEKPLHSLVTAAALNGLFWLLSSSSLRPFFLLSVSLLAYFLLDLWQPRFLPDVSASSPEEPHSDRFTCRSCCSTRGRIQLSSAFESALAVLCWLCWDTMFQGL

SEQ ID NO: 65292 - protein, 1026 aa, Homo sapiens
MKKFNFRKVLDGLTASSPGSGSSSGSNSGGGAGSGSVHPAGTAGVLREEIQETLTSEYFQICKTVRHGFPHQPTALAFDPVQKILAIGTRTGAIRILGRPGVDCYCQHESGAAVLQLQFLINEGALVSASSDDTLHLWNLRQKRPAILHSLKFNRERITYCHLPFQSKWLYVGTERGNTHIVNIESFILSGYVIMWNKAIELSTKTHPGPVVHLSDSPRDEGKLLIGYENGTVVFWDLKSKRAELRVYYDEAIHSIDWHHEGKQFMCSHSDGSLTLWNLKSPSRPFQTTIPHGKSQREGRKSESCKPILKVEYKTCKNSEPFIIFSGGLSYDKACRRPSLTIMHGKAITVLEMDHPIVEFLTLCETPYPNEFQEPYAVVVLLEKDLIVVDLTQSNFPIFENPYPMDIHESPVTCTAYFADCPPDLILVLYSIGVKHKKQGYSNKEWPISGGAWNLGAQTYPEIIITGHADGSIKFWDASAITLQMLYKLKTSKVFEKQKVGEGKQTCEIVEEDPFAIQMIYWCPESRIFCVSGVSAYVIIYKFSRHEITTEIVSLEVRLQYDVEDIITPEPETSPPFPDLSAQLPSSRSLSGSTNTVASEGVTKDSIPCLNVKTRPVRMPPGYQAELVIQLVWVDGEPPQQITSLAVSSAYGIVAFGNCNGLAVVDFIQKTVLLSMGTIDLYRSSDLYQRQPRSPRKNKQFIADNFCMRGLSNFYPDLTKRIRTSYQSLTELNDSPVPLELERCKSPTSDHVNGHCTSPTSQSCSSGKRLSSADVSKVNRWGPGRPPFRKAQSAACMEISLPVTTEENRENSYNRSRSSSISSIDKDSKEAITALYFMDSFARKNDSTISPCLFVGTSLGMVLIISLNLPLADEQRFTEPVMVLPSGTFLSLKGAVLTFSCMDRMGGLMQPPYEVWRDPNNIDENEKSWRRKVVMNSSSASQEIGDHQYTIICSEKQAKVFSLPSQTCLYVHNITETSFILQANVVVMCSSACLACFCANGHIMIMRYLPSYKLSGNHNNTSKVQS

SEQ ID NO: 65293 - protein, 156 aa, Homo sapiens
MASNNHWFQSSQVPSFAQMLKKNLPVQPATKTITTPTGWSSESYGLSKMASKVTQVTGNFPEPLLSKNLSSISNPVLPPKKIPKEFIMKYKRGEINPVSALHQFAQMQRVQLDLKETVTTGNVMGPYFAFCAVVDGIQYKTGLGQNKKESRSNAAK

SEQ ID NO: 65294 - protein, 160 aa, Homo sapiens
MARELYHEEFARAGKQAGLQVWRIEKLELVPVPQSAHGDFYVGDAYLVLHTAKTSRGFTYHLHFWLGFYPHHAACGSGRQKLRFIRKLASSDRRKECSQDESTAAAIFTVQMDDYLGGKPVQNRELQGYESNDFVSYFKGGLKYKAGGVASGLNHVLTND

SEQ ID NO: 65295 - protein, 55 aa, Homo sapiens
QLFMTAYFLVSALAEMPDSAAALLGTCCKLQIIPTLCHLVSNLPGGTLEWIGMGK

SEQ ID NO: 65296 - protein, 65 aa, Homo sapiens
MALDGIRMPDGCYADGTWELSVHVTDLNRDVTLRVTGEVHIGGVMLKLVEKLEKRSPTRCKKRLV

SEQ ID NO: 65297 - protein, 86 aa, Homo sapiens
MAFPVDMLENCSHEELENSAEDYMSDLRCGDPENPECFSLLNITIPISLSNVGFVPLYGGDQTQKILALFAPEDSLTAVALYLADQ

SEQ ID NO: 65298 - protein, 444 aa, Homo sapiens
MNPAAEAEFNILLATDSYKVTHYKQYPPNTSKVYSYFECREKKTENSKLRKVKYEETVFYGLQYILNKYLKGKVVTKEKIQEAKDVYKEHFQDDVFNEKGWNYILEKYDGHLPIEIKAVPEGFVIPRGNVLFTVENTDPECYWLTNWIETILVQSWYPITVATNSREQKKILAKYLLETSGNLDGLEYKLHDFGYRGVSSQETAGIGASAHLVNFKGTDTVAGLALIKKYYGTKDPVPGYSVPAAEHSTITAWGKDHEKDAFEHIVTQFSSVPVSVVSDSYDIYNACEKIWGEDLRHLIVSRSTQAPLIIRPDSGNPLDTVLKVLEILGKKFPVTENSKGYKLLPPYLRVIQGDGVDINTLQEINVFKDPVADPNKRSKKGRLSLHRTPAGNFVTLEEGKGDLEEYGQDLLHTVFKNGKVTKSYSFDEIRKNAQLNIELEAAHH

SEQ ID NO: 65299 - protein, 94 aa, Homo sapiens
MTEDPETGTYKDCMLMSHLEEPKVTEDEEPPTEQDKRKKMLALKDPVHTVSLQQFIYEKLKAQQEMLGEQGFQSLMETVDTEIVTQLQEFLQGF

SEQ ID NO: 65300 - protein, 55 aa, Homo sapiens
GTPVEETLHACQRLHQEGKFVELGLSNYASWEVAEICTLCKSNGWILPTVYQGAC

SEQ ID NO: 65301 - protein, 66 aa, Homo sapiens
  MOD_RES (1)..(1): Any amino acid
XLTARSRWRLRNSISAFLFTVTFAWCPPGLSNLTILSCPGRSTVVRSRFTAALTSLGSGVAPTSVF

SEQ ID NO: 65302 - protein, 48 aa, Homo sapiens
MPRLKESRSHESLLSPSSAVEALDLSMEEEVVIKPVHSSILGQDYCFE

SEQ ID NO: 65303 - protein, 617 aa, Homo sapiens
MAASRRSQHHHHHHQQQLQPAPGASAPPPPPPPPLSPGLAPGTTPASPTASGLAPFASPRHGLALPEGDGSRDPPDRPRSPDPVDGTSCCSTTSTICTVAAAPVVPAVSTSSAAGVAPNPAGSGSNNSPSSSSSPTSSSSSSPSSPGSSLAESPEAAGVSSTAPLGPGAAGPGTGVPAVSGALRELLEACRNGDVSRVKRLVDAANVNAKDMAGRKSSPLHFAAGFGRKDVVEHLLQMGANVHARDDGGLIPLHNACSFGHAEVVSLLLCQGADPNARDNWNYTPLHEAAIKGKIDVCIVLLQHGADPNIRNTDGKSALDLADPSAKAVLTGEYKKDELLEAARSGNEEKLMALLTPLNVNCHASDGRKSTPLHLAAGYNRVRIVQLLLQHGADVHAKDKGGLVPLHNACSYGHYEVTELLLKHGACVNAMDLWQFTPLHEAASKNRVEVCSLLLSHGADPTLVNCHGKSAVDMAPTPELRERLTYEFKGHSLLQAAREADLAKVKKTLALEIINFKQPQSHETALHCAVASLHPKRKQVTELLLRKGANVNEKNKDFMTPLHVAAERAHNDVMEVLHKHGAKVRHTPEQSARLSTEQPAALNTASLSPIFLKKLIL

SEQ ID NO: 65304 - protein, 38 aa, Homo sapiens
MGEHEQVALPRTRLWSVQLTGPGLQSQRPWDALLLGTQ

SEQ ID NO: 65305 - protein, 1011 aa, Homo sapiens
MPRGRASRTSIQSELHRDRRRPEITIVAAEPLRPASWFPGTPPPGLGFPTSSAAGSWRPNELVPAELPPSYEQVIKEINQVQVNTTNNNNAAATPRHTITSATQTDFSEEIDNDLPQTLQAPLKPLQPFSAVSSGNLPTNVAPLIVFDISEEPNCPENPSATRCPVPKPRSKSNLRPIPRDSHIKEQSQQKISPAAVGEESSPGRPQSLLDNASTSDSQAVMNIMNTEQSQNSIVSRIKVFEGQTNIETSGLPKKPEITPRSLPPKPTVSSGKPSVAPKPAANRASGEWDSGTENRLKVTSKEGLTPYPPLQEAGSIPVTKPELPKKPNPGLIRSVNPEIPGRGPLAESSDSGKKVPTPAPRPLLLKKSVSSENPTYPSAPLKPVTVPPRLAGASQAKAYKSLGEGPPANPPVPVLQSKPLVDIDLISFDDDVLPTPSGNLAEESVGSEMVLDPFQLPAKTEPIKERAVQPAPTRKPTVIRIPAKPGKCLHEDPQSPPPLPAEKPIGNTFSTVSGKLSNVERTRNLESNHPGQTGGFVRVPPRLPPRPVNGKTIPTQQPPTKVPPERPPPPKLSATRRSNKKLPFNRSSSDMDLQKKQSNLATGLSKAKSQVFKNQDPVLPPRPKPGHPLYSKYMLSVPHGIANEDIVSQNPGELSCKRGDVLVMLKQTENNYLECQKGEDTGRVHLSQMKIITPLDEHLRSRPNDPSHAQKPVDSGAPHAVVLHDFPAEQVDDLNLTSGEIVYLLEKIDTDWYRGNCRNQIGIFPANYVKVIIDIPEGGNGKRECVSSHCVKGSRCVARFEYIGEQKDELSFSEGEIIILKEYVNEEWARGEVRGRTGIFPLNFVEPVEDYPTSGANVLSTKVPLKTKKEDSGSNSQVNSLPAEWCEALHSFTAETSDDLSFKRGDRIQILERLDSDWCRGRLQDREGIFPAVFVRPCPAEAKSMLAIVPKGRKAKALYDFRGENEDELSFKAGDIITELESVDDDWMSGELMGKSGIFPKNYIQFLQIS

SEQ ID NO: 65306 - protein, 291 aa, Homo sapiens
MCPKNASYYGNRAATLMMLGRFREALGDAQQSVRLDDSFVRGHLREGKCHLSLGNAMAACRSFQRALELDHKNAQAQQEFKNANAVMEYEKIAETDFEKRDFRKVVFCMDRALEFAPACHRFKILKAECLAMLGRYPEAQSVASDILRMDSTNADALYVRGLCLYYEDCIEKAVQFFVQALRMAPDHEKACIACRNAKALKAKKEDGNKAFKEGNYKLAYELYTEALGIDPNNIKTNAKLYCNRGTVNSKLRKLDDAIEDCTNAVKLDDTYIKAYLRRAQWWDCSSPRLSL

SEQ ID NO: 65307 - protein, 171 aa, Homo sapiens
DLIENLAQDETSRLDLGFEEWDVAGLPWWFLGNLRSNYTPRSNGSTDLQTNQVIEVGKNDDLEDSKSLSDDTDVEVTSEDEWQCTECKKFNSPSKRYCFRCWALRKDWYSDCSKLTHSLSTSDITAIPEKENEGNDVPDCRRTISAPVVRPKDAYIKKENSKLFDPCNSVE

SEQ ID NO: 65308 - protein, 80 aa, Homo sapiens
MAPYSLLVTRLQKALGVRQYHVASVLCQRAKVAMSHFEPNEYIHYDLLEKNINIVRKRNDEICMLRGLSRNYDAGKARIL

SEQ ID NO: 65309 - protein, 116 aa, Homo sapiens
MAAAMPLALLVLLLLGPGGWCLAEPPRDSLREELVITPLPSGDVAATFQFRTRWDSELQREGVSHYRLFPKALGQLISKYSLRELHLSFTQGFWRTRYWGPPFLQAPSGLAASCGL

SEQ ID NO: 65310 - protein, 93 aa, Homo sapiens
MKRTVCAKSIFELWGHGQSPEELYSSLKNYPVEKMVPFLHSDSTYKIKIHTFNKTLTQEEKIKRIDALEFLPFEGKVNLKKPQHVFSVLEDYG

SEQ ID NO: 65311 - protein, 175 aa, Homo sapiens
MTQQPLRGVTSLRFNQDQSCFCCAMETGVRIYNVEPLMEKGHLDHEQVGSMGLVEMLHRSNLLALVGGGSSPKFSEISVLIWDDAREGKDSKEKLVLEFTFTKPVLSVRMRHDKIVIVLKNRIYVYSFPDNPRKLFEFDTRDNPKGLCDLCPSLEKQLLVFPGHKCGSLQLVDLA

SEQ ID NO: 65312 - protein, 91 aa, Homo sapiens
MTDPMMDFFDDANLFGETLEEENLLHQVESQTEPFTGLDPEDLLQEGLLPHFDESTFGQDNSSHILDHDLDRQFTSHLVTRPSDMAQTQLQ

SEQ ID NO: 65313 - protein, 564 aa, Homo sapiens
MQESQTKSMFVSRALEKILADKEVKRPQHSQLRRACQVALDEIKAEIEKQRLGTAAPPKANFIEADKYFLPFELACQSKSPRVVSTSLDCLQKLIAYGHITGNAPDSGAPGKRLIDRIVETICSCFQGPQTDEGVQLQIIKALLTAVTSPHIEIHEGTILQTVRTCYNIYLASKNLINQTTAKATLTQMLNVIFTRMENQVLQEARELEKPIQSKPQSPVIQAAAVSPKFVRLKHSQAQSKPTTPEKTDLTNGEHARSDSGKVSTENGDAPRERGSSLSGTDDGAQEVVKDILEDVVTSAIKEAAEKHGLTEPERVLGELECQECAIPPGVDENSQTNGIADDRQSLSSADNLESDAQGHQVAARFSHVLQKDAFLVFRSLCKLSMKPLGEGPPDPKSHELRSKVVSLQLLLSVLQNAGPVFRTHEMFINAIKQYLCVALSKNGVSSVPDVFELSLAIFLTLLSNFKMHLKMQIEVFFKEIFLNILETSTSSFEHRWMVIQTLTRICADAQCVVDIYVNYDCDLNAANIFERLVNDLSKIAQGRSGHELGMTPLQVRRGSRIRK

SEQ ID NO: 65314 - protein, 1186 aa, Homo sapiens
  MOD_RES (1)..(1): Any amino acid
XCAAPAPLTSAERELQQIRINEVKTEISVESKHQTLQGLAFPLQPEAQRALQQLKQKMVNYIQMKLDLERETIELVHTEPTDVAQLPSRVPRDAARYHFFLYKHTHEGDPLESVVFIYSMPGYKCSIKERMLYSSCKSRLLDSVEQDFHLEIAKKGFCRSALHPLSLLVQAIMLAMTLALGTLPAFLPCELQPHGLVNCNWLFLKSVPHFSMAAPRGNVTSLSLSSNRIHHLHDSDFAHLPSLRHLNLKWNCPPVGLSPMHFPCHMTIEPSTFLAVPTLEELNLSYNNIMTVPALPKSLISLSLSHTNILMLDSASLAGLHALRFLFMDGNCYYKNPCRQALEVAPGALLGLGNLTHLSLKYNNLTVVPRNLPSSLEYLLLSYNRIVKLAPEDLANLTALRVLDVGGNCRRCDHAPNPCMECPRHFPQLHPDTFSHLSRLEGLVLKDSSLSWLNASWFRGLGNLRVLDLSENFLYKCITKTKAFQGLTQLRKLNLSFNYQKRVSFAHLSLAPSFGSLVALKELDMHGIFFRSLDETTLRPLARLPMLQTLRLQMNFINQAQLGIFRAFPGLRYVDLSDNRISGASELTATMGEADGGEKVWLQPGDLAPAPVDTPSSEDFRPNCSTLNFTLDLSRNNLVTVQPEMFAQLSHLQCLRLSHNCISQAVNGSQFLPLTGLQVLDLSHNKLDLYHEHSFTELPRLEALDLSYNSQPFGMQGVGHNFSFVAHLRTLRHLSLAHNNIHSQVSQQLCSTSLRALDFSGNALGHMWAEGDLYLHFFQGLSGLIWLDLSQNRLHTLLPQTLRNLPKSLQVLRLRDNYLAFFKWWSLHFLPKLEVLDLAGNQLKALTNGSLPAGTRLRRLDVSCNSISFVAPGFFSKAKELRELNLSANALKTVDHSWFGPLASALQILDVSANPLHCACGAAFMDFLLEVQAAVPGLPSRVKCGSPGQLQGLSIFAQDLRLCLDEALSWDCFALSLLAVALGLGVPMLHHLCGWDLWYCFHLCLAWLPWRGRQSGRDEDALPYDAFVVFDKTQSAVADWVYNELRGQLEECRGRWALRLCLEERDWLPGKTLFENLWASVYGSRKTLFVLAHTDRVSGLLRASFLLAQQRLLEDRKDVVVLVILSPDGRRSRYVRLRQRLCRQSVLLWPHQPSGQRSFWAQLGMALTRDNHHFYNRNFCQGPTAE

SEQ ID NO: 65315 - protein, 55 aa, Homo sapiens
MLAGGVRSMPSPLLACWQPILLLVLGSVLSGSATGCPPRCECSAQDRAVLCHRKR

SEQ ID NO: 65316 - protein, 227 aa, Homo sapiens
MWRGLWTLAAQAARGPRRLCTRRSSGAPAPGSGATIFALSSGQGRCGIAVIRTSGPASGHALRILTAPRDLPLARHASLRLLSDPRSGEPLDRALVLWFPGPQSFTGEDCVEFHVHGGPAVVSGVLQALGSVPGLRPAEAGEFTRRAFANGKLNLTEVEGLADLIHAETEAQRRQALRQLDGELGHLCRGWAETLTKPTSKYGHCRWPWVHIYEMPGAGRGSAQGCT

SEQ ID NO: 65317 - protein, 282 aa, Homo sapiens
  MOD_RES (1)..(1): Any amino acid
XRTNMWTPVANMNGRRLQFGVAVLDDKLYVVGGRDGLKTLNTVECYNPKTKTWSVMPPMSTHRHGLGVAVLEGPMYAVGGHDGWSYLNTVERWDPQARQWNFVATMSTPRSTVGVAVLSGKLYAVGGRDGSSCLKSVECFDPHTNKWTLCAQMSKRRGGVGVTTWNGLLYAIGGHDAPASNLTSRLSDCVERYDPKTDMWTAVASMSISRDAVGVCLLGDKLYAVGGYDGQAYLNTVEAYDPQTNEWTQVFSHTFEDSKDHLVAIKQTIWRQNSLSEEFRSH

SEQ ID NO: 65318 - protein, 261 aa, Homo sapiens
  MOD_RES (1)..(1): Any amino acid
XFCRDRMILLKMEQEIIDFIADNNNHYKKFPQMSSYQRMLVHRVAAYFGLDHNVDQTGKSVIINKTSSTRIQFAPRKAFLWKTVGSWKTVTYAMRPIRKDSSFGWGNRDGSGRTSGSRQSSSENELKWSDHQRAWSSTDSDSSNRNLKPAMTKTASFGGITVLTRGDSTSSTRSTGKLSKAGSESSSSAGSSGSLSRTHPPLQSTPLVSGVAAGSPGCVPYPENGIGGQVAPSSTSYILLPLEAATGIPPGSILLNPHTGE

SEQ ID NO: 65319 - protein, 215 aa, Homo sapiens
  MOD_RES (1)..(1): Any amino acid
XKIVIRGDRNTGKTALWHRLQGRPFVEEYIPTQEIQVTSIHWSYKTTDDIVKVEVWDVVDKGKCKKRGDGLKMENDPQEAESEMALDAEFLDVYKNCNGVVMMFDITKQWTFNYILRELPKVPTHVPVCVLGNYRDMGEHRVILPDDVRDFIDNLDSRPPGSSYFRYAESSMKNSFGLKYLHKFFNIPFLQLQVSTHHVGWSGCWSLTSFQVSPV

SEQ ID NO: 65320 - protein, 168 aa, Homo sapiens
  MOD_RES (1)..(1): Any amino acid
XEMEGKYVINMPKGTTPRTRKILEQQQAAKGLHRTSVFDRLGAETKADTTTGSKPTGVFSRLGATPETDEDLAWDSDNDSSSSVLQYAGVLKKLGRGPAKASPQPALTVKAKATSSATTAAAPTLRRLALSSRSGLERKPESLSKVSIIKRLGAAALVPEAQDSQASA

SEQ ID NO: 65321 - protein, 150 aa, Homo sapiens
PLHVLVCNAATFALPWSLTKDGLETTFQVNHLGHFYLVQLLQDVLCRSAPARVIVVSSESHRFTDINDSLGKLDFSRLSPTKNDYWAMLAYNRSKLCNILFSNELHRRLSPRGVTSNAVHPGNMMYSNIHRSWWVYTLLFTLARPFTKSM

SEQ ID NO: 65322 - protein, 293 aa, Homo sapiens
MRESALERGPVPEAPAGGPVHAVTVVTLLEKLASMLETLRERQGGLARRQGGLAGSVRRIQSGLGALSRSHDTTSNTLAQLLAKAERVSSHANAAQERAVRRAAQVQRLEANHGLLVARGKLHVLLFKASPTLQRFAVRTQLSLPLPSHACLSPQTLAAEEEGEVPASAFQKAPEPLGPADQSELGPEQLEAEVGESSDEEPVESRAQRLRRTGLQKVQSLRRALSGRKGPAAPPPTPVKPPRLGPGRSAEAQPEAQPALEPTLEPEPPQDTEEDPGRPGAAEEALLQMESVA

SEQ ID NO: 65323 - protein, 1698 aa, Homo sapiens
MRLLWGLIWASSFFTLSLQKPRLLLFSPSVVHLGVPLSVGVQLQDVPRGQVVKGSVFLRNPSRNNVPCSPKVDFTLSSERDFALLSLQVPLKDAKSCGLHQLLRGPEVQLVAHSPWLKDSLSRTTNIQGINLLFSSRRGHLFLQTDQPIYNPGQRVRYRVFALDQKMRPSTDTITVMVENSHGLRVRKKEVYMPSSIFQDDFVIPDISEPGTWKISARFSDGLESNSSTQFEVKKYVLPNFEVKITPGKPYILTVPGHLDEMQLDIQARYIYGKPVQGVAYVRFGLLDEDGKKTFFRGLESQTKLVNGQSHISLSKAEFQDALEKLNMGITDLQGLRLYVAAAIIESPGGEMEEAELTSWYFVSSPFSLDLSKTKRHLVPGAPFLLQALVREMSGSPASGIPVKVSATVSSPGSVPEVQDIQQNTDGSGQVSIPIIIPQTISELQLSVSAGSPHPAIARLTVAAPPSGGPGFLSIERPDSRPPRVGDTLNLNLRAVGSGATFSHYYYMILSRGQIVFMNREPKRTLTSVSVFVDHHLAPSFYFVAFYYHGDHPVANSLRVDVQAGACEGKLELSVDGAKQYRNGESVKLHLETDSLALVALGALDTALYAAGSKSHKPLNMGKVFEAMNSYDLGCGPGGGDSALQVFQAAGLAFSDGDQWTLSRKRLSCPKEKTTRKKRNVNFQKAINEKLGQYASPTAKRCCQDGVTRLPMMRSCEQRAARVQQPDCREPFLSCCQFAESLRKKSRDKGQAGLQRALEILQEEDLIDEDDIPVRSFFPENWLWRVETVDRFQILTLWLPDSLTTWEIHGLSLSKTKGLCVATPVQLRVFREFHLHLRLPMSVRRFEQLELRPVLYNYLDKNLTVSVHVSPVEGLCLAGGGGLAQQVLVPAGSARPVAFSVVPTAAAAVSLKVVARGSFEFPVGDAVSKVLQIEKEGAIHREELVYELNPLDHRGRTLEIPGNSDPNMIPDGDFNSYVRVTASDPLDTLGSEGALSPGGVASLLRLPRGCGEQTMIYLAPTLAASRYLDKTEQWSTLPPETKDHAVDLIQKGYMRIQQFRKADGSYAAWLSRGSSTWLTAFVLKVLSLAQEQVGGSPEKLQETSNWLLSQQQADGSFQDLSPVIHRSMQGGLVGNDETVALTAFVTIALHHGLAVFQDEGAEPLKQRVEASISKANSFLGEKASAGLLGAHAAAITAYALTLTKAPADLRGVAHNNLMAMAQETGDNLYWGSVTGSQSNAVSPTPAPRNPSDPMPQAPALWIETTAYALLHLLLHEGKAEMADQAAAWLTRQGSFQGGFRSTQDTVIALDALSAYWIASHTTEERGLNVTLSSTGRNGFKSHALQLNNRQIRGLEEELQFSLGSKINVKVGGNSKGTLKVLRTYNVLDMKNTTCQDLQIEVTVKGHVEYTMEANEDYEDYEYDELPAKDDPDAPLQPVTPLQLFEGRRNRRRREAPKLTSLSDRYVSHFETEGPHVLLYFDSVPTSRECVGFEAVQEVPVGLVQPASATLYDYYNPERRCSVFYGAPSKSRLLATLCSAEVCQCAEGKCPRQRRALERGLQDEDGYRMKFACYYPRVEYGFQVKVLREDSRAAFRLFETKITQVLHFTKDVKAAANQMRNFLVRASCRLRLEPGKEYLIMGLDGATYDLEGHPQYLLDSNSWIEEMPSERLCRSTRQRAACAQLNDFLQEYGTQGCQV

SEQ ID NO: 65324 - protein, 89 aa, Homo sapiens
MDGEEKTYGGCEGPDAMYVKLISSDGHEFIVKREHALTSGTIKAMLSGPGQFAENETNEVNFREIPSHVLSKVCMYFTYKVRYTNSSTE

SEQ ID NO: 65325 - protein, 202 aa, Homo sapiens
  MOD_RES (1)..(1): Any amino acid
XEKQEGSLCAQHCLNNLLQGEYFSPVELSSIAHQLDEEERMRMAEGGVTSEDYRTFLQQPSGNMDDSGFFSIQVISNALKVWGLELILFNSPEYQRLRIDPINERSFICNYKEHWFTVRKLGKQGDLPDCEADQLLQMIRVQQMHRPKLIGEELAQLKEQRVHKTDLERVLEANDGSGMLDEDEEDLQRALALSRQEIDMED

SEQ ID NO: 65326 - protein, 139 aa, Homo sapiens
  MOD_RES (1)..(1): Any amino acid
XIDTEGKNAVMRLCFLKARKNTAVTGGANLVSCGGSGYVRFWDIYKKQLLAEFLAHSGVGSIIMSTDKMNRYLTTGDLDGWLKIWNIEAKHWHIENCLFLPKRDTNLVESEIQKEISLFSKEESCLDPTEHSLLNKKNK

SEQ ID NO: 65327 - protein, 111 aa, Homo sapiens
MCQRLWPWPANQPLPGGLLPRPLSLAPSSSSSCCSPPCSQDGRMAAQGAPRFLLTFDFDETIVDENSDDSIVRAAPGQRLPESLRATYREGFYNEYMQRVFKYLGEQGVRP

SEQ ID NO: 65328 - protein, 224 aa, Homo sapiens
MSSVAVLTQESFAEHRSGLVPQQIKVATLNSEEESDPPTYKDAFPPLPEKAACLESAQEPAGAWGNKIRPIKASVITQVFHVPLEERKYKDMNQFGEGEQAKICLEIMQRTGAHLELSLAKDQGLSIMVSGKLDAVMKARKDIVARLQTQASATVAIPKEHHRFVIGKNGEKLQDLELKTATKIQIPRPDDPSNQIKITGTKEGIEKARHEVLLISAEQDKRAV

SEQ ID NO: 65329 - protein, 184 aa, Homo sapiens
MLQTIYLFSKYPDWNPEILPSRRNEGNRKENETPRRRSHSPSPRRSRRSSSSHRFRRSRSPMHYMYRPRSRSPRICHRFISRYRSRSRSRSPYRIRNPFRGSPKCFRSVSPERMSRRSVRSSDRKKALEDVVQRSGHGTEFNKQKHLEAADKGHSPAQKPKTSSGTKPSVKPTSATKSDSNLGG

SEQ ID NO: 65330 - protein, 151 aa, Homo sapiens
MLLPYLRKKLRLTGTKYGCGGGGCGACTVMISRYNPITKRIRHHPANACLIPICSLYGAAVTTVEGIGSTHTRIHPVQERIAKCHGTQCGFCTPGMVMSIYTLLRNHPEPTLDQLTDALGGNLCRCTGYRPIIDACKTFCKTSGCCQSKEN

SEQ ID NO: 65331 - protein, 123 aa, Homo sapiens
QGPAASSQSALMPPAPTTRWCSQPPTGLDPSPLHLHARLALLRHMAEQKMFPVICWTSPKEQADVLIKRSAYKIGQDQAPLATCLSPPAPAVCGGTWQLDHSQEKGTISPASNMQKLRPGEIK

SEQ ID NO: 65332 - protein, 50 aa, Homo sapiens
MEKLYSENEGMASNQGKMENEEQPQDERKPEVTCTLEDKKLENEGKTENK

SEQ ID NO: 65333 - protein, 65 aa, Homo sapiens
MPKYCRAPNCSNTAGRLGADNRPVSFYKVSGGPEAPRSQSRRRLPYRRIHPCPRALPSQSLAQCA

SEQ ID NO: 65334 - protein, 1117 aa, Homo sapiens
MDSKDESSHVWPTSAEHEQNAAQVHFVPDTGTVAQIVYTDDQVRPPQQVVYTADGASYTSVDGPEHTLVYIHPVEAAQTLFTDPGQVAYVQQDATAQQTPLGRLEAKEEEDEDEDEDTEEDEEEDGEDTDLDDWEPDPPRPFDPHDLWCEECNNAHASVCPKHGPLHPIPNRPVLTRARASLPLVLYIDRFLGGVFSKRRIPKRTQFGPVEGPLVRGSELKDCYIHLKVSLDKGDRKERDLHEDLWFELSDETLCNWMMFVRPAQNHLEQNLVAYQYGHHVYYTTIKNVEPKQELKVWYAASYAEFVNQKIHDISEEERKVLREQEKNWPCYECNRRFISSEQLQQHLNSHDEKLDVFSRTRGRGRGRGKRRFGPGRRPGRPPKFIRLEITSENGEKSDDGTQDLLHFPTKEQFDEAEPATLNGLDQPEQTTIPIPQLPQETQSSLEHEPETHTLHLQPQHEESVVPTQSTLTADDMRRAKRIRNAALQHLFIRKSFRPFKCLQCGKAFREKDKLDQHLRFHGREGNCPLTCDLCNKGFISSTSLESHMKLHSDQKTYSCIFCPESFDRLDLLKDHVAIHINDGYFTCPTCKKRFPDFIQVKKHVRSFHSEKIYQCTECDKAFCRPDKLRLHMLRHSDRKDFLCSTCGKQFKRKDKLREHMQRMHNPEREAKKADRISRSKTFKPRITSTDYDSFTFKCRLCMMGFRRRGMLVNHLSKRHPDMKIEEVPELTLPIIKPNRDYFCQYCDKVYKSASKRKAHILKNHPGAELPPSIRKLRPAGPGEPDPMLSTHTQLTGTIATPPVCCPHCSKQYSSKTKMVQHIRKKHPEFAQLSNTIHTPLTTAVISATPAVLTTDSATGETVVTTDLLTQAMTELSQTLTTDYRTPQGDYQRIQYIPVSQSASGLQQPQHIQLQVVQVASATSPHQSQQSTVDVGQLHDPQPYPQHAIQVQHIQVSGQPLSPSAQQAQQGLSPSHIQGSSSTQGQALQQQQQQQQNSSVQHTYLPSAWNSFRGYSSEIQMMTLPPGQFVITDSGVATPVTTGQVKAVTSGHYVLSESQSELEEKQTSALSGGVQVEPPAHSDSLDPQTNSQQQTTQYIITTTTNGNGSSEVHITKP

SEQ ID NO: 65335 - protein, 198 aa, Homo sapiens
MLTRIDNSFAEPSRSNGSMVRHSSSPYVVYPSDKPFLNSDLRRSPSKPTLAYPESNSRAIFSALKNLQDKIRRLELERIQAEESVKTLSRETIEYKKVLDEQIQERENSKNEESKHNQELTSQLLAAENKCNLLEKQLEYMRNMIKHAEMERTSVLEKQVSLERERQHDQTHVQSQLEKLDLLEQEYNKLTTMQALAE

SEQ ID NO: 65336 - protein, 343 aa, Homo sapiens
MSSESSKKRKPKVIRSDGAPAEGKRNRSDTEQEGKYYSEEAEVDLRDPGRDYELYKYTCQELQRLMAEIQDLKSRGGKDVAIEIEERRIQSCVHFMTLKKLNRLAHIRLKKGRDQTHEAKQKVDAYHLQLQNLLYEVMHLQKEITKCLEFKSKHEEIDLVSLEEFYKEAPPDISKAEVTMGDPHQQTLARLDWELEQRKRLAEKYRECLSNKEKILKEIEVKKEYLSSLQPRLNSIMQASLPVQEYLFMPFDQAHKQYETARHLPPPLYVLFVQATAYGQACAHMKSSQPPRQDKTLSVAIEGSVDEAKALFKPPEDSQDDESDSDAEEEQTTVPSSLEAEEV

SEQ ID NO: 65337 - protein, 114 aa, Homo sapiens
AMMLSDRLTFLGKYREFHRMYGEKRFADAASLLLSLMTSRIAPRSFWMTLLTDALPLLEQKQVIFSAEQTYELMRCLEDLTSRRPVHGESDTEQLQYGPLVLLSFTSIICWKLL

SEQ ID NO: 65338 - protein, 50 aa, Homo sapiens
MPVEEFVAGWISGETFFFLLSHHTQCSAWPAGSRACSGSRRRHYELKKEE

SEQ ID NO: 65339 - protein, 307 aa, Homo sapiens
MRGQRSLLLGPARLCLRLLLLLGYRRRCPPLLRGLVQRWRYGKVCLRSLLYNSFGGSDTAVDAAFEPVYWLVDNVIRWFGVVFVVLVIVLTGSIVAIAYLCVLPLILRTYSVPRLCWHFFYSHWNLILIVFHYYQAITTPPGYPPQGRNDIATVSICKKCIYPKPARTHHCSICNRCVLKMDHHCHILPPALSKLPTSLRPSFLSSVALALGALTVWHAVLISRGETSIERHINKKERRRLQAKGRVFRNPYNYGCLDNWKVFLGVDTGRHWLTRVLLPSSHLPHGNGMSWEPPPWVTAHSASVMAV

SEQ ID NO: 65340 - protein, 13 aa, Homo sapiens
  MOD_RES (1)..(1): Any amino acid
XFTFGPGTKVDIK

SEQ ID NO: 65341 - protein, 110 aa, Homo sapiens
MAWIKRKFGERPPPKRLTREAMRNYLKERGDQTVLILHAKVAQKSYGNEKRFFCPPPCVYLMGSGWKKKKEQMERDGCSEQESQPCAFIGIGNSDQEMQQLNLEGKNYCT

SEQ ID NO: 65342 - protein, 66 aa, Homo sapiens
MNMFKEAVTFKDVAVAFTEEELGLLGPAQRKLYRDVMVENFRNLLSVGHPPFKQDVSPIERNEQLW

SEQ ID NO: 65343 - protein, 160 aa, Homo sapiens
MEMGAAKVWGEVGRWLVIALVQLAKAVLRMLLLLWFKAGLQTSPPIVPLDRETQAQPPDGDHSPGNHEQSYVGKRSNRVVRTLQNTPSLHSRHWGAPQQREGRQQQHHEELSATPTPLGLQETIAEFLYIARPLLHLLSLGLWGQRSWKPWLLAGVVDVT

SEQ ID NO: 65344 - protein, 1222 aa, Homo sapiens
MASAAEPPGQAAEYLQELTRIVAAQQELLARRRRRIEELERQVARLSRENAGLLERHRRHLAACARRPDPGPGPGPQPLGAIPELGGRRDKSEGESSRSVRSSLDTGSSLSTDRYSVEGEAPSSETGTSLDSPSAYPQGPLVPGSSLSPDHYEHTSVGAYGLYSGPPGQQQRTRRPKLQHSTSILRKQAEEEAIKRSRSLSESYELSSDLQDKQVEMLERKYGGRLVTRHAARTIQTAFRQYQMNKNFERLRSSMSENRMSRRIVLSNMRMQFSFEGPEKVHSSYFEGKQVSVTNDGSQLGALVSPECGDLSEPTTLKSPAPSSDFADAITELEDAFSRQVKSLAESIDDALNCRSLHTEEAPALDAARARDTEPQTALHGMDHRKLDEMTASYSDVTLYIDEEELSPPLPLSQAGDRPSSTESDLRLRAGGAAPDYWALAHKEDKADTDTSCRSTPSLERQEQRLRVEHLPLLTIEPPSDSSVDLSDRSERGSLKRQSAYERSLGGQQGSPKHGPHSGAPKSLPREEPELRPRPPRPLDSHLAINGSANRQSKSESDYSDGDNDSINSTSNSNDTINCSSESSSRDSLREQTLSKQTYHKEARNSWDSPAFSNDVIRKRHYRIGLNLFNKKPEKGVQYLIERGFVPDTPVGVAHFLLQRKGLSRQMIGEFLGNRQKQFNRDVLDCVVDEMDFSTMELDEALRKFQAHIRVQGEAQKVERLIEAFSQRYCICNPGVVRQFRNPDTIFILAFAIILLNTDMYSPNVKPERKMKLEDFIKNLRGVDDGEDIPREMLMGIYERIRKRELKTNEDHVSQVQKVEKLIVGKKPIGSLHPGLGCVLSLPHRRLVCYCRLFEVPDPNKPQKLGLHQREIFLFNDLLVVTKIFQKKKNSVTYSFRQSFSLYGMQVLLFENQYYPNGIRLTSSVPGADIKVLINFNAPNPQDRKKFTDDLRESIAEVQEMEKHRIESELEKQKGVVRPSMSQCSSLKKESGNGTLSRACLDDSYASGEGLKRSALSSSLRDLSEAGKRGRRSSAGSLESNVEGSIISSPHMRRRATSTRECPSRPHQTMPNSSSLLGSLFGSKRGKPPPQAHLPSAPALPPPHPPVVLPHLQHSVAGHHLGPPEGLPQAAMHGHHTQYCHMQNPPPYHHHHHHHPPQHIQHAHQYHHGPHGGHPAYGAHAHGHPPLPSAHVGHTVHHHGQPPAPPPPTSSKAKPSGISTIV

SEQ ID NO: 65345 - protein, 78 aa, Homo sapiens
AAMQRLKAANIPEHNTIGFMFACVGRGFQYYRAKGNVEADAFRKFFPSVPLFGFFGNGEIGCDRIVTGNFILRKCNEV

SEQ ID NO: 65346 - protein, 204 aa, Homo sapiens
MANVPWAEVCEKFQAALALSRVELHKNPEKEPYKSKYSARALLEEVKALLGPAPEDEDERPEAEDGPGAGDHALGLPAEVVEPEGPVAQRAVRLAVIEFHLGVNHIDTEELSAGEEHLVKCLRLLRRYRLSHDCISLCIQAQNNLGILWSEREEIETAQAYLESSEALYNQYMKEVGSPPLDPTERFLPEEEKLTEQERSKRTT

SEQ ID NO: 65347 - protein, 73 aa, Homo sapiens
  MOD_RES (1)..(1): Any amino acid
XLTMPSPMPEYLNVHYIGESASRLLFLSMHWALSIPSFQALGSSKPRKHGTDREISGKGLCGIPRLYNQNISR

SEQ ID NO: 65348 - protein, 160 aa, Homo sapiens
MEPLTFRDVAIEFSPEEWKCLDPAQQNLYRDVMLENYRNLVSLAMCSHFTQDFLPVQGIEDSFHKLILRRYEKCGHDNLQLRKGCKSMNVCKVQKGVYNGINKCLSNTQSKIFQCNARVKVFSKFANSNKDKTRHTGEKHFKCNECGKSFQKFSDLTQHK

SEQ ID NO: 65349 - protein, 117 aa, Homo sapiens
  MOD_RES (1)..(1): Any amino acid
XGYDNVDIKAAGELGIAVCNIPSAAVEETADSTICHILNLYRRNTWLYQALREGTRVQSVEQIREVASGAARIRGETLGLIGFGWDRAVPGRAEGLHPAGFAVSERLRLLALQSQRT

SEQ ID NO: 65350 - protein, 21 aa, Homo sapiens
MYMVMEYCVCGMQEMLDSVPE

SEQ ID NO: 65351 - protein, 91 aa, Homo sapiens
ELQAWLREHRPENGEEAVTMLEELEKELEEPRQQDTTHGQEMFWQEMTSTGALKSLSLNSPVQPLENQCKTETQESQAFQERGEKPQSMWG

SEQ ID NO: 65352 - protein, 859 aa, Homo sapiens
MSEFRIHHDVNELLSLLRVHGGDGAEVYIDLLQKNRTPYVTTTVSAHSAKVKIAEFSRTPEDFLKKYDELKSKNTRNLDPLVYLLSKLTEDKETLQYLQQNAKERAELAAAAVGSSTTSINVPAAASKISMQELEELRKQLGSVATGSTLQQSLELKRKMLRDKQNKKNSGQHLPIFPAWVYERPALIGDFLIGAGISTDTALPIGTLPLASQESAVVEDLLYVLVGVDGRYVSAQPLAGRQSRTFLVDPNLDLSIRELVHRILPVAASYSAVTRFIEEKSSFEYGQVNHALAAAMRTLVKEHLILVSQLEQLHRQGLLSLQKLWFYIQPAMRTMDILASLATSVDKGECLGGSTLSLLHDRSFSYTGDSQAQELCLYLTKAASAPYFEVLEKWIYRGIIHDPYSEFMVEEHELRKERIQEDYNDKYWDQRYTIVQQQIPSFLQKMADKILSTGKYLNVVRECGHDVTCPVAKEIIYTLKERAYVEQIEKAFNYASKVLLDFLMEEKELVAHLRSIKRYFLMDQGDFFVHFMDLAEEELRKPVEDITPPRLEALLELALRMSTANTDPFKDDLKIDLMPHDLITQLLRVLAIETKQEKAMAHADPTELALSGLEAFSFDYIVKWPLSLIINRFAGAFTLRQRMLNFVQNIQYYMMFEVMEPTWHILEKNLKSASNIDDVLGHHTGFLDTCLKDCMLTNPELLKVFSKLMSVCVMFTNCMQKFTQSMKLDGELGGQTLEHSTVLGLPAGAEERARKELARKHLAEHADTVQLVSGFEATINKFDKNFSAHLLDLLARLSIYSTSDCEHGMASVISRLDFNGFYTERLERLSAERSQKATPQVPVLRGPPAPAPRVAVTAQ

SEQ ID NO: 65353 - protein, 605 aa, Homo sapiens
MHTGGETSACKPSSVRLAPSFSFHAAGLQMAGQMPHSHQYSDRRQPNISDQQVSALSYSDQIQQPLTNQVMPDIVMLQRRMPQTFRDPATAPLRKLSVDLIKTYKHINEVYYAKKKRRHQQGQGDDSSHKKERKVYNDGYDDDNYDYIVKNGEKWMDRYEIDSLIGKGSFGQVVKAYDRVEQEWVAIKIIKNKKAFLNQAQIEVRLLELMNKHDTEMKYYIVHLKRHFMFRNHLCLVFEMLSYNLYDLLRNTNFRGVSLNLTRKFAQQMCTALLFLATPELSIIHCDLKPENILLCNPKRSAIKIVDFGSSCQLGQRIYQYIQSRFYRSPEVLLGMPYDLAIDMWSLGCILVEMHTGEPLFSGANEVDQMNKIVEVLGIPPAHILDQAPKARKFFEKLPDGTWNLKKTKDGKREYKPPGTRKLHNILGVETGGPGGRRAGESGHTVADYLKFKDLILRMLDYDPKTRIQPYYALQHSFFKKTADEGTNTSNSVSTSPAMEQSQSSGTTSSTSSSSGGSSGTSNSGRARSDPTHQHRHSGGHFTAAVQAMDCETHSPQVRQQFPAPLGWSGTEAPTQVTVETHPVQETTFHVAPQQNALHHHHGNS

SEQ ID NO: 65354 - protein, 178 aa, Homo sapiens
MAGSDTAPFLSQADDPDDGPVPGTPGLPGSTGNPKSEEPEVPDQEGLQRITGLSPGRSALIVAVLCYINLLNYMDRFTVAGVLPDIEQFFNIGDSSSGLIQTVFISSYMVLAPVFGYLGDRYNRKYLMCGGIAFWSLVTLGSSFIPGEHFWLLLLTRGLVGVGEASYSTIAPTLIADL

SEQ ID NO: 65355 - protein, 170 aa, Homo sapiens
MASSNTVLMRLVASAYSIAQKAGMIVRRVIAEGDLGIVEKTCATDLQTKADRLAQMSICSSLARKFPKLTIIGEELVVWVDPLDGTKEYTEGLLDNVTVLIGIAYEGKAIAGVINQPYYNYEAGPDAVLGRTIWGVLGLGAFGFQLKEVPAGKHIITTTRSHSNKLVTDC

SEQ ID NO: 65356 - protein, 147 aa, Homo sapiens
MRCCHICKLPGRVMGIRVLRLSLVVILVLLLVAGALTALLPSVKEDKMLMLRREIKSQGKSTMDSFTLIMQTYNRTDLLLKLLNHYQAVPNLHKVIVVWNNIGEKAPDELWNSLGPHPIPVIFKQQTANRMRNRLQVFPELETNAIS

SEQ ID NO: 65357 - protein, 298 aa, Homo sapiens
MGLSTVPDLLLPLVLLELLVGIYPSGVIGLVPHLGDREKRDSVCPQGKYIHPQNNSICCTKCHKGTYLYNDCPGPGQDTDCRECESGSFTASENHLRHCLSCSKCRKEMGQVEISSCTVDRDTVCGCRKNQYRHYWSENLFQCFNCSLCLNGTVHLSCQEKQNTVCTCHAGFFLRENECVSCSNCKKSLECTKLCLPQIENVKGTEDSGTTVLLPLVIFFGLCLLSLLFIGLMYRYQRWKSKLYSIGEWGLWEGEGAGGGEGGHGWVRWTCVEGGEECPLSSYRWGLWAEGGPGWLGR

SEQ ID NO: 65358 - protein, 181 aa, Homo sapiens
MATAPYNYSYIFKYIIIGDMGVGKSCLLHQFTEKKFMADCPHTIGVEFGTRIIEVSGQKIKLQIWDTAGQERFRAVTRSYYRGAAGALMVYDITRRSTYNHLSSWLTDARNLTNPNTVIILIGNKADLEAQRDVTYEEAKQFAEENGLLFLEASAKTGENVEDAFLEAAKKIYQNIQDGSL

SEQ ID NO: 65359 - protein, 104 aa, Homo sapiens
MYDRYRDMRDSRDPMYRREGSYDRYLRMDDYCRRKDDSYFDRYRDSFDGRGPPGPESQSRAKERLKREERRREELYRQYFEEIQRRFDAERPVDCSVIVVNKQT

SEQ ID NO: 65360 - protein, 136 aa, Homo sapiens
QSELESCKELQELEPENKWCLLTIILLMRALDPLLYEKETLQYFQTLKAVDPMRATYLDDLRSKFLLENSVLKMEYAEVRVLHLAHKDLTVLCHLEQLLLVTHLDLSHNRLRTLPPALAALRCLEDPPPRTGAAGQ

SEQ ID NO: 65361 - protein, 170 aa, Homo sapiens
MDPLAPLNPLIRGPRTPGLRRWIQSLALLLPNCSSSRIPTVPRPHSGLWVQSDFPLGFLSRTEPRLTRSCRGAFRSPRPLPKSGQADGTSEESLHLDIQKLKEKRDMLDKEISQFVSEGYSVDELEDHITQLHEYNDIKDVGQMLMGKLAVIRGVTTKELYPEFGLDMND

SEQ ID NO: 65362 - protein, 130 aa, Homo sapiens
EVWPQVEPVGDLGLGWPDVYHHHLHPSRQTGMGLVGIFSRIGGILTPLVILLGEYHAALPMLIYGSLPIVAGLLCTLLPETHGQGLKDTLQDLELGPHPRSPKSVPSEKETEAKGRTSSPGVAFVSSTYF

SEQ ID NO: 65363 - protein, 150 aa, Homo sapiens
IKGRCSREKCKYFHPPAHLQARLKAAHHQMNHSAASAMALQPGTLQLIPKRSALEKPNGATPVFNPTVFHCQQALTNLQLPQPAFIPAGPILCMAPASNIVPMMHGATPTTVSAATTPATSVPFAAPTTGNQIPQLSIDELNSSMFVSQM

SEQ ID NO: 65364 - protein, 694 aa, Homo sapiens
MTHEEHHAAKTLGIGKAIAVLTSGGDAQGMNAAVRAVVRVGIFTGARVFFVHEGYQGLVDGGDHIKEATWESVSMMLQLGGTVIGSARCKDFREREGRLRAAYNLVKRGITNLCVIGGDGSLTGADTFRSEWSDLLSDLQKAGKITDEEATKSSYLNIVGLVGSIDNDFCGTDMTIGTDSALHRIMEIVDAITTTAQSHQRTFVLEVMGRHCGYLALVTSLSCGADWVFIPECPPDDDWEEHLCRRLSETRTRGSRLNIIIVAEGAIDKNGKPITSEDIKNGSRMGVEAVMALLEGTPDTPACVVSLSGNQAVRLPLMECVQVTKDVTKAMDEKKFDEALKLRGRSFMNNWEVYKLLAHVRPPVSKSGSHTVAVMNVGAPAAGMNAAVRSTVRIGLIQGNRVLVVHDGFEGLAKGQIEEAGWSYVGGWTGQGGSKLGTKRTLPKKSFEQISANITKFNIQGLVIIGGFEAYTGGLELMEGRKQFDELCIPFVVIPATVSNNVPGSDFSVGADTALNTICTANVEHLVQKMKTTVKRGLVLRNEKCNENYTTDFIFNLYSEEGKGIFDSRKNVLGHMQQGGSPTPFDRNFATKMGAKAMNWMSGKIKESYRNGRIFANTPDSGCVLGMRKRALVFQPVAELKDQTDFEHRIPKEQWWLKLRPILKILAKYEIDLDTSDHAHLEHITRKRSGEAAV

SEQ ID NO: 65365 - protein, 76 aa, Homo sapiens
MASKGAGMSFSRKSYRLTSDAEKSRVTGIVQEKLLNDYLNRIFSSSEHAPPAATSRKPLNFQNLPEHLDQLLQVDN

SEQ ID NO: 65366 - protein, 321 aa, Homo sapiens
VSLQELMQPESGANGTVIAEFILLGLLEAPGLQPVVFVLFLFAYLVTVRGNLSILAAVLVEPKLHTPMYFFLGNLSVLDVGCISVTVPSMLSRLLSRKRAVPCGACLTQLFFFHLFVGVDCFLLTAMAYDRFLAICRPLTYSTRMSQTVQRMLVAASWACAFTNALTHTVAMSTLNFCGPNVINHFYCDLPQLFQLSCSSTQLNELLLFAVGFIMAGTPMALIVISYIHVAAAVLRIRSVEGRKKAFSTCGSHLTVVAIFYGSGIFNYMRLGSTKLSDKDKAVGIFNTVINPMLNPIIYSFRNPDVQSAIWRMLTGRRSLA

SEQ ID NO: 65367 - protein, 72 aa, Homo sapiens
  MOD_RES (1)..(1): Any amino acid
XEGSTISCVVERTRGALDYVHVFYTISQIETDGINYLVDDFANASGTITFLPWQRSELLIEVSLPIIIYNCN

SEQ ID NO: 65368 - protein, 87 aa, Homo sapiens
MAQEKMKLGFKSLPSSTTADGNILRRVNSAPLINGLGFNSQVLQADMLRIRTNRTTFRNRRSLLLPPPPFHGSISRLHQIKQVPWGT

SEQ ID NO: 65369 - protein, 116 aa, Homo sapiens
  MOD_RES (1)..(1): Any amino acid
XWSKWAPPLERSRLATTAFCGSYAGAVVAMPLAGVLVQYSGWSSVFYVYGSFGIFWYLFWLLVSYESPALHPSISEEERKYIEDAIGESAKLMNPLTNYTVVPEGTRRSPQPRSPS

SEQ ID NO: 65370 - protein, 383 aa, Homo sapiens
MAQVDSQDRPGSNWDLPTQETHTPAQASATPASLAAAVLAKARNSRKVQNQAGRREGGEAEARPYRCLRGGRAFQKPSKPLSPAETRGGAAKRYACELCGKAYSHRGTLQQHRRLHTGERPYQCSFCDKAYTWSSDHRKHIRTHTGEKPYPCPDCGKAFVRSSDLRKHQRNMHSNNKPFPCSECGLTFNKPLSLLRHQRTHLGAKPFRCPACDREFAVASRMVEHQRVHSGERPFPCPTCGKCFTKSSNLSEHQTLHTGQRPFKCADCGVAFAQPSRLVRHQRIHTGERPFPCTQCGQAFARSSTLKRHQQIHSGEKGFLCAECGRAFRIASELAQHIRMHNGERPYQCEDCGQAFTRSNHLQRHRAKHGTCKKEPIPSSSDE

SEQ ID NO: 65371 - protein, 112 aa, Homo sapiens
  MOD_RES (1)..(1): Any amino acid
XVEMNRLPGGNEVGMVAFKMRFKTQEYPEGRDVIVIGNDITFRIGSFGPGEDLLYLRASEMARAEGIPKIYVAANSGARIGMAEEIKHMFHVAWVDPEDPHKIHDHGYHREG

SEQ ID NO: 65372 - protein, 108 aa, Homo sapiens
MSMLKPSGLKAPTKILKPGSTALKTPTAVVAPVEKTISSEKASSTPSSETQEEFVDDFRVGERVWVNGNKPGFIQFLGETQFAPGQWAGIVLDEPIGKNDGSVAGVRY

SEQ ID NO: 65373 - protein, 696 aa, Homo sapiens
MHFDPGFEEQLFWGSQQAMNSGKTKSHFQLDPESQCSFGSFVSFRPDQGITLGSPQRHDARAPPPLACGPSESTLKEGIPGPRNLDLPGLWDVPAWESTQHPWPVCGESCWENNHLVMHQRGHSKDRTRRAWEKFNKRAETQMPWSSPRVQRHFRCGVCGKSFRRKLCLLRHLAAHTGRGPFRNADGEMCFRHELTHPSHRLPQQGEKPAQCTPCGKRSLPVDSTQARRCQHSREGPASWREGRGASSSVHSGQKPGSRLPQEGNSHQEGDTEALQHGAEGPCSCSECGERSPMSARLASPCRAHTGEKPFQCAHCTKRFRLRRLLQVHQHAHGGERPFSCRKCGKGFAKQCKLTEHIRVHSGEKPFRCAKCGRNFRQRGQLLRHQRLHTDEKPFQCPECGLSFRLESMLRAHRLRHGGERPFSCSECGRGFTHQCKLREHLRVHSGERPFQCLKCDKRFRLKGILKAHQHTHSKERPFSCGECGKGFTRQSKLTEHLRVHSGERPFQCPECNRSFRLKGQLLSHQRLHTGERPFQCPECDKRYRVKADMKAHQLLHSGEMPFSCECGKGFVKHSKLIEHIRTHTGEKPFQCPKCDKSFRLKAQLLSHQGLHTGERPFHCPECDKNFRERGHMLRHQRIHRPERPFACGDCGKGFIYKSKLAEHIRVHTKSCPAPNELDIKKRLSQLFAMIEADWS

SEQ ID NO: 65374 - protein, 134 aa, Homo sapiens
  MOD_RES (1)..(1): Any amino acid
XEDLQQEDGPTGEPQQEDDEFLMATDVDDRFETLEPEVSHEETEHSYHVEETVSQDCNQDMEEMMSEQENPDSSEPVVEDERLHHDTDDVTYQVYEEQEVTAPPEDNPVEDSQVIVEEVSIFPVEEQQEVPPDT

SEQ ID NO: 65375 - protein, 207 aa, Homo sapiens
MAEQRFCVDYAKRGTAGCKKCKEKIVKGVCRIGKVVPNPFSESGGDMKEWYHIKCMFEKLERARATTKKIEDLTELEGWEELEDNEKEQITQHIADLSSKAAGTPKKKAVVQAKLTTTGQVTSPVKGASFVTSTNPRKFSGFSAKPNNSGEAPSSPTPKRSLSSSKCDPRHKDCLLREFRKLCAMVADNPSYNTKTQIIQDFLRKGS

SEQ ID NO: 65376 - protein, 129 aa, Homo sapiens
MVLNVEREKNMILEQQAQLQREKEQDQMKLYAKLEKLDVLEKECFRLTTTQKTAEDKIKHLEEKLKEEEHQRKLFQDKASELQTGLEISKIIMSSVSNLKHSKEKKKSSKDKCVREQLLGHVISTFLVL

SEQ ID NO: 65377 - protein, 36 aa, Homo sapiens
  MOD_RES (1)..(1): Any amino acid
XLGLEQLFQELAGEEEELNASQLQALLSIALEPGHI

SEQ ID NO: 65378 - protein, 355 aa, Homo sapiens
RDENGSLYPGVTAIDMMYKEGLHGVDNGILIFDKVRIPRENLLDKFGSVAPDGQYHSPIRNKSARFNAMLAALTPSRLAVAFQAMGAMKLGLTIAIRYSHSRRQFGPKTKEEVKIIEHQTQTLRLMPHLATALALTFVSRYAGALLDEDVFQGKELVNSRSLQALVAGLKAYSTWENIRCLQDCRECTGGMVVGRELLAQYTKQYEEKPLFGLLQNWAESVGDKLRTSFLAFNMDTVDDLAFLLKAVKFRERVLQRGLVARIYYKVKTKKEDFFHAWNSCLHHVASLSLAHTHRVTLEQFSLAVKSCPDQEDQTLLMKFCLLYGTKLVFQERAWYLEHKYLTPMASTRIRNQERC

SEQ ID NO: 65379 - protein, 96 aa, Homo sapiens
MLRGVLGKTFRLVGYTIQYGCIAHCAFEYVGGVVMCSGPSMEPTIQNSDIVFAENLSRHFYGIQRGDIVIAKSPSDPKSNICKRVIGLEGDKILTT

SEQ ID NO: 65380 - protein, 318 aa, Homo sapiens
MEKTLETVPLERKKREKEQFRKLFIGGLSFETTEESLRNYYEQWGKLTDCVVMRDPASKRSRGFGFVTFSSMAEVDAAMAARPHSIDGRVVEPKRAVAREESGKPGAHVTVKKLFVGGIKEDTEEHHLRDYFEEYGKIDTIEIITDRQSGKKRGFGFVTFDDHDPVDKIVLQKYHTINGHNAEVRKALSRQEMQEVQSSRSGRGGNFGFGDSRGGGGNFGPGPGSNFRGGSGGYGGGGPGYGNQGGGYGGGYDNYGGGNYGSGNYNDFGNYNQQPSNYGPMKSGNFGGSRNMGGPYGGGNYGPGGSGGSGGYGGRSRY

SEQ ID NO: 65381 - protein, 988 aa, Homo sapiens
MVKLDIHTLAHHLKQERLYVNSEKQLIQRLNADVLKTAEKLYRTAWIAKQQRINLDRLIITSAEASPAECCQHAKILEDTQFVDGYKQLGFQETAYGEFLSRLRENPRLIASSLVAGEKLNQENTQSVIYTVFTSLYGNCIMQEDESYLLQVLRYLIEFELKESDNPRRLLRRGTCAFSILFKLFSEGLFSAKLFLTATLHEPIMQLLVEDEDHLETDPNKLIERFSPSQQEKLFGEKGSDRFRQKVQEMVESNEAKLVALVNKFIGYLKQNTYCFPHSLRWIVSQMYKTLSCVDRLEVGEVRAMCTDLLLACFICPAVVNPEQYGIISDAPINEVARFNLMQVGRLLQQLAMTGSEEGDPRTKSSLGKFDKSCVAAFLDVVIGGRAVETPPLSSVNLLEGLSRTVVYITYSQLITLVNFMKSVMSGDQLREDRMALDNLLANLPPAKPGKSSSLEMTPYNTPQLSPATTPANKKNRLPIATRSRSRTNMLMDLHMDHEGSSQETIQEVQPEEVLVISLGTGPQLTPGMMSENEVLNMQLSDGGQGDVPVDENKLHGKPDKTLRFSLCSDNLEGISEGPSNRSNSVSSLDLEGESVSELGAGPSGSNGVEALQLLEHEQATTQDNLDDKLRKFEIRDMMGLTDDRDISETVSETWSTDVLGSDFDPNIDEDRLQEIAGAAAENMLGSLLCLPGSGSVLLDPCTGSTISETTSEAWSVEVLPSDSEAPDLKQEERLQELESCSGLGSTSDDTDVREVSSRPSTPGLSVVSGISATSEDIPNKIEDLRSECSSDFGGKDSVTSPDMDEITHGAHQLTSPPSQSESLLAMFDPLSSHEGASAVVRPKVHYARPSHPPPDPPILEGAVGGNEARLPNFGSHVLTPAEMEAFKQRHSYPERLVRSRSSDIVSSVRRPMSDPSWNRRPGNEERELPPAAAIGATSLVAAPHSSSSSPSKDSSRGETEERKDSDDEKSDRNRPWWRKRFVSAMPK

SEQ ID NO: 65382 - protein, 147 aa, Homo sapiens
  MOD_RES (1)..(1): Any amino acid
XAAGLLAARGLMAGGRPEGQYSEDEDTDTDEYKEAKASINPVTGRVEEKPPNPMEGMTEEQKEHEAMKLVTMFDKLSRMPCARLWSSSSPRTLTRTLTEDGSSSAPPSGLVLLPETSLGLQPGEATSHWIHTRPHFSILETPSLDSR

SEQ ID NO: 65383 - protein, 746 aa, Homo sapiens
  MOD_RES (1)..(1): Any amino acid
XRSKGCDCCGEKSQPQEKSLIGLKNTENNDVEISETKKADVQAPVSPSETSQANPYSEGQFLDEHHSVNFHLGLKEDNDTINDSLIVSETKSKENTMQESLPSGIVNFREEICDMDSSEAMSLESQESPNENFKTVGPCLGDSKNVSQESLETKEEKPEETPKMELSLENVTVEGNACKVTESNLEKAKTMELNVGNEASFHGQERTKTGISEEAAIEENKRNDDSEADTAKLNAKEVATEEFNSDISLSDNTTPVKLNAQTEISEQTAAGELDGGNDVSDLHSSEETNTKMKNNEEMMIGEAMAETGHDGETENEGITTKTSKPDEAETNMLTAEMDNFVCDTVEMSTEEGIIDANKTETNTEYSKSEEKLDNNQMVMESDILQEDHHTSQKVEEPSQCLASGTAISELIIEDNNASPQKLRELDPSLVSANDSPSGMQTRCVWSPLASPSTSILKRGLKRSQEDEISSPVNKVRRVSFADPIYQAGLADDIDRRCSIVRSHSSNSSPIGKSVKTSPTTQSKHNTTSAKGFLSPGSRSPKFKSSKKCLISEMAKESIPCPTESVYPPLVNCVAPVDIILPQITSNMWARGLGQLIRAKNIKTIGDLSTLTASEIKTLPIRSPKVSNVKKALRIYHEQQVKTRGLEEIPVFDISEKTVNGIENKSLSPDEERLVSDIIDPVALEIPLSKNLLAQISALALQLDSEDLHNYSGSQLFEMHEKLSCMANSVIKNLQSRWRSPSHENSI

SEQ ID NO: 65384 - protein, 3758 aa, Homo sapiens
MSEPGGGGGEDGSAGLEVSAVQNVADVSVLQKHLRKLVPLLLEDGGEAPAALEAALEEKSALEQMRKFLSDPQVHTVLVERSTLKEDVGDEGEEEKEFISYNINIDIHYGVKSNSLAFIKRTPVIDADKPVSSQLRVLTLSEDSPYETLHSFISNAVAPFFKSYIRESGKADRDGDKMAPSVEKKIAELEMGLLHLQQNIEIPEISLPIHPMITNVAKQCYERGEKPKVTDFGDKVEDPTFLNQLQSGVNRWIREIQKVTKLDRDPASGTALQEISFWLNLERALYRIQEKRESPEVLLTLDILKHGKRFHATVSFDTDTGLKQALETVNDYNPLMKDFPLNDLLSATELDKIRQALVAIFTHLRKIRNTKYPIQRALRLVEAISRDLSSQLLKVLGTRKLMHVAYEEFEKVMVACFEVFQTWDDEYEKLQVLLRDIVKRKREENLKMVWRINPAHRKLQARLDQMRKFRRQHEQLRAVIVRVLRPQVTAVAQQNQGEVPEPQDMKVAEVLFDAADANAIEEVNLAYENVKEVDGLDVSKEGTEAWEAAMKRYDERIDRVETRITARLRDQLGTAKNANEMFRIFSRFNALFVRPHIRGAIREYQTQLIQRVKDDIESLHDKFKVQYPQSQACKMSHVRDLPPVSGSIIWAKQIDRQLTAYMKRVEDVLGKGWENHVEGQKLKQDGDSFRMKLNTQEIFDDWARKVQQRNLGVSGRIFTIESTRVRGRTGNVLKLKVNFLPEIITLSKEVRNLKWLGFRVPLAIVNKAHQANQLYPFAISLIESVRTYERTCEKVEERNTISLLVAGLKKEVQALIAEGIALVWESYKLDPYVQRLAETVFNFQEKVDDLLIIEEKIDLEVRSLETCMYDHKTFSEILNRVQKAVDDLNLHSYSNLPIWVNKLDMEIERILGVRLQAGLRAWTQVLLGQAEDKAEVDMDTDAPQVSHKPGGEPKIKNVVHELRITNQVIYLNPPIEECRYKLYQEMFAWKMVVLSLPRIQSQRYQVGVHYELTEEEKFYRNALTRMPDGPVALEESYSAVMGIVSEVEQYVKVWLQYQCLWDMQAENIYNRLGEDLNKWQALLVQIRKARGTFDNAETKKEFGPVVIDYGKVQSKVNLKYDSWHKEVLSKFGQMLGSNMTEFHSQISKSRQELEQHSVDTASTSDAVTFITYVQSLKRKIKQFEKQVELYRNGQRLLEKQRFQFPPSWLYIDNIEGEWGAFNDIMRRKDSAIQQQVANLQMKIVQEDRAVESRTTDLLTDWEKTKPVTGNLRPEEALQALTIYEGKFGRLKDDREKCAKAKEALELTDTGLLSGSEERVQVALEELQDLKGVWSELSKVWEQIDQMKEQPWVSVQPRKLRQNLDALLNQLKSFPARLRQYASYEFVQRLLKGYMKINMLVIELKSEALKDRHWKQLMKRLHVNWVVSELTLGQIWDVDLQKNEAIVKDVLLVAQGEMALEEFLKQIREVWNTYELDLVNYQNKCRLIRGWDDLFNKVKEHINSVSAMKLSPYYKVFEEDALSWEDKLNRIMALFDVWIDVQRRWVYLEGIFTGSADIKHLLPVETQRFQSISTEFLALMKKVSKSPLVMDVLNIQGVQRSLERLADLLGKIQKALGEYLERERSSFPRFYFVGDEDLLEIIGNSKNVAKLQKHFKKMFAGVSSIILNEDNSVVLGISSREGEEVMFKTPVSITEHPKINEWLTLVEKEMRVTLAKLLAESVTEVEIFGKATSIDPNTYITWIDKYQAQLVVLSAQIAWSENVETALSSMGGGGDAAPLHSVLSNVEVTLNVLADSVLMEQPPLRRRKLEHLITELVHQRDVTRSLIKSKIDNAKSFEWLSQMRFYFDPKQTDVLQQLSIQMANAKFNYGFEYLGVQDKLVQTPLTDRCYLTMTQALEARLGGSPFGPAGTGKTESVKALGHQLGRFVLVFNCDETFDFQAMGRIFVGLCQVGAWGCFDEFNRLEERMLSAVSQQVQCIQEALREHSNPNYDKTSAPITCELLNKQVKVSPDMAIFITMNPGYAGRSNLPDNLKKLFRSLAMTKPDRQLIAQVMLYSQGFRTAEVLANKIVPFFKLCDEQLSSQSHYDFGLRALKSVLVSAGNVKRERIQKIKREKEERGEAVDEGEIAENLPEQEILIQSVCETMVPKLVAEDIPLLFSLLSDVFPGVQYHRGEMTALREELKKVCQEMYLTYGDGEEVGGMWVEKVLQLYQITQINHGLMMVGPSGSGKSMAWRVLLKALERLEGVEGVAHIIDPKAISKDHLYGTLDPNTREWTDGLFTHVLRKIIDSVRGELQKRQWIVFDGDVDPEWVENLNSVLDDNKLLTLPNGERLSLPPNVRIMFEVQDLKYATLATVSRCGMVWFSEDVLSTDMIFNNFLARLRSIPLDEGEDEAQRRRKGKEDEGEEAASPMLQIQRDAATIMQPYFTSNGLVTKALEHAFQLEHIMDLTRLRCLGSLFSMLHQACRNVAQYNANHPDFPMQIEQLERYIQRYLVYAILWSLSGDSRLKMRAELGEYIRRITTVPLPTAPNIPIIDYEVSISGEWSPWQAKVPQIEVETHKVAAPDVVVPTLDTVRHEALLYTWLAEHKPLVLCGPPGSGKTMTLFSALRALPDMEVVGLNFSSATTPELLLKTFDHYCEYRRTPNGVVLAPVQLGKWLVLFCDEINLPDMDKYGTQRVISFIRQMVEHGGFYRTSDQTWVKLERIQFVGACNPPTDPGRKPLSHRFLRHVPVVYVDYPGPASLTQIYGTFNRAMLRLIPSLRTYAEPLTAAMVEFYTMSQERFTQDTQPHYIYSPREMTRWVRGIFEALRPLETLPVEGLIRIWAHEALRLFQDRLVEDEERRWTDENIDTVALKHFPNIDREKAMSRPILYSNWLSKDYIPVDQEELRDYVKARLKVFYEEELDVPLVLFNEVLDHVLRIDRIFRQPQGHLLLIGVSGAGKTTLSRFVAWMNGLSVYQIKVHRKYTGEDFDEDLRTVLRRSGCKNEKIAFIMDESNVLDSGFLERMNTLLANGEVPGLFEGDEYATLMTQCKEGAQKEGLMLDSHEELYKWFTSQVIRNLHVVFTMNPSSEGLKDRAATSPALFNRCVLNWFGDWSTEALYQVGKEFTSKMDLEKPNYIVPDYMPVVYDKLPQPPSHREAIVNSCVFVHQTLHQANARLAKRGGRTMAITPRHYLDFINHYANLFHEKRSELEEQQMHLNVGLRKIKETVDQVEELRRDLRIKSQELEVKNAAANDKLKKMVKDQQEAEKKKVMSQEIQEQLHKQQEVIADKQMSVKEDLDKVEPAVIEAQNAVKSIKKQHLVEVRSMANPPAAVKLALESICLLLGESTTDWKQIRSIIMRENFIPTIVNFSAEEISDAIREKMKKNYMSNPSYNYEIVNRASLACGPMVKWAIAQLNYADMLKRVEPLRNELQKLEDDAKDNQQKANEVEQMIRDLEASIARYKEEYAVLISEAQAIKADLAAVEAKVNRSTALLKSLSAERERWEKTSETFKNQMSTIAGDCLLSAAFIAYAGYFDQQMRQNLFTTWSHHLQQANIQFRTDIARTEYLSNADERLRWQASSLPADDLCTENAIMLKRFNRYPLIIDPSGQATEFIMNEYKDRKITRTSFLDDAFRKNLESALRFGNPLLVQDVESYDPVLNPVLNREVRRTGGRVLITLGDQDIDLSPSFVIFLSTRDPTVEFPPDLCSRVTFVNFTVTRSSLQSQCLNEVLKAERPDVDEKRSDLLKLQAPFASAGKISTTSSERGERAHFG

SEQ ID NO: 65385 - protein, 143 aa, Homo sapiens
MRDAGDPSPPNKMLRRSDSPENKYSDSTGHSKAKNVHTHRVRERDGVTLHKKIHTTTVLFIVQIHILLIQAITQAKLQMHLMILQMTGLSILALLGKSTTTIVEQKFHNGKNQKSGLKENRDKKKQTRWQSTASQKIGITEER

SEQ ID NO: 65386 - protein, 335 aa, Homo sapiens; identical to SEQ ID NO: 45998

SEQ ID NO: 65387 - protein, 57 aa, Homo sapiens
MKGRIELGDVTPHNIKQLKRLNQVIFPVSYNDKFYKDVLEVGELAKLGAVCCRVDHS

SEQ ID NO: 65388 - protein, 98 aa, Homo sapiens
VFRDVLRAVEERDFPTETIKFGPERMYIDCWVKKHTYDTFKEVLGSGMQYHLQSNEFLRNVFELGPPVMLDAATLKTMKISRFERFSGLSGVFASQSS

SEQ ID NO: 65389 - protein, 224 aa, Homo sapiens
VRLRYFFYSSGEKKDEVYLNLVLDYVPETVYRVARHYSRAKQTLPVIYVKLYMYQLFRSLAYIHSFGICHRDIKPQNLLLDPDTAVLKLCDFGSAKQLVRGEPNVSYICSRYYRAPELIFGATDYTSSIDVWSAGCVLAELLLGQPIFPGDSGVDQLVEIIKVFRPRTPPEAIALCSRLLEYTPTARLTPLEACAHSFFDELRDPNVKLPNGRDTPALFNFTTQ

SEQ ID NO: 65390 - protein, 111 aa, Homo sapiens
YKVNILTRLAAELNKFMLEKVTEDTSSVLRSPMPGVVVAVSVKPGDAATSSLSVEICLFWTFQVAEGQEICVIEAMKMQNSMTAGKTGTVKSVHCQAGDTVGEGDLLVELE

SEQ ID NO: 65391 - protein, 65 aa, Homo sapiens
MSASVVSVISRFLEEYLSSTPQRLKLLDAYLLYILLTGALHLPENTDQPTEQSGFPRHLPRASLC

SEQ ID NO: 65392 - protein, 134 aa, Homo sapiens
MCFSFIMPPAMADILDIWAVDSQIASDGSIPVDFLLPTGIYIQLEVPREATISYIKQMLWKQVHNYPMFNLLMDIDSYMFACVNQTAVYEELEDETRRLCDVRPFLPVLKLVTRSCDPGEKLDSKIGVLIGKGS

SEQ ID NO: 65393 - protein, 107 aa, Homo sapiens
MLTCNKAGSRMVVDAANSNGPFQPVVLLHIRVEAVKLGRVSAELRLEVPDLQLWPPTEQQGEQTHGEPRGPQSMDGAASLLPCPSSSTPDLPAFSPALLPLLPTCQP

SEQ ID NO: 65394 - protein, 59 aa, Homo sapiens
KDELYLNLVLEYVPETVYRVARHFTKAKLTIPILYVKAHSPVPGIVPWVLQTFRRCLNE

SEQ ID NO: 65395 - protein, 770 aa, Homo sapiens
MIEDSGKRGNTMAERRQLFAEMRAQDLDRIRLSTYRTACKLRFVQKKCNLHLVDIWNVIEALRENALNNLDPNTELNVSRLEAVLSTIFYQLNKRMPTTHQIHVEQSISLLLNFLLAAFDPEGHGKISVFAVKMALATLCGGKIMDKLRYIFSMISDSSGVMVYGRYDQFLREVLKLPTAVFEGPSFGYTEQSARSCFSQQKKVTLNGFLDTLMSDPPPQCLVWLPLLHRLANVENVFHPVECSYCHSESMMGFRYRCQQCHNYQLCQDCFWRGHAGGSHSNQHQMKEYTSWKSPAKKLTNALSKSLSCASSREPLHPMFPDQPEKPLNLAHIVPPRPVTSMNDTLFSHSVPSSGSPFITRRLPEGISASSPVAEEHSLIKLYVNQLDHGARSPPKDSEVEQNKLLARAAPAFLKGKGIQYSLNVADRLADEHVLIGLYVNMLRNNPSCMLESSNRLDEEHRLIARYAARLAAESSSSQPPQQRSAPDISFTIDANKQQRQLIAELENKNREILQEIQRLRLEHEQASQPTPEKAQQNPTLLAELRLLRQRKDELEQRMSALQESRRELMVQLEGLMKLLKTQGAGSPRSSPSHTISRPIPMPIRSASACSTPTHTPQDSLTGVGGDVQEAFAQSSRRNLRNDLLVAADSITNTMSSLVKELNSEVGSETESNVDSEFARTQFEDLVPSPTSEKAFLAQIHARKPGYIHSGATTSTMRGDMVTEDADPYVQPEDENYENDSVRQLENELQMEEYLKQKLQDEAYQVSLQG

SEQ ID NO: 65396 - protein, 84 aa, Homo sapiens
LTPSYYRGAQGVILVYDVTRRDTFVKLDNWLNELETYCTRNDIVNMLVGNKIDKENREVDRNEGLKFARKHSMLFIGRGKCKNL

SEQ ID NO: 65397 - protein, 125 aa, Homo sapiens
  MOD_RES (1)..(1): Any amino acid
XEVKEEDETFIEELINNYDGKVHGEEEMIPGSVLISDAVFLELVDALNQYSDEEEEGHNDTSDGKQDDSKEDLPVTRKRKRHAIEGRSKGVCHAPQPPLQVLWSSPEKAPHSQCFLLQCLSLCCG

SEQ ID NO: 65398 - protein, 97 aa, Homo sapiens
MELENIRRRKQELLVEIQRLREELSEAMSEVEGLEANEGSKTLQRNRKMAMGRKKFNMDPKKGIQFLVENELLQNTPEEIARFLYKGEGLNKTAIGD

SEQ ID NO: 65399 - protein, 245 aa, Homo sapiens
GKAAAAVAFGAEVGVRLALFAAFLVTELLPPFQRLIQPEEMWLYRNPYVEAEYFPTKPMFKADTRDSRQACLAASLALALNGVFTNTIKLIVGRPRPDFFYRCFPDGLAHSDLMCTGDKDVVNEGRKSFPSGHSSFAFAGLAFASFYLAGKLHCFTPQGRGKSWRFCAFLSPLLFAAVIALSRTCDYKHHWQDVLVGSMIGMTFAYVCYRQYYPPLTDAECHKPFQDKLVLSTAQKPGDSYCFDI

SEQ ID NO: 65400 - protein, 53 aa, Homo sapiens
GAQHRCPGRTGAVQGLRFCGWSYKGSECEPMPHPTLPAEQRTVLQRQCHLHQQ

SEQ ID NO: 65401 - protein, 112 aa, Homo sapiens
MATNWGSLLQDKQQLEELARQAVDRALAEGVLLRTSQEPTSSEVVSYAPFTLFPSLVPSALLEQAYAVQMDFNLLVDAVSQNAAFLEQTLSSTIKQDDFTARLFDIHKQVLK

SEQ ID NO: 65402 - protein, 132 aa, Homo sapiens
MKETIMNQEKLAKLQAQVRIGGKGTARRKKKVVHRTATADDKKLQFSLKKLGVNNISGIEEVNMFTNQGTVIHFNNPKVQASLAANTFTITGHAETKQLTEMLPSILNQLGADSLTSLRRLAEALPKQLSGC

SEQ ID NO: 65403 - protein, 256 aa, Homo sapiens
MEWLLEDLLGAKGDMGLLWGQLTHALACRHCGSSCFQSPGNLELPLLHRVAFLDHLCKQKSEVEEEGEEEEEGEDEASLDPLKPCSPTKEAPTGEQATPAPPQPSCGSEGLLKAIGIPEQTVMQPVSPSRSFPIFQILTSFPVRHKIASGNRQQQRKSQLFWGLPSLHSESLEAIFLSSGGPSPLKWSVCSSVFFNKLAFLPRSNLLLPQYHSSAQFSTHGAHTMEDLEGMAPDPQLLPPPSSPSVSSLLLHLRPF

SEQ ID NO: 65404 - protein, 109 aa, Homo sapiens
MFPFYSCWRTGLLLLLLAVAVRESWQTEEKTCDLVGEKGKESEKELALVKRLKPLFNKSFESTVGQGSDTYIYIFRVCREAGNHTSGAGLVQINKSNGKETVVGRLNET

SEQ ID NO: 65405 - protein, 110 aa, Homo sapiens
MGPLSPARTLRLWGPRSLGVALGVFMTIGFALQLLGGPFQRRLPGLQLRQPSAPSLRPALPSCPPRQRLVFLKTHKSGSSSVLSLLHRYGDQHGLRFALPARYQFGYPKL

SEQ ID NO: 65406 - protein, 117 aa, Homo sapiens
MELAAQSMKKAYQDMDIDKVDELMTDITEQQEVAQQISDAISRPMGFGDDVDEDELLEELEELEQEELAQELLNVGDKEEEPSVKLPSVPSTHLPAGPAPKVDEDEEALKQLAEWVS

SEQ ID NO: 65407 - protein, 442 aa, Homo sapiens
MAPRSLLLLLSGALALTDTWAGSHSLRYFSTAVSRPGRGEPRYIAVEYVDDTQFLRFDSDAAIPRMEPREPWVEQEGPQYWEWTTGYAKANAQTDRVALRNLLRRYNQSEAGSHTLQGMNGCDMGPDGRLLRGYHQHAYDGKDYISLNEDLRSWTAADTVAQITQRFYEAEEYAEEFRTYLEGECLELLRRYLENGKETLQRADPPKAHVAHHPISDHEATLRCWALGFYPAEITLTWQRDGEEQTQDTELVETRPAGDGTFQKWAAVVVPSGEEQRYTCHVQHEGLPQPLILRWEQSPQPTIPIVGIVAGLVVLGAVVTGAVVAAVMWRKKSSDRNRGSYSQAAAYSVVSGLLMITWWSSLFLLGVLFQGYLGCLRSHSVLGRRKVGDMWILFFLWLWTSFNTAFLALQSLRFGFGFRRGRSFLLRSWHHLMKRVQIKIFD

SEQ ID NO: 65408 - protein, 240 aa, Homo sapiens
MSEILCQWLNKELKVSRTVSPKSFAKAFSSGYLLGEVLHKFELQDDFSEFLDSRVSSAKLNNFSRLEPTLNLLGVQFDQNVAHGIITEKPGVATKLLYQLYIALQKKKKSGLTGVEMQTMQRLTNLRLQNMKSDTFQEQYLNRRRQNEIMAKIQAAIIQIPKPASNRTLKALEAQKMMKKKKEAEDVADEIKKFEALIKKDLQAKESASKTSLDTAGQTTTDLLNTYSDDEYIKKIQKRL

SEQ ID NO: 65409 - protein, 47 aa, Homo sapiens
MWYEDALASSHPIILYLHGNAGTRGGDHRVELYKVGVTQWERHLSGA

SEQ ID NO: 65410 - protein, 143 aa, Homo sapiens
MKQRKGQGSGGSRGRKKRGLSDISPSTSLPPLVEGQLRCFLKLTVNRVIWKIAKPPTCVLVRVRWWGETSDGTLFCPRDALQTEPKAVRTTTRYAIRCGPKQFTSYLTGWCQTSIPKQSSCLGLPKCWDYRYGCAGAGSNHQT

SEQ ID NO: 65411 - protein, 483 aa, Homo sapiens
MPPRPSSGELWGIHLMPPRILVECLLPNGMIVTLECLREATLITIKHELFKEARKYPLHQLLQDESSYIFVSVTQEAEREEFFDETRRLCDLRLFQPFLKVIEPVGNREEKILNREIGFAIGMPVCEFDMVKDPEVQDFRRNILNVCKEAVDLRDLNSPHSRAMYVYPPNVESSPELPKHIYNKLDKGQIIVVIWVIVSPNNDKQKYTLKINHDCVPEQVIAEAIRKKTRSMLLSSEQLKLCVLEYQGKYILKVCGCDEYFLEKYPLSQYKYIRSCIMLGRMPNLMLMAKESLYSQLPMDCFTMPSYSRRISTATPYMNGETSTKSLWVINSALRIKILCATYVNVNIRDIDKIYVRTGIYHGGEPLCDNVNTQRVPCSNPRWNEWLNYDIYIPDLPRAARLCLSICSVKGRKGAKEEHCPLAWGNINLFDYTDTLVSGKMALNLWPVPHGLEDLLNPIGVTGSNPNKLFFHLLGNSMLRVGV

SEQ ID NO: 65412 - protein, 62 aa, Homo sapiens
MTELPAPLSYFQNAQMSEDNHLSNTNDNRERQEHNDRRSLGHPEPLSNGRPQGNSRQVVEQD

SEQ ID NO: 65413 - protein, 250 aa, Homo sapiens
MSDKSELKAELERKKQRLAQIREEKKRKEEERKKKETDQKKEAVAPVQEESDLEKKRREAEALLQSMGLTPESPIVPPPMSPSSKSVSTPSEAGSQDSGDGAVGSRTLHWDTDPSVLQLHSDSDLGRGPIKLGMAKITQVDFPPREIVTYTKETQTPVMAQPKEDEEEDDDVVAPKPPIEPEEEKTLKKDEENDSKAPPHELTEEEKQQILHSEEFLSFFDHSTRIVERALSEQINIFFDYSGRDLEDKE

SEQ ID NO: 65414 - protein, 267 aa, Homo sapiens
MPRQFPKLNISEVDEQVRLLAEKVFAKVLREEDSKDALSLFTVPEDCPIGQKEAKERELQKELAEQKSVETAKRKKSFKMIRSQSLSLQMPPQQDWKGPPAASPAMSPTTPVVTGATSLPTPAPYAMPEFQRVTISGDYCAGITLEDYEQAAKSLAKALMIREKYARLAYHRFPRITSQYLGHPRADTAPPEEGLPDFHPPPLPQEDPYCLDDAPPNLDYLVHMQGGILFVYDNKKMLEHQEPHSLPYPDLETYTVDMSHILALITD

SEQ ID NO: 65415 - protein, 46 aa, Homo sapiens
MRYSLSPDNHLEDGIMNMANFLRGFEEKGIKNDRPEDQLSKEKKKI

SEQ ID NO: 65416 - protein, 508 aa, Homo sapiens
MALSVPGYSPGFRKPPEVVRLRRKRARSRGAAASPPRELTEPAARRAALVAGLPLRPFPAAGGRGGGSGGGPAAARRNPFARLDNRPRVAAEPPDGPAREQPEAPVPFLDSNQENDLLWEEKFPERTTVTELPQTSHVSFSEPDIPSSKSTELPVDWSIKTRLLFTSSQPFTWADHLKAQEEAQGLVQHCRATEVTLPKSIQDPKLSSELRCTFQQSLIYWLHPALSWLPLFPRIGADRKMAGKTSPWSNDATLQHVLMSDWSVSFTSLYNLLKTKLCPYFYVCTYQFTVLFRAAGLAGSDLITALISPTTRGLREAMRNEGIEFSLPLIKESGHKKETASGTSLGYGEEQAISDEDEEESFSWLEEMGVQDKIKKPDILSIKLRKEKHEVQMDHRPESVVLVKGINTFTLLNFLINSKSLVATSGPQAGLPPTLLSPVAFRGATMQMLKYCIHTSQLLYLTSACKWTKYLIWRLFIRSLLTVVCTLTLWSNLVKYRYLGNHLYGMWC

SEQ ID NO: 65417 - protein, 231 aa, Homo sapiens
MRDSLLVAKFLGTQDLCLFLNLALSPKEPEQLRKLFIGGLSFETTDESLRSHFEQWGTLTDCVVMRDPNTKRSRGFGFVTYATVEEVDAAMNARPHKVDGRVVEPKRAVSREDSQRPGAHLTVKKIFVGGIKEDTEEHHLRDYFEQYGKIEVIEIMTDRGSGKKRGFAFVTFDDHDSVDKIVIQKYHTVNGHNCEVRKALSKQEMASASSSQRGRSGSGNFGGGRGGGFGG

SEQ ID NO: 65418 - protein, 1965 aa, Homo sapiens
MAQFRILDCMINHNWSLLCNLYCAWSGQVSKNKDGKEQSETVSLSEDETFSWPGPKTVTLKRTSQGFGFTLRHFIVYPPESAIQFSYKDEENGNRGGKQRNRLEPMDTIFVKQVKEGGPAFEAGLCTGDRIIKVNGESVIGKTYSQVIALIQNSDTTLELSVMPKDEDILQVLQFTKDVTALAYSQDAYLKGNEAYSGNARNIPEPPPICYPWLPSAPSAMAQPVEISPPDSSLSKQQTSTPVLTQPGRAYRMEIQVPPSPTDVAKSNTAVCVCNESVRTVIVPSEKVVDLLSNRNNHTGPSHRTEEVRYGVSEQTSLKTVSRTTSPPLSIPTTHLIHQPAGSRSLEPSGILLKSGNYSGHSDGISSSRSQAVEAPSVSVNHYSPNSHQHIDWKNYKTYKEYIDNRRLHIGCRTIQERLDSLRAASQSTTDYNQVVPNRTTLQGRRRSTSHDRVPQSVQIRQRSVSQERLEDSVLMKYCPRSASQGALTSPSVSFSNHRTRSWDYIEGQDETLENVNSGTPIPDSNGEKKQTYKWSGFTEQDDRRGICERPRQQEIHKSFRGSNFTVAPSVVNSDNRRMSGRGVGSVSQFKKIPPDLKTLQSNRNFQTTCGMSLPRGISQDRSPLVKVRSNSLKAPSTHVTKPSFSQKSFVSIKDQRPVNHLHQNSLLNQQTWVRTDSAPDQQVETGKSPSLSGASAKPAPQSSENAGTSDLELPVSQRNQDLSLQEAETEQSDTLDNKEAVILREKPPSGRQTPQPLRHQSYILAVNDQETGSDTTCWLPNDARREVHIKRMEERKASSTSPPGDSLASIPFIDEPTSPSIDHDIAHIPASAVISASTSQVPSIATVPPCLTTSAPLIRRQLSHDHESVGPPSLDAQPNSKTERSKSYDEGLDDYREDAKLSFKHVSSLKGIKIADSQKSSEDSGSRKDSSSEVFSDAAKEGWLHFRPLVTDKGKRVGGSIRPWKQMYVVLRGHSLYLYKDKREQTTPSEEEQPISVNACLIDISYSETKRKNVFRLTTSDCECLFQAEDRDDMLAWIKTIQESSNLNEEDTGVTNRDLISRRIKEYNNLMSKAEQLPKTPRQSLSIRQTLLGAKSEPKTQSPHSPKEESERKLLSKDDTSPPKDKGTWRKGIPSIMRKTFEKKPTATGTFGVRLDDCPPAHTNRYIPLIVDICCKLVEERGLEYTGIYRVPGNNAAISSMQEELNKGMADIDIQDDKWRDLNVISSLLKSFFRKLPEPLFTNDKYADFIEANRKEDPLDRLKTLKRLIHDLPEHHYETLKFLSAHLKTVAENSEKNKMEPRNLAIVFGPTLVRTSEDNMTHMVTHMPDQYKIVETLIQHHDWFFTEEGAEEPLTTVQEESTVDSQPVPNIDHLLTNIGRTGVSPGDVSDSATSDSTKSKGSWGSGKDQYSRELLVSSIFAAASRKRKKPKEKAQPSSSEDELDNVFFKKENVEQCHNDTKEESKKESETLGRKQKIIIAKENSTRKDPSTTKDEKISLGKESTPSEEPSPPHNSKHNKSPTLSCRFAILKESPRSLLAQKSSHLEETGSDSGTLLSTSSQASLARFSMKKSTSPETKHSEFLANVSTITSDYSTTSSATYLTSLDSSRLSPEVQSVAESKGDEADDERSELISEGRPVETDSESEFPVFPTALTSERLFRGKLQEVTKSSRRNSEGSELSCTEGSLTSSLDSRRQLFSSHKLIECDTLSRKKSARFKSDSGSLGDAKNEKEAPSLTKVFDVMKKGKSTGSLLTPTRGESEKQEPTWKTKIADRLKLRPRAPADDMFGVGNHKVNAETAKRKSIRRRHTLGGHRDATEISVLNFWKVHEQSGERESELSAVNRLKPKCSAQDLSISDWLARERLRTSTSDLSRGEIGDPQTENPSTREIATTDTPLSLHCNTGSSSSTLASTNRPLLSIPPQSPDQINGESFQNVSKNASSAANAQPHKLSETPGSKAEFHPCL

SEQ ID NO: 65419 - protein, 109 aa, Homo sapiens
MEDDTSWRSEATFQFTVERFSRLSESVLSPPCFVRNLPWKIMVMPRFYPDRPHQKSVGFFLQCNAESDSTSWSCHAQAVLKIINYRDDEKSFSRRISHLFFHKENDWGF

SEQ ID NO: 65420 - protein, 324 aa, Homo sapiens
MFSSVAHLARANPFNTPHLQLVHDGLGDLRSSSPGPTGQPRRPRNLAAAAVEEYSCEFGSAKYYALCGFGGVLSCGLTHTAVVPLDLVKCRMQVDPQKYKGIFNGFSVTLKEDGVRGLAKGWAPTFLGYSMQGLCKFGFYEVFKVLYSNMLGEENTYLWRTSLYLAASASAEFFADIALAPMEAAKVRIQTQPGYANTLRDAAPKMYKEEGLKAFYKGVAPLWMRQIPYTMMKFACFERTVEALYKFVVPKPRSECSKPEQLVVTFVAGYIGVWKGLFARIIMIGTLTALQWFIYDSVKVYFRLPRPPPPEMPESLKKKLGLTQ

SEQ ID NO: 65421 - protein, 933 aa, Homo sapiens
  MOD_RES (1)..(1): Any amino acid
XTITAFVEPFVILLILVANAIVGVWQERNAENAIEALKEYEPEMGKVYRQDRKSVQRIKAKDIVPGDIVEIAGESVSVIKHTDPVPDPRAVNQDKKNMLFSGTNIAAGKAMGVVVATGVNTEIGKIRDEMVATEQERTPLQQKLDEFGEQLSKVISLICIAVWIINIGHFNDPVHGGSWIRGAIYYFKIAVALAVAAIPEGLPAVITTCLALGTRRMAKKNAIVRSLPSVETLGCTSVICSDKTGTLTTNQMSVCRMFILDRVEGDTCSLNEFTITGSTYAPIGEVHKDDKPVNCHQYDGLVELATICALCNDSALDYNEAKGVYEKVGEATETALTCLVEKMNVFDTELKGLSKIERANACNSVIKQLMKKEFTLEFSRDRKSMSVYCTPNKPSRTSMSKMFVKGAPEGVIDRCTHIRVGSTKVPMTSGVKQKIMSVIREWGSGSDTLRCLALATHDNPLRREEMHLEDSANFIKYETNLTFVGCVGMLDPPRIEVASSVKLCRQAGIRVIMITGDNKGTAVAICRRIGIFGQDEDVTSKAFTGREFDELNPSAQRDACLNARCFARVEPSHKSKIVEFLQSFDEITAMTGDGVNDAPALKKAEIGIAMGSGTAVAKTASEMVLADDNFSTIVAAVEEGRAIYNNMKQFIRYLISSNVGEVVCIFLTAALGFPEALIPVQLLWVNLVTDGLPATALGFNPPDLDIMNKPPRNPKEPLISGWLFFRYLAIGCYVGAATVGAAAWWFIAADGGPRVSFYQLSHFLQCKEDNPDFEGVDCAIFESPYPMTMALSVLVTIEMCNALNSLSENQSLLRMPPWENIWLVGSICLSMSLHFLILYVEPLPLIFQITPLNVTQWLMVLKISLPVILMDETLKFVARNYLEPGKECVQPATKSCSFSACTDGISWPFVLLIMPLVIWVYSTDTNFSDMFWS

SEQ ID NO: 65422 - protein, 107 aa, Homo sapiens
  MOD_RES (1)..(1): Any amino acid
XPAGRRGPGARWQPPSRPNVVLPTSFPCLNKPRYRSSKKAGGCSHLKAPIPQAFSCIDQNRDGIICKADLRETYSQLGKVSVPEEELDAMLQEGKGPINFTVFLTLF

SEQ ID NO: 65423 - protein, 182 aa, Homo sapiens
MAGELADKKDRDASPSKEERKRSRTPDRERDRDRDRKSSPSKDRKRHRSRDRRRGGSRSRSRSRSKSAERERRHKERERDKERDRNKKDRDRDKDGHRRDKDRKRSSLSPGRGKDFKSRKDRDSKKDEEDEHGDKKPKAQPLSLEELLAKKKAEEEAEAKPKFLSKAEREAEALKRRQQEVE

SEQ ID NO: 65424 - protein, 743 aa, Homo sapiens
MQQRAGSKTAGPPCQWSRMASEGTNIPSPVVRQIDKQFLICSICLERYKNPKVLPCLHTFCERCLQNYIPAHSLTLSCPVCRQTSILPEKGVAALQNNFFITNLMDVLQRTPGSNAEESSILETVTAVAAGKPLSCPNHDGNVMEFYCQSCETAMCRECTEGEHAEHPTVPLKDVVEQHKASLQVQLDAVNKRLPEIDSALQFISEIIHQLTNQKASIVDDIHSTFDELQKTLNVLQSQLDTLLQGQESIKSCSNFTAQALNHGTETEVLLVKKQMSEKLNELADQDFPLHPRENDQLDFIVETEGLKKSIHNLGTILTTNAVASETVATGEGLRQTIIGQPMSVTITTKDKDGELCKTGNAYLTAELSTPDGSVADGEILDNKNGTYEFLYTVQKEGDFTLSLRLYDQHIRGSPFKLKVIRSADVSPTTEGVKRRVKSPGSGHVKQKAVKRPASMYSTGKRKENPIEDDLIFRVGTKGRNKGEFTNLQGVAASTNGKILIADSNNQCVQIFSNDGQFKSRFGIRGRSPGQLQRPTGVAVHPSGDIIIADYDNKWVSIFSSDGKFKTKIGSGKLMGPKGVSVDRNGHIIVVDNKACCVFIFQPNGKIVTRFGSRGNGDRQFAGPHFAAVNSNNEIIITDFHNHSVKVFNQEGEFMLKFGSNGEGNGQFNAPTGVAVDSNGNIIVADWGNSRIQVFDGSGSFLSYINTSADPLYGPQGLALTSDGHVVVADSGNHCFKVYRYLQ

SEQ ID NO: 65425 - protein, 111 aa, Homo sapiens
MGSSRESRGGWDSRDDFNSGFRDDFLGGRGGSRPGDRRTGPPMGSRFRDGPPLRGSNMDFREPTEEERAQRPRLQLKPRTVATPLNQVANPNSAIFGGARPREEVVQKEQE

SEQ ID NO: 65426 - protein, 691 aa, Homo sapiens
MESVGVYGFCGCKAKNKMKCDSRWEIAASETAPTSAYSSPARSLGDTGITPLSPSHIVNDTDSNVSEQQSFLVVVAVDFGTTSSGYAYSFTKEPECIHVMRRWEGGDPGVSNQKTPTTILLTPERKFHSFGYAARDFYHDLDPNEAKQWLYLEKFKMKLHTTGDLTMDTDLTAANGKKVKALEIFAYALQYFKEQALKELSDQAGSEFENSDVRWVITVPAIWKQPAKQFMRQAAYQAGLASPENSEQLIIALEPEAASIYCRKLRLHQMIELSSKAAVNGYSGSDTVGAGFTQAKEHIRRNRQSRTFLVENVIGEIWSELEEGDKYVVVDSGGGTVDLTVHQIRLPEGHLKELYKATGGPYGSLGVDYEFEKLLYKIFGEDFIEQFKIKRPAAWVDLMIAFESRKRAAAPDRTNPLNITLPFSFIDYYKKFRGHSVEHALRKSNVDFVKWSSQGMLRMSPDAMNALFKPTIDSIIEHLRDLFQKPEVSTVKFLFLVGGFAEAPLLQQAVQAAFGDQCRIIIPQDVGLTILKGAVLFGLDPAVIKVRRSPLTYGVGVLNRYVEGKHPPEKLLVKDGTRWCTDVFDKFISADQSVALGELVKRSYTPAKPSQLVIVINIYSSEHDNVSFITDPGVKKCGTLRLDLTGTSGTAVPARREIQTLMQFGDTEIKATAIDIATSKSVKVGIDFLNY

SEQ ID NO: 65427 - protein, 327 aa, Homo sapiens
  MOD_RES (1)..(1): Any amino acid
XGLTVRSVVVGGASEDKVSVRRGFRGCMQGVRMGGTPTNVATLNMNNALKVRVKDGCDVDDPCTSSPCPPNSRCHDAWEDYSCVCDKGYLGINCVDACHLNPCENMGACVRSPGSPQGYVCECGPSHYGPYCENKLDLPCPRGWWGNPVCGPCHCAVSKGFDPDCNKTNGQCQCKENYYKLLAQDTCLPCDCFPHGSHSRTCDMATGQCACKPGVIGRQCNRCDNPFAEVTTLGCEVIYNGCPKAFEAGIWWPQTKFGQPAAVPCPKGSVGNTQSRQRAQQKHEQCSACGDARQSGPASPCSAAQAGAPGQVASLFIASGYLCEMGT

SEQ ID NO: 65428 - protein, 141 aa, Homo sapiens
  MOD_RES (1)..(1): Any amino acid
XTRPPSVQVAKTTPFNTREPVMLACYVWGFYPAEVTITWRKNGKLVMPHSSAHKTAQPNGDWTYQTLSHLALTPSYGDTYTCVVEHTGAPEPILRDWTPGLSPMQTLKVSVSAVTLGLGLIIFSLGVISWRRAGHSRWHIS

SEQ ID NO: 65429 - protein, 55 aa, Homo sapiens
MSGGGPSGGGPGGSGRARTSSFAEPGGGGGGGGGGPGGSASGPGGTGGGKVTAGR

SEQ ID NO: 65430 - protein, 59 aa, Homo sapiens
MEVAANCSLRVKRPLLDPRFEGYKLSLEPLPCYQLELDAGHCLRKTTRGVSTSYRFDSM

SEQ ID NO: 65431 - protein, 256 aa, Homo sapiens
MSMSPTVIILACLGFFLDQSVWAHVGGQDKPFCSAWPSAVVPQGGHVTLRCHYRRGFNIFTLYKKDGVPVPELYNRIFWNSFLISPVTPAHAGTYRCRGFHPHSPTEWSAPSNPLVIMVTGLYEKPSLTARPGPTVRAGENVTLSCSSQSSFDIYHLSREGEAHELRLPAVPSINGTFQADFPLGPATHGETYRCFGSFHGSPYEWSDPSDPLPVSVTGIARHLHAVIRYSVAIILFTILPFFLLHRWCSKKKMLL

SEQ ID NO: 65432 - protein, 129 aa, Homo sapiens
MKDSASAASAGAELVLRRFPWAFLVRRPLLPPPETLPDRWLQAAEEEEVELLPFRSPPREENVPEILDRKHFDQEGMCIYYTKFQGPSQMPSRMSNLSATRQVFLWSLGQATCLFYCKSCHEILRCEIG

SEQ ID NO: 65433 - protein, 182 aa, Homo sapiens
MISFCPDCGKSIQAAFKFCPYCGNSLPVEEHVGSQTFVNPHVSSFQGSKRGLNSSFETSPKKVKWSSTVTSPRLSLFSDGDSSESEDTLSSSERSKGSGSRPPTPKSSPQKTRKSPQVTRGSPQKTSCSPQKTRQSPQTLKRSRVTTSLEALPTGTVLTDKSGRQWKLKSFQTRDNQGILYE

SEQ ID NO: 65434 - protein, 326 aa, Homo sapiens
YQAELRELRLRLDQLTANSARLEVERDNLAQDLATVRQKLQDETNLRLEAENNLAAYRQEADEATLARLDLERKIESLEEEIRFLRKIHEEEVRELQEQLARQQVHVELDVAKPDLTAALKEIRTQYEAMASSNMHEAEEWYRSKFADLTDAAARNAELLRQAKHEANDYRRQLQSLTCDLESLRGTNESLERQMREQEERHVREAASYQEALARLEEEGQSLKDEMARHLQEYQDLLNVKLALDIEIATYRKLLEGEENRITIPVQTFSNLQIRETSLDTKSVSEGHLKRNIVVKTVEMRDGEAAPASEPLGLLLLNPSKPLPHV

SEQ ID NO: 65435 - protein, 247 aa, Homo sapiens
MKNQNGTFKDWANANVSRQIEDTVLYGYYTLYSVILFCVFFWIPFVYFYYEEKDDDDTSKCTQIKTALKYTLGFVVICALLLLVGAFVPLNVPNNKNSTEWEKVKSLFEELGSSHGLAALSFSISSLTLIGMLAAITYTAYGMSALPLNLIKGTRSAAYERLENTEDIEEVEQHIQTIKSKSKDGRPLPARDKRALKQFEERLRTLKKRERHLEFIENSWWTKFCGALRPLKKCLSILRSSGEYFSS

SEQ ID NO: 65436 - protein, 587 aa, Homo sapiens
MGGSTCCGCGCGRCNGCANNRSRNIDSRHRRPDSWNRHENPRNRYYDRDLESRAQPPEDNRRKPVLGKLGTLFTAGRRRNSRNGLESPTRSNAKPLSPKDVVASPKLPERESERSRSQSSQLKQTDTSEEGSPRENPREAEGELPESGGPAAPPDAELSPRWSSSAAAVAVQQCHENDSPQLEPLEAEGEPFPDATTTAKQLHSSPGNSSRQENAETPARSPGEDASPGAGHEQEAFLGVRGAPGSPTQERPAGGLGEAPNGAPSVCAEEGSLGPRNARSQPPKGASDLPGEPPAEGAAHTASSAQADCTARPKGHAHPAKVLTLDIYLSKTEGAQVDEPVVITPRAEDCGDWDDMEKRSSGRRSGRRRGSQKSTDSPGADAELPESAARDDAVFDDEVAPNAASDNASAEKKVKSPRAALDGGVASAASPESKPSPGTKGQLRGESDRSKQPPPASSPTKRKGRSRALEAVPAPPASGPRAPAKESPPKRVPDPSPVTKGTAAESGEEAARAIPRELPVKSSSLLPEIKPEHKRGPLPNHFNGRAEGGRSRELGRAAGAPGASDADGLKPRNHFGVGRSTVTTKVT

SEQ ID NO: 65437 - protein, 122 aa, Homo sapiens
MVGLPARGKTYISKKLTRYLNWIGVPTKVFNVGEYRREAVKQYSSYNFFRPDNEEAMKVRKQCALAALRDVKSYLAKEGGQIAVFDATNTTRERRHMILHFAKENDFKAFFIESVCDDPTVV

SEQ ID NO: 65438 - protein, 105 aa, Homo sapiens
MLEMLEYNHYQVQTHLENPTKYHIQQAQRQQVKQYLSTTLANKHANQVLSLPCPNQPGDHVMPPVPGSSAPNSPMAMLTLNSNCEKEGFYKFEEQNRAESECPDG

SEQ ID NO: 65439 - protein, 212 aa, Homo sapiens
MDNFFTEVFTYKQSTITHQKVTAMHPTNEEGVDDMASLTELHGGSIMYNLFQRYKRNQIYTYIGSILASVNPYQPIAGLYEPATMEQYSRRHLGELPPHIFAIANECYRCLWKRHDNQCILISGESGAGKTESTKLILKFLSVISQQSLELSLKEKTSCVERAILESSPIMEAFGNAKTVYNNNSSRFGKFVQLNICQKGNIQGGRIVDYLL

SEQ ID NO: 65440 - protein, 231 aa, Homo sapiens
MASMAAIGSCSKEYRVLLGQLQKQTDLMQDTSRLLDPYIRIQGLDVPKLREHCRERPGAFPSEETLRGLGRRGFLQTLNATLGCVLHRLADLEQRLPKAQDLERSGLNIEDLEKLQMARPNILGLRNNIYCMAQLLDNSDTAEPTKAGRGASQPPTPTPASDAFQRKLEGCRFLHGYHRFMHSVGRVFSKWGESPNRSRRHSPHQALRKGVRRTRPSRKGKRLMTRGQLPR

SEQ ID NO: 65441 - protein, 120 aa, Homo sapiens
MDSVTFDDVAVEFTPEEWALLDTTQKYLYRDVMLENYMNLASVDFFFCLTSEWEIQPRTKRSSLQQGFLKNQIFTGIQMQTRSYSGWKLCENCGEVFSEQFCLKTHMRAQNGGNTFEGNC

SEQ ID NO: 65442 - protein, 140 aa, Homo sapiens
  MOD_RES (1)..(1): Any amino acid
XAAARAVPVGSGLRGLQRTLPLVVILGATGTGKSTLALQLGQRLGGEIVSADSMQVYEGLDIITNKVSAQEQRICRHHMISFVDPLVTNYTVVDFRNRATALIEDIFARDKIPIVVGGTNYYIESLLWKVLVNTKELASF

SEQ ID NO: 65443 - protein, 1182 aa, Homo sapiens
  MOD_RES (1)..(1): Any amino acid
XNIHANHLSLDASSSSSSSSSSSSSSSSSSSSSSVHEPKMDALIIPVTMEVPCDSRGQRMWWAFLASSMVTFFGGLFIILLWRTLKYLWTVCCHCGGKTKEAQKINNGSSQADGTLKPVDEKEEAVAAEVGWMTSVKDWAGVMISAQTLTGRVLVVLVFALSIGALVIYFIDSSNPIESCQNFYKDFTLQIDMAFNVFFLLYFGLRFIAANDKLWFWLEVNSVVDFFTVPPVFVSVYLNRSWLGLRFLRALRLIQFSEILQFLNILKTSNSIKLVNLLSIFISTWLTAAGFIHLVENSGDPWENFQNNQALTYWECVYLLMVTMSTVGYGDVYAKTTLGRLFMVFFILGGLAMFASYVPEIIELIGNRKKYGGSYSAVSGRKHIVVCGHITLESVSNFLKDFLHKDRDDVNVEIVFLHNISPNLELEALFKRHFTQVEFYQGSVLNPHDLARVKIESADACLILANKYCADPDAEDASNIMRVISIKNYHPKIRIITQMLQYHNKAHLLNIPSWNWKEGDDAICLAELKLGFIAQSCLAQGLSTMLANLFSMRSFIKIEEDTWQKYYLEGVSNEMYTEYLSSAFVGLSFPTVCELCFVKLKLLMIAIEYKSANRESRSRKRILINPGNHLKIQEGTLGFFIASDAKEVKRAFFYCKACHDDITDPKRIKKCGCKRLEDEQPSTLSPKKKQRNGGMRNSPNTSPKLMRHDPLLIPGNDQIDNMDSNVKKYDSTGMFHWCAPKEIEKVILTRSEAAMTVLSGHVVVCIFGDVSSALIGLRNLVMPLRASNFHYHELKHIVFVGSIEYLKREWETLHNFPKVSILPGTPLSRADLRAVNINLCDMCVILSANQNNIDDTSLQDKECILASLNIKSMQFDDSIGVLQANSQGFTPPGMDRSSPDNSPVHGMLRQPSITTGVNIPIITELAKPGKLPLVSVNQEKNSGTHILMITELVNDTNVQFLDQDDDDDPDTELYLTQPFACGTAFAVSVLDSLMSATYFNDNILTLIRTLVTGGATPELEALIAEENALRGGYSTPQTLANRDRCRVAQLALLDGPFADLGDGGCYGDLFCKALKTYNMLCFGIYRLRDAHLSTPSQCTKRYVITNPPYEFELVPTDLIFCLMQFDHNAGQSRASLSHSSHSSQSSSKKSSSVHSIPSTANRQNRPKSRESRDKQKKEMVYR

SEQ ID NO: 65444 - protein, 202 aa, Homo sapiens
MGSSRAHGRVLDWSGSLVEPQPGSSDQESEEQQQFRNIFKQIAGDDMEICADELKKVLNTVVNKHKDLKTHGFTLESCRSMIALMDTDGSGKLNLQEFHHLWNKIKAWQKIFKHYDTDQSGTINSYEMRNAVNDAGFHLNNQLYDIITMRYADKHMNIDFDSFICCFVRLEGMFRAFHAFDKDGDGIIKLNVLEWLQLTMYA

SEQ ID NO: 65445 - protein, 343 aa, Homo sapiens
SRSVGRRRSFSISPSRRSRTPSRRSRTPSRRSRTPSRRSRTPSRRSRTPSRRSRTPSRRRRSRSVVRRRSFSISPVRLRRSRTPLRRRFSRSPIRRKRSRSSERGRSPKRLTDLDKAQLLEIAKANAAAMCAKAGVPLPPNLKPAPPPTIEEKVAKKSGGATIEELTEKCKQIAQSKEDDDVIVNKPHVSDEEEEEPPFYHHPFKLSEPKPIFFNLNIAAAKPTPPKSQVTLTKEFPVSSGSQHRKKEADSVYGEWVPVEKNGEENKDDDNVFSSNLPSEPVDISTAMSERALAQKRLSENAFDLEAMSMLNRAQERVCSSFLKKIIIYHQPTHTNVPVLMSK

SEQ ID NO: 65446 - protein, 112 aa, Homo sapiens
MSITSDEVNFLVYRYLQESGFSHSAFTFGIESHISQSNINGTLVPPAALISILQKGLQYVEAEISINEDGTVFDGRPIESLSLIDAVMPDVVQTRQQAFREKLAQQQASAAA

SEQ ID NO: 65447 - protein, 110 aa, Homo sapiens
AVQLFLCDLLLVVRTSLWRQQQPPAPAPAAQGTSSRPQASALELRGFQRDLSSLRRLAQSFRPAMRRVFLHEATARLMAGASPTRTHQLLDRSLRRRAGPGGKGADGCAD

SEQ ID NO: 65448 - protein, 127 aa, Homo sapiens
MQTAGALFISPALIRCCTRGLIRPVSASFLNSPVNSSKQVARREFQTSVVSRDIDTAAKFIGAGAATVGVAGSGAGIGTVFGSLIIGYARNPSLKQQLFSYAILGFALSEAMGLFCLMVAFLILFAM

SEQ ID NO: 65449 - protein, 1179 aa, Homo sapiens
MKVVPEKNAVRILWGRERGARAMGAQRLLQELVEDKTRWMKWEGKRVELPDSPRSTFLLAFSPDRTLLASTHVNHNIYITEVKTGKCVHSLIGHRRTPWCVTFHPTISGLIASGCLDGEVRIWDLHGGSESWFTDSNNAIASLAFHPTAQLLLIATANEIHFWDWSRREPFAVVKTASEMERVRLVRFDPLGHYLLTAIVNPSNQQGDDEPEIPIDGTELSHYRQRALLQSQPVRRTPLLHNFLHMLSSRSSGIQTEPFHPPEQASSTQQDQGLLNRPSAFSTVQSSTAGNTLRNLSLGPTRRSLGGPLSSHPSRYHREIAPGLTGSEWTRTVLSLNSRSEAESMPPPRTSASSVSLLSVLRQQEGGSQASVYTSATEGRGFPASGLATESDGGNGSSQNNSGSIRHELQCDLRRFFLEYDRLQELDQSLSGEAPQTQQAQEMLNNNIESERPGPSHQPTPHSSENNSNLSRGHLNRCRACHNLLTFNNDTLRWERTTPNYSSGEASSSWQVPSSFESVPSSGSQLPPLERTEGQTPSSSRLELSSSASPQEERTVGVAFNQETGHWERIYTQSSRSGTVSQEALHQDMPEESSEEDSLRRLSPAAYYAQRMIQYLSRRDSIRQRSMRYQQNRLRSSTSSSSSDNQGPSVEGTDLEFEDFEDNGDRSRHRAPRNARMSAPSLGRFVPRRFLLPEYLPYAGIFHERGQPGLATHSSVNRVLAGAVIGDGQSAVASNIANTTYRLQWWDFTKFDLPEISNASVNVLVQNCKIYNDASCDISADGQLLAAFIPSSQRGFPDEGILAVYSLAPHNLGEMLYTKRFGPNAISVSLSPMGRYVMVGLASRRILLHPSTEHMVAQVFRLQQAHGGETSMRRVFNVLYPMPADQRRHVSINSARWLPEPGLGLAYGTNKGDLVICRPEALNSGVEYYWDQLNETVFTVHSNSRSSERPGTSRATWRTDRDMGLMNAIGLQPRNPATSVTSQGTQTLALQLQNAETQTEREVPEPGTAASGPGEGEGSEYGASGEDALSRIQRLMAEGGMTAVVQREQSTTMASMGGFGNNIIVSHRIHRSSQTGTEPGAAHTSSPQPSTSRGLLPEAGQLAERGLSPRTASWDQPGTPGREPTQPTLPSSSPVPIPVSLPSAEGPTLHCELTNNNHLLDGGSSRGDAAGPRGEPRNR

SEQ ID NO: 65450 - protein, 58 aa, Homo sapiens
  MOD_RES (1)..(1): Any amino acid
XDSAQEDYLFSVSFRRYNRSLHARIEQWNHNFSFDAHDPRGFFITYLIVVWKCKLNNL

SEQ ID NO: 65451 - protein, 152 aa, Homo sapiens
MAAALPRTLGELQLYRILQKANLLSYFDAFIQQGGDDVQQLCEAGEEEFLEIMALVGMASKPLHVRRLQKALRDWVTNPGLFNQPLTSLPVSSIPIYKLPEGSPTWLGISCSSYERSSNAREPHLKIPKCAATTCVQSLGQGKSDVVGSLAL

SEQ ID NO: 65452 - protein, 870 aa, Homo sapiens
MGVKKKKEMQVAALTICHQDLETLKSFADVEGKNLASLLLHCVQLTDGVSQIHYIKQIVPLLEKADKNGMCDPTIQSCLDILAGIYLSLSLKNPLKKVLASSLNSLPDFFLPEAMHRFTSRLQEELNTTDLYSYRKVTDNISSCMENFNLGRASVNNLLKNVLHFLQKSLIEILEENRKCAGNHIIQTQLMNDLLVGIRVSMMLVQKVQDFQGNLWKTSDSPIWQNMCGLLSIFTKVLSDDDLLQTVQSTSGLAIILFIKTMFHPSEKIPHLISSVLLRSVDCTSVPEWFMSSCRSLCCGDISQSAVLFLCQGTLAMLDWQNGSMGRSGEALLLDTAHVLFTLSSQIKEPTLEMFLSRILASWTNSAIQVLESSSPSLTDSLNGNSSIVGRLLEYVYTHWEHPLDALRHQTKIMFKNLLQMHRLTVEGADFVPDPFFVELTESLLRLEWHIKGKYTCLGCLVECIGVEHILAIDKTIPSQILEVMGDQSLVPYASDLLETMFRNHKSHLKSQTAESSWIDQWHETWVSPLLFILCEGNLDQKSYVIDYYLPKLLSYSPESLQYMVKILQTSIDAKTGQEQSFPSLGSCNSRGALGALMACLRIARAHGHLQSATDTWENLVSDARIKQGLIHQHCQVRIDTLGLLCESNRSTEIVSMEEMQWIQFFITYNLNSQSPGVRQQICSLLKKLFCRIQESSQVLYKLEQSKSKREPENELTKQHPSVSLQQYKNFMSSICNSLFEALFPGSSYSTRFSALTILGSIAEVFHVPEGKCLIMLGEVIFVFFQNILILHFALFEVSVLLPFFEVSFLPYNSCLYIMKFASKGQKRKKLSPFSLIIICQPQSIIFMDYAYYGKSSSYYLTNLFVAVLR

SEQ ID NO: 65453 - protein, 95 aa, Homo sapiens
MAKPQVVVAPVLMSKLSVNAPEFYPSGYSSSYTESYEDGCEDYPTLSEYVQDFLNHLTEQPGSFETEIEQFAETLNGCVTTDDALQELVELIYQQ

SEQ ID NO: 65454 - protein, 87 aa, Homo sapiens
MDVQATTPLDPRVLDAMLPYLINYYGNPHSRTHAYGWESEAAMERARQQVASLIGADPREIIFTSGATESNNIAIKMESHPVAQARV

SEQ ID NO: 65455 - protein, 264 aa, Homo sapiens
MSPKRIAKRRSPPADAIPKSKKVKVSHRSHSTEPGLVLTLGQGDVGQLGLGENVMERKKPALVSIPEDVVQAEAGGMHTVCLSKSGQVYSFGCNDEGALGRDTSVEGSEMVPGKVELQEKVVQVSAGDSHTAALTDDGRVFLWGSFRHCLFHTSQRLGWGKEVWRQGLSHLRVSKDNNGVIGLLEPMKKSMVPVQVQLDVPVVKVASGNDHLVMLTADGDLYTLGCGEQGQLGRVPELFANRGGRQGLERLLVPKCVMLKSRGS

SEQ ID NO: 65456 - protein, 242 aa, Homo sapiens
  MOD_RES (1)..(1): Any amino acid
XAEDLLSDSSEPPGLNQVSSEVTSQLYASLRLSRQAEATARAQLYLPSTSPPHEGLDGFAQELSRSLSVGLEKNLKKKDGSKHIFEMESVRGQLQTMLQTSRDTAYRDPLIPGAGSERREEDSFDSDSTATLLNTRPLQDLSPSSSAQALEELFPRYTSLRPGPPLNPPDFQGLRDALDSEHTRRKTYSVLGTQASWLQPTPPLEELESLVLWSYQRWATPRLLTLFPSIVSAIFRACRPEC

SEQ ID NO: 65457 - protein, 84 aa, Homo sapiens
MEIKEEGASEEGQHFLPTAQANDPGDCQFTSIQKTPNEPQLEFILACKDLVAPVRDRKLNTLVQISVIHPVEQSLTRYSSTEIV

SEQ ID NO: 65458 - protein, 247 aa, Homo sapiens
  MOD_RES (1)..(1): Any amino acid
XSQNAEMIETGSDCVTQAGLQLLASSDPPALASKNAEVTETGFHHVSQADIEFLTSIDPTASASGSAGITGTMSQDTEVDMKEVELNELEPEKQPMNAASGAAMSLAGAEKNGLVKIKVAEDEAEAAAAAKFTGLSKEELLKVAGSPGWVRTRWALLLLFWLGWLGMLAGAVVIIVRAPRCRELPAQKWWHTGALYRIGDLQAFQGHGAGNLAGLKGRLDYLSSLKVKGLVLGPIHKNQKDDVAQTD

SEQ ID NO: 65459 - protein, 477 aa, Homo sapiens
METNESTEGSRSRSLDIQPSSEGLGPTSEPFPSSDDSPRSALAAATAAAAAAASAAAATAAFTTAKAAALSTKTPAPCSEFMEPSSDPSLLGEPCAGPGFTHNIAHGSLGFEPVYVSCIAQDTCTTTDHSSNPGPVPGSSSGPVLGSSSGAGHGSGSGSGPGCGSVPGSGSGPGPGSGPGSGPGHGSGSHPGPASGPGPDTGPDSELSPCIPPGFRNLVADRVPNYTSWSQHCPWEPQKQPPWEFLQVLEPGARGLWKPPDIKGKLMVCYETLPRGQCLLYNWEEERATNHLDQVPSMQDGSESFFFRHGHRGLLTMQLKSPMPSSTTQKDSYQPPGNVYWPLRGKREAMLEMLLQHQICKEVQAEQEPTRKLFEVESVTHHDYRMELAQAGTPAPTKEQPETFWIQRAPQLPGVSNIRTLDTPFRKNCSFSTPVPLSLGKLLPYEPENYPYQLGEISSLPCPGGRLGGGGGRMTPF

SEQ ID NO: 65460 - protein, 76 aa, Homo sapiens
LMSTATFLTSKDEGLKATTTDVRKNDSIISNVTVTSVTLPNAVSTLQSSKPKTETQSSIKTTEIPGEHSAQGKTKN

SEQ ID NO: 65461 - protein, 79 aa, Homo sapiens
MALKRMGIVSDYEKIRTFAVAIVGVGGVGSVTAEMLTRCGIGKLLLFDYDKVELANMNRLFFQPHQAGLSKVQAAEHTL

SEQ ID NO: 65462 - protein, 434 aa, Homo sapiens
MAWIKRKFGERPPPKRLTREAMRNYLKERGDQTVLILHAKVAQKSYGNEKRFFCPPPCVYLMGSGWKKKKEQMERDGCSEQESQPCAFIGIGNSDQEMQQLNLEGKNYCTAKTLYISDSDKRKHFMLSVKMFYGNSDDIGVFLSKRIKVISKPSKKKQSLKNADLCIASGTKVALFNRLRSQTVSTRYLHVEGGNFHASSQQWGAFFIHLLDDDESEGEEFTVRDGYIHYGQTVKLVCSVTGMALPRLIIRKVDKQTALLDADDPVSQLHKCAFYLKDTERMYLCLSQERIIQFQLNGGGDVAMLELTGQNFTPNLRVWFGDVEAETMYRCGESMLCVVPDISAFREGWRWVRQPVQVPVTLVRNDGIIYSTSLTFTYTPEPGPRPHCSAAGAILRANSSQVPPNESNTNSEGSYTNASTNSTSVTSSTATVVS

SEQ ID NO: 65463 - protein, 154 aa, Homo sapiens
MVQAHGGRSRAQPLTLSLGAAMTQPPPEKTPAKKHVRLQERRGSNVALMLDVRSLGAVEPICSVNTPREVTLHFLRTAGHPLTRWALQRQPPSPKQLEEEFLKIPSNFVSPEDLDIPGHASKDRYKTILPNPQSRVCLGRAQSQEDGDYINANY

SEQ ID NO: 65464 - protein, 247 aa, Homo sapiens
MRPLQIVPSRLISQLYCGLKPPASTRNQICLKMARPSSSMADFRKFFAKAKHIVIISGAGVSAESGVPTFRGAGGYWRKWQAQDLATPLAFAHNPSRVWEFYHYRREVMGSKEPNAGHRAIAECETRLGKQGRRVVVITQNIDELHRKAGTKNLLEIHGSLFKTRCTSCGVVAENYKSPICPALSGKGAPEPGTQDASIPVEKLPRCEEAGCGGLLRPHVVWFGENLDPAILEEVDRELAHCDLCLV

SEQ ID NO: 65465 - protein, 242 aa, Homo sapiens
MSGRSGKKKMSKLSRSARAGVIFPVGRLMRYLKKGTFKYRISVGAPVYMAAVIEYLAAEILELAGNAARDNKKARIAPRHILLAVANDEELNQLLKGVTIASGGVLPRIHPELLAKKRGTKGKSETILSPPPEKRGRKATSGKKGGKKSKAAKPRTSKKSKPKDSDKEGTSNSTSEDGPGDGFTILSSKSLVLGQKPPSANPVDSQPNLSSTVTSLSGAPTNVKNSLKRPSKTACQRRRTRS

SEQ ID NO: 65466 - protein, 454 aa, Homo sapiens
  MOD_RES (1)..(1): Any amino acid
XFSKFRYLYEIARRHPYFYAPELLFFAKRYKAAFTECCQAADKAACLLPKLDELRDEGKASSAKQRLKCASLQKFGERAFKAWAVARLSQRFPKAEFAEVSKLVTDLTKVHTECCHGDLLECADDRADLAKYICENQDSISSKLKECCEKPLLEKSHCIAEVENDEMPADLPSLAADFVESKDVCKNYAEAKDVFLGMFLYEYARRHPDYSVVLLLRLAKTYETTLEKCCAAADPHECYAKVFDEFKPLVEEPQNLIKQNCELFEQLGEYKFQNALLVRYTKKVPQVSTPTLVEVSRNLGKVGSKCCKHPEAKRMPCAEDYLSVVLNQLCVLHEKTPVSDRVTKCCTESLVNRRPCFSALEVDETYVPKEFNAETFTFHADICTLSEKERQIKKQTALVELVKHKPKATKEQLKAVMDDFAAFVEKCCKADDKETCFAEEGKKLVAASQAALGL

SEQ ID NO: 65467 - protein, 107 aa, Homo sapiens
MREIVHLQAGQCGNQIGAKFWEVISDEHGIDPTGTYHGDSDLQLERINVYYNEATGGNYVPRAVLVDLEPGTMDSVRSGPFGQIFRPDNFVFGQSGAGNNWAKGHYT

SEQ ID NO: 65468 - protein, 82 aa, Homo sapiens
  MOD_RES (1)..(1): Any amino acid
XLPQISAVLAARSARGLSLPSLLLELAGFLVFLRYQCYYGYPPLTYLEYPILIAQDVILLLCIFHFNGNVKQATPYIAVYPF

SEQ ID NO: 65469 - protein, 506 aa, Homo sapiens
MSVLSPGDLKPKRGSPHRGSLDRTDASTDLAMRSWPSELGSRTCSTSATTTAPSNSTPIARHPGRTKGYNSDDNLCEPSLEFEVPNHRQYVSRPSSLESSRNTSSNSSPLNLKGSSEQLHGRSESFSSEDLIPSRDLATLPREASTPGRNALGRHEYPLPRNGPLPQEGAQKRGTAPPYVGVRPCSASPSSEMVTLEEFLEESNRSSPTHDTPSCRDDLLSDYFRKASDPPAIGGQPGPPAKKEGAKMPTNFVAPTVKMAAPTSEGRPLKPGQYVKPNFRLTEAEAPPSVAPRQAQPPQSLSLGRPRQAPEALGGRETGSHTLQSPAPPSSHSLARERTPLVGKAGSSCQGPGPRSRPLDTRRFSLAPPKEERLAPLHQSATAPAIATAGAGAAAAGSGSNSQLLHFSPAAAPAARTKPKAPPRSGEVATITPVRAGLSLSEGDGVPGQGCSEGLPAKSPGRSPDLAPHLGRALEDCSRGSVSKSSPASPEPGGDPQTVWYEYGCV

SEQ ID NO: 65470 - protein, 146 aa, Homo sapiens
MTVMSLSRDLKDDFHSDTVLSILNEQRIRGILCDVTIIVEDTKFKAHSNVLAASSLYFKNIFWSHTICISSHVLELDDLKAEVFTEILNYIYSSTVVVKRQETVTDLAAAGKKLGISFLEDLTDRNFSNSPGPYVFCITEKGVVKE

SEQ ID NO: 65471 - protein, 94 aa, Homo sapiens
  MOD_RES (1)..(1): Any amino acid
XAARLGTYPDWFFFCSFIGMFVFYCAHWQTYVSGMLRFGKVDVTEIQIALVIVFVLSAFGGATMWDYTVKIPILRNVFIFCLLGDLSSFIKVGS

SEQ ID NO: 65472 - protein, 146 aa, Homo sapiens
MVAMAEAEAGVAVEVRGLPPAVPDELLTLYFENRRRSGGGPVLSWQRLGCGGVLTFREPADAERVLAQADHELHGAQLSLRPAPPRAPARLLLQGLPPGTTPQRLEQHVQALLRASGLPVQPCCALASPRPDRALVQLPKPLSEAG

SEQ ID NO: 65473 - protein, 4439 aa, Homo sapiens
MNDLRPLFSPTTYSVTIAESTPLRTSVAQVTATDADIGSNGEFYYYFKNKVDLFSVHPTSGVISLSGRLNYDEKNRYDLEILAVDRGMKLYGNNGVSSTAKLYVHIERINEHAPTIHVVTHVPFSLEKEPTYAVVTVDDLDDGANGEIESVSIVAGDPLDQFFLAKEGKWLNEYKIKERKQIDWESFPYGYNLTLQAKDKGSPQKCSALKAVYIGNPTRDTVPIRFEKEVYDVSISEFSPPGVVVAIVKLSPEPIDVEYKLSPGEDAVYFKINPRSGLIVTARPLNTVKKEVYKLEVTNKEGDLKAQVTISIEDANDHTPEFQQPLYDAYVNESVPVGTSVLTVSASDKDKGENGYITYSIASLNLLPFVINQFTGVISTTEELDFESSPEIYRFIVRASDWGSPYRHESEVNVTIRIGNVNDNSPLFEKVACQGVISYDFPVGGHITAVSAIDIDELELVKYKIISGNELGFFYLNPDSGVLQLKKSLTNSGIKNGNFALRITATDGENLADPMSINISVLHGKVSSKSFSCRETRVAQKLAEKLLIKAKANGKLNLEDGFLDFYSINRQGPYFDKSFPSDVAVKEDLPVGANILKIKAYDADSGFNGKVLFTISDGNTDSCFNIDMETGQLKVLMPMDREHTDLYLLNITIYDLGNPQKSSWRLLTINVEDANDNSPVFIQDSYSVNILESSGIGTEIIQVEARDKDLGSNGEVTYSVLTDTQQFAINSSTGIVYVADQLDRESKANYSLKIEARDKAESGQQLFSVVTLKVFLDDVNDCSPAFIPSSYSVKVLEDLPVGTVIAWLETHDPDLGLGGQVRYSLVNDYNGRFEIDKASGAIRLSKELDYEKQQFYNLTVRAKDKGRPVSLSSVSFVEVEVVDVNENLHTPYFPDFAVVGSVKENSRIGTSVLQVTARDEDSGRDGEIQYSIRDGSGLGRFSIDDESGVITAADILDRETMGSYWLTVYATDRGVVPLYSTIEVYIEVEDVNDNAPLTSEPIYYPVVMENSPKDVSVIQIQAEDPDSSSNEKLTYRITSGNPQNFFAINIKTGLITTTSRKLDREQQAEHFLEVTVTDGGPSPKQSTIWVVVQVLDENDNKPQFPEKVYQIKLPERDRKKRGEPIYRAFAFDRDEGPNAEISYSIVDGNDDGKFFIDPKTGMVSSRKQFTAGSYDILTIKAVDNGRPQKSSTARLHIEWIKKPPPSPIPLTFDEPFYNFTVMESDRVTEIVGVVSVQPANTPLWFDIVGGNFDSAFDAEKGVGTIVIAKPLDAEQRSIYNMSVEVTDGTNVAVTQVFIKVLDNNDNGPEFSQPNYDVTISEDVLPDTEILQIEATDRDEKHKLSYTVHSSIDSISMRKFRIDPSTGVLYTAERLDHEAQDKHILNIMVRDQEFPYRRNLARVIVNVEDANDHSPYFTNPLYEASVFESAALGSAVLQVTALDKDKGENAELIYTIEAGNTGNMFKIEPVLGIITICKEPDMTTMGQFVLSIKVTDQGSPPMSATAIVRISVTMSDNSHPKFIHKDYQAEVNENVDIGTSVILISAISQSTLIYEVKDGDINGIFTINPYSGVITTQKALDYERTSSYQLIIQATNMAGMASNATVNIQIVDENDNAPVFLFSQYSGSLSEAAPINSIVRSLDNSPLVIRATDADSNRNALLVYQIVESTAKKFFTVDSSTGAIRTIANLDHETIAHFHFHVHVRDSGSPQLTAESPVEVNIEVTDVNDNPPVFTQAVFETILLLPTYVGVEVLKVSATDPDSEVPPELTYSLMEGSLDHFLIDSNSGVLTIKNNNLSKDHYMLIVKVSDGKFYSTSMVTIMVKEAMDSGLHFTQSFYSTSISENNTNITKVAIVNAVGNRLNEPLKYSILNPGNKFKIKSTSGVIQTTGVPFDREEQELYELVVEASRELDHLRVARVVVRVNIEDINDNSPVFVGLPYYAAVQVDAEPGTLIYQVTAIDKDKGPNGEVTYVLQDDYGHFEINPNSGNVILKEAFNSDLSNIEYGVTILAKDGGKPSLSTSVELPITIVNKAMPVFDKPFYTASVNEDIRMNTPILSINATSPEGQGIIYIIIDGDPFKQFNIDFDTGVLKVVSPLDYEVTSAYKLTIRASDALTGARAEVTVDLLVNDVNDNPPIFDQPTYNTTLSEASLIGTPVLQVVSIDADSENNKMVHYQIVQDTYNSTDYFHIDSSSGLILTARMLDHELVQHCTLKVRSIDSGFPSLSSEVLVHIYISDVNDNPPVFNQLIYESYVSELAPRGHFVTCVQASDADSSDFDRLEYSILSGNDRTSFLMDSKSGVITLSNHRKQRMEPLYSLNVSVSDGLFTSTAQVHIRVLGANLYSPAFSQSTYVAEVRENVAAGTKVIHVRATDGDPGTYGQISYAIINDFAKDRFLIDSNGQVITTERLDRENPLEGDVSIFVRALDGGGRTTFCTVRVIVVDENDNAPQFMTVEYRASVRADVGRGHLVTQVQAIDPDDGANSRITYSLYSEASVSVADLLEIDPDNGWMVTKGNFNQLKNTVLSFFVKAVDGGIPVKHSLIPVYIHVLPPETFLPSFTQSQYSFTIAEDTAIGSTVDTLRILPSQNVWFSTVNGERPENNKGGIFVIEQETGTIKLDKRLDRETSPAFHFKVAATIPLDKVDIVFTVDVDIKVLDLNDNKPVFETSSYDTIIMEGMPVGTKLTQVRAIDMDWGANGQVTYSLHSDSQPEKVMEAFNIDSNTGWISTLKDLDHETDPTFTFSVVASDLGEAFSLSSTALVSVRVTDINDNAPVFAQEVYRGNVKESDPPGEVVAVLSTWDRDTSDVNRQVSYHITGGNPRGRFALGLVQSEWKVYVKRPLDREEQDIYFLNITATDGLFVTQAMVEVSVSDVNDNSPVCDQVAYTALLPEDIPSNKIILKVSAKDADIGSNGYIRYSLYGSGNSEFFLDPESGELKTLALLDRERIPVYSLMAKATDGGGRFCQSNIHLILEDVNDNPPVFSSDHYNTCVYENTATKALLTRVQAVDPDIGINRKVVYSLADSAGGVFSIDSSSGIIILEQPLDREQQSSYNISVRATDQSPGQSLSSLTTVTITVLDINDNPPVFERRDYLVTVPEDTSPGTQVLAVFATSKDIGTNAEITYLIRSGNEQGKFKINPKTGGISVSEVLDYELCKRFYLVVEAKDGGTPALSAVATVNINLTDVNDNPPKFSQDVYSAVISEDALVGDSVILLIAEDVDSQPNGQIHFSIVNGDRDNEFTVDPVLGLVKVKKKLDRERVSGYSLLVQAVDSGIPAMSSTATVNIDISDVNDNSPVFTPANYTAVIQENKPVGTSILQLVVTDRDSFHNGPPFSFSILSGNEEEEFVLDPHGILRSAVVFQHTESLEYVLCVQAKDSGKPQQVSHTYIRVRVIEESTHKPTAIPLEIFIVTMEDDFPGGVIGKIHATDQDMYDVLTFALKSEQKSLFKVNSHDGKIIALGGLDSGKYVLNVSVSDGRFQVPIDVVVHVEQLVHEMLQNTVTIRFENVSPEDFVGLHMHGFRRTLRNAVLTQKQDSLRIISIQPVAGTNQLDMLFAVEMHSSEFYKPAYLIQKLSNARRHLENIMRISAILEKNCSGLDCQEQHCEQGLSLDSHALMTYSTARISFVCPRFYRNVRCTCNGGLCPGSNDPCVEKPCPGDMQCVSYEASRRPFLCQCPPGKLGECSGHTSLSFAGNSYIKYRLSENSKEEDFKLALRLRTLQSNGIIMYTRANPCIILKIVDGKLWFQLDCGSGPGILGISGRAVNDGSWHSVFLELNRNFTSLSLDDSYVERRRAPLYFQTLSTESSIYFGALVQADNIRSLTDTRVTQVLSGFQGCLDSVILNNNELPLQNKRSSFAEVVGLTELKLGCVLYPDACKRSPCQHGGSCTGLPSGGYQCTCLSQFTGRNCESEITACFPNPCRNGGSCDPIGNTFICNCKAGLTGVTCEEDINECEREECENGGSCVNVFGSFLCNCTPGYVGQYCGLRPVVVPNIQAGHSYVGKEELIGIAVVLFVIFILVVLFIVFRKKVFRKNYSRNNITLVQDPATAALLNKSNGIPFRNLRGSGDGRNVYQEVGPPQVPVRPMAYTPCFQSDSRSNLDKIVDGLGGEHQEMTTFHPESPRILTARRGVVVCSVAPNLPAVSPCRSDCDSIRKNGWDAGTENKGVDDPGEVTCFAGSNKGSNSEVQSLSSFQSDSGDDNASIVTVIQLVNNVVDTIENEVSVMDQGQNYNRAYHWDTSDWMPGARLSDIEEVPNYENQDGGSAHQGSTRELESDYYLGGYDIDSEYPPPHEEEFLSQDQLPPPLPEDFPDQYEALPPSQPVSLASTLSPDCRRRPQFHPSQYLPPHPFPNETDLVGPPASCEFSTFAVSMNQGTEPTGPADSVSLSLHNSRGTSSSDVSANCGFDDSEVAMSDYESVGELSLASLHIPFVETQHQTQV

SEQ ID NO: 65474 - protein, 108 aa, Homo sapiens
  MOD_RES (1)..(1): Any amino acid
XNMILNDPDFQHEDLNFLTRSQRYEVAVRKSAIMVKKMREFGIADPDEIMWFKKLHLVNFVEPVGLNYSMFIPTLLNQGTTAQKEKWLLSSKGLQIIGTYAQTEMGHG

SEQ ID NO: 65475 - protein, 60 aa, Homo sapiens
  MOD_RES (1)..(1): Any amino acid
XNLKGEGMSQAATICKSNFKYMYWTMLQQLTHHSVNGCNLRPGDLLASGTISGPVSIWLH

SEQ ID NO: 65476 - protein, 100 aa, Homo sapiens
MSGFNFGGTGAPTGGFTFGTAKTATTTPATGFSFSTSGTGGFNFGAPFQPATSTPSTGLFSLATQTPATQTTGFTFGTATLASGGTGFSLGIGASKLNLS

SEQ ID NO: 65477 - protein, 1115 aa, Homo sapiens
MQSDLARLQEGRQPEHRDVTLQKVLDSEKLLYVLEADAAIAKHMKHPQGDMIAEDIRQLKERVTNLRGKHKQIYRLAVKEVDPQAQKSLLGEVEQNLQAAKQCSSTLASRFQEHCPDLERQEAEVHKLGQRFNNLRQQVERRAQSLQSAKAAYEHFHRGHDHVLQFLVSIPSYEPQETDSLSQMETKLKNQKNLLDEIASREQEVQKICANSQQYQQAVKDYELEAEKLRSLLDLENGRRSHVSKRARLQSPATKVKEEEAALAAKFTEVYAINRQRLQNLEFALNLLRQQPEVEVTHETLQRNRPDSGVEEAWKIRKELDEETERRRQLENEVKSTQEEIWTLRNQGPQESVVRKEVLKKVPDPVLEESFQQLQRTLAEEQHKNQLLQEELEALQLQLRALEQETRDGGQEYVVKEVLRIEPDRAQADEVLQLREELEALRRQKGAREAEVLLLQQRVAALAEEKSRAQEKVTEKEVVKLQNDPQLEAEYQQLQEDHQRQDQLREKQEEELSFLQDKLKRLEKERAMAEGKITVKEVLKVEKDAATEREVSDLTRQYEDEAAKARASQREKTELLRKIWALEEENAKVVVQEKVREIVRPDPKAESEVANLRLELVEQERKYRGAEEQLRSYQSELEALRRRGPQVEVKEVTKEVIKYKTDPEMEKELQRLREEIVDKTRLIERCDLEIYQLKKEIQALKDTKPQVQTKEVVQEILQFQEDPQTKEEVASLRAKLSEEQKKQVDLERERASQEEQIARKEEELSRVKERVVQQEVVRYEEEPGLRAEASAFAESIDVELRQIDKLRAELRRLQRRRTELERQLEELERERQARREAEREVQRLQQRLAALEQEEAEAREKVTHTQKVVLQQDPQQAREHALLRLQLEEEQHRRQLLEGELETLRRKLAALEKAEVKEKVVLSESVQVEKGDTEQEIQRLKSSLEEESRSKRELDVEVSRLEARLSELEFHNSKSSKELDFLREENHKLQLERQNLQLETRRLQSEINMAATETRDLRNMTVADSGTNHDSRLWSLERELDDLKRLSKDKDLEIDELQKRLGSVAVKREQRENHLRRSIVVIHPDTGRELSPEEAHRAGLIDWNMFVKLRSQECD

SEQ ID NO: 65478 - protein, 112 aa, Homo sapiens
MPRNQGFSEPEYSAEYSAEYSVSLPSDPDRGVGRTHEISVRNSGSCLCLPRFMRLTFVPESLENLYQTYFKRQRHETLLVLVVFAALFDCYVVVMCAVVFSSDKLASLAVAG

SEQ ID NO: 65479 - protein, 204 aa, Homo sapiens
MMHECYQIWAQLEHEAGTQLHRQTGLLLLGMKENQELKTIQANLSRQRVEHQCLSSEELKQRFPNIRLPRGEVGLLDNSGGVIYAYKALRALQDAIRQLGGIVRDGEKVVEINPGLLVTVKTTSRSYQAKSLVITAGPWTNQLLRPLGIEMPLQTLRINVCYWREMVPGSYGVSQAFPCFLWLGLCPHHIYGLPTGEYPGLMKV

SEQ ID NO: 65480 - protein, 161 aa, Homo sapiens
MGEAAAQYNPEPPPPRTHYSNIEANESEEVRQFRRLFAQLAGDDMEVSATELMNILNKVVTRHPDLKTDGFGIDTCRSMVAVMDSDTTGKLGFEEFKYLWNNIKRWQAIYKQFDTDRSGTICSSELPGAFEAAGFHLNEHLYNMIIRRYSDESGNMDFDNF

SEQ ID NO: 65481 - protein, 295 aa, Homo sapiens
MAERQEEQRGSPPLRAEGKADAEVKLILYHWTHSFSSQKVRLVIAEKALKCEEHDVSLPLSEHNEPWFMRLNSTGEVPVLIHGENIICEATQIIDYLEQTFLDERTPRLMPDKESMYYPRVQHYRELLDSLPMDAYTHGCILHPELTVDSMIPAYATTRIRSQIGNTESELKKLAEENPDLQEAYIAKQKRLKSKLLDHDNVKYLKKILDELEKVLDQVETELQRRNEETPEMGSLSPWLECSGMIIVCCSLDLLGSSNPSTSASQVAETTGAYHHTWLIIVIFVEMEILLCCPG

SEQ ID NO: 65482 - protein, 524 aa, Homo sapiens
MAAVRMLRTWSRNAGKLICVRYFQTCGNVHVLKPNYVCFFGYPSFKYSHPHHFLKTTAALRGQVVQFKLSDIGEGIREVTVKEWYVKEGDTVSQFDSICEVQSDKASVTITSRYDGVIKKLYYNLDDIAYVGKPLVDIETEALKDSEEDVVETPAVSHDEHTHQEIKGRKTLATPAVRRLAMENNIKLSEVVGSGKDGRILKEDILNYLEKQTGAILPPSPKVEIMPPPPKPKDMTVPILVSKPPVFTGKDKTEPIKGFQKAMVKTMSAALKIPHFGYCDEIDLTELVKLREELKPIAFARGIKLSFMPFFLKAKQQMNPKGNRMMARKMPRKVKQSCSPPTLQTGQPPTTTIELAASLGLLQFPILNASVDENCQNITYKASHNIGIAMDTEQGLIVPNVKNVQICSIFDIATELNRLQKLGSVSQLSTTDLTGGTFTLSNIGSIGGTFAKPVIMPPEVAIGALGSIKAIPRFNQKGEVYKAQIMNVSWSADHRVIDGATMSRFSNLWKSYLENPAFMLLDLK

SEQ ID NO: 65483 - protein, 178 aa, Homo sapiens
MRDSGSKAATDAQDANQCCTSCEDNAPATSYCVECSEPLCETCVEAHQRVKYTKDHTVRSTGPAKSRDGERTVYCNVHKHEPLVLFCESCDTLTCRDCQLNAHKDHQYQFLEDAVRNQRKLLASLVKRLGDKHATLQKSTKEVRSSIRQVSDVQKRVQVDVKMAILQIMKELNKRGRV

SEQ ID NO: 65484 - protein, 360 aa, Homo sapiens
MHRKHLQEIPDLSSNVATSFTWGWDSSKTSELLSGMGVSALEKEEPDSENIPQELLSNLGHPESPPRKRLKSKGSDKDFVIVRRPKLNRENFPGVSWDSLPDELLLGIFSCLCLPELLKVSGVCKRWYRLASDESLWQTLDLTGKNLHPDVTGRLLSQGVIAFRCPRSFMDQPLAEHFSPFRVQHMDLSNSVIEVSTLHGILSQCSKLQNLSLEGLRLSDPIVNTLAKNSNLVRLNLSGCSGFSEFALQTLLSSCSRLDELNLSWCFDFTEKHVQVAVAHVSETITQLNLSGYRKNLQKSDLSTLVRRCPNLVHLDLSDSVMLKNDCFQEFFQLNYLQHLSLSRCYDIIPETLLQETLDK

SEQ ID NO: 65485 - protein, 246 aa, Homo sapiens
MGPVIGMTPDKRAETPGAEKIAGLSQIYKMGSLPEAVDAARPKATLVDSESADDELTNLNWLHESTNLLTNFSLGSEGLPIVSPLYDIEGDDVPSFGPACYQNPEKKSATSKPPYSFSLLIYMAIEHSPNKCLPVKEIYSWILDHFPYFATAPTGWKNSVRHNLSLNKCFQKVERSHGKVNGKGSLWCVDPEYKPNLIQALKKQPFSSASSQNGSLSPHYLSSVIKQNQVRNLKESDIDAAAAMML

SEQ ID NO: 65486 - protein, 902 aa, Homo sapiens
MASEGTNIPSPVVRQIDKQFLICSICLERYKNPKVLPCLHTFCERCLQNYIPAHSLTLSCPVCRQTSILPEKGVAALQNNFFITNLMDVLQRTPGSNAEESSILETVTAVAAGKPLSCPNHDGNVMEFYCQSCETAMCRECTEGEHAEHPTVPLKDVVEQHKASLQVQLDAVNKRLPEIDSALQFISEIIHQLTNQKASIVDDIHSTFDELQKTLNVRKSVLLMELEVNYGLKHKVLQSQLDTLLQGQESIKSCSNFTAQALNHGTETEVLLVKKQMSEKLNELADQDFPLHPRENDQLDFIVETEGLKKSIHNLGTILTTNAVASETVATGEGLRQTIIGQPMSVTITTKDKDGELCKTGNAYLTAELSTPDGSVADGEILDNKNGTYEFLYTVQKEGDFTLSLRLYDQHIRGSPFKLKVIRSADVSPTTEGVKRRVKSPGSGHVKQKAVKRPASMYSTGKRKENPIEDDLIFRVGTKGRNKGEFTNLQGVAASTNGKILIADSNNQCVQIFSNDGQFKSRFGIRGRSPGQLQRPTGVAVHPSGDIIIADYDNKWVSIFSSDGKFKTKIGSGKLMGPKGVSVDRNGHIIVVDNKACCVFIFQPNGKIVTRFGSRGNGDRQFAGTLDGPHFAAVNSNNEIIITDFHNHSVKVFNQEGEFMLKFGSNGEGNGQFNAPTGVAVDSNGNIIVADWGNSRIQSKKKGLSAEEKRTRMMEIFSETKDVFQLKDLEKIAPKEKGITAMSVKEVLQSLVDDGMVDCERIGTSNYYWAFPSKALHARKHKLEVLESQLSEGSQKHASLQKSIEKAKIGRCETEERTRLAKELSSLRDQREQLKAEVEKYKDCDPQVVEEIRQANKVAKEAANRWTDNIFAIKSWAKRKFGFEENKIDRTFGIPEDFDYID

SEQ ID NO: 65487 - protein, 516 aa, Homo sapiens
MDSVTFDDVAVDFTQEEWTLLDSTQRSLYSDVMLENYKNLATVGGQIIKPSLISWLEQEESRTVQGGVLQGWEMRLETQWSILQQDFLRGQTSIGIQLEGKHNGRELCDCEQCGEVFSEHSCLKTHVRTQSTGNTHDCNQYGKDFLTLCEKTSTGEKLSEFNQSEKIFSLTPNIVYQRTSTQEKSFECSHCGKSFINESYLQAHMRTHNGEKLYEWRNYGPGFIDSTSLSVLIETLNAKKPYKCKECGKGYRYPAYLSIHMRTHTGEKPYECKECGKAFNYSNSFQIHGRTHTGEKPYVCKECGKAFTQYSGLSMHVRSHSGDKPYECKECGKSFLTSSRLIQHIRTHTGEKPFVCVECGKAFAVSSNLSGHLRTHTEEKACECKICGKVFGYPSCLNNHMRTHSAQKPYTCKECGKAFNYSTHLKIHMRIHTGEKPYECKQCGKAFSHSSSFQIHERTHTGEKPYECKECGKAFTCSSSFRIHEKTHTEEKPYKCQQCGKAYSHPRSLRRHEQIH

SEQ ID NO: 65488 - protein, 258 aa, Homo sapiens
GTLYPAYYSYKAVKSKDIKEYVKWMMYWIIFALFTTAETFTDIFLCWFPFYYELKIAFVAWLLSPYTKGSSLLYRKFVHPTLSSKEKEIDDCLVQAKDRSYDALVHFGKRGLNVAATAAVMAASKGQGALSERLRSFSMQDLTTIRGDGAPAPSGPPPPGSGRASGKHGQPKMSRSASESASSSVVEGDVNEGGMKAWEPHQVQNPLAFSDDEEEDLLDFMYKYKAPRRMELPLEAPPRILRSRFRKKSTSSSATETT

SEQ ID NO: 65489 - protein, 47 aa, Homo sapiens
MRFGSKMMPNVQLRIMSECLMFFNDLEVRGTKFASSFVMNAPLAGTL

SEQ ID NO: 65490 - protein, 506 aa, Homo sapiens
MEQLDVFISIKPKPKQPSKSVIVKSVERNALNMYEARKCLLGLESSGVTIATSPSPASCPAGLACPSLDILASAGLGLTGLGLLGPTTLSLNTSTTPNSLLNALNSSVSPLQSPSSGTPSPTLWAPPLANTSSATGFSAIPHLMIPSTAQATLTNILLSGVPTYGHTAPSPPPGLTPVDVHINSMQTEGKKISAALNGHAQSPDIKYGAISTSSLGEKVLSANHGDPSIQTSGSEQTSPKSSPTEGCNDAFVEVGMPRSPSHSGNAGDLKQMMCPSKVSCAKRQTVELLQGTKNSHLHSTDRLLSDPELSATESPLADKKAPGSERAAERAAAAQQNSERAHLAPRSSYVNMQAFDYEQKKLLATKAMLKKPVVTEVRTPTNTWSGLGFSKSMPAETIKELRRANHVSYKPTMTTTYEGSSMSLSRSNSREHLGGGSESDNWRDRNGIGPGSHSEFAASIGSPKRKQNKSSERCVLCTLLGIPRLECVYLGWSITDCGLSDFKCLV

SEQ ID NO: 65491 - protein, 808 aa, Homo sapiens
MSQNGYFEDSSYYKCDTDDTFEAREEILGDEAFDTANSSIVSGESIRFFVNVNLEMQATNTENEATSGGCVLLHTSRKYLKLKNFKEEIRAHRDLDGFLAQASIVLNETATSLDNVLRTMLRRFARDPDNNEPNCNLDLLMAMLFTDAGAPMRGKVHLLSDTIQGVTATVTGVRYQQSWLCIICTMKALQKRHVCISRLVRPQNWGENSCEVRFVILVLAPPKMKLLETRTEEEFKEALVHQRQLLTMVSHGPVAPRTKERSTVSLPAHRHPEPPKCKDFVPFGKGIREDIARRFPLYPLDFTDGIIGKNKAVGKYITTTLFLYFACLLPTIAFGSLNDENTDGAIDVQKTIAGQSIGGLLYALFSGQPLVILLTTAPLALYIQVIRVICDDYDLDFNSFYAWTGLWNSFFLALYAFFNLSLVMSLFKRSTEEIIALFISITFVLDAVKGTVKIFWKYYYGHYLDDYHTKRTSSLVSLSGLGASLNASLHTALNASFLASPTELPSATHSGQATAVLSLLIMLGTLWLGYTLYQFKKSPYLHPCVREILSDCALPIAVLAFSLISSHGFREIEMSKFRYNPSESPFAMAQIQSLSLRAVSGAMGLGFLLSMLFFIEQNLVAALVNAPENRLVKGTAYHWDLLLLAIINTGLSLFGLPWIHAAYPHSPLHVRALALVEERVENGHIYDTIVNVKETRLTSLGASVLVGLSLLLLPVPLQWIPKPVLYGLFLYIALTSLDGNQLVQRVALLLKEQVLQLLLLCAFGMSSLPYMKMIFPLIMIAMIPIRYILLPRIIEAKYLDVMDAEHRP

SEQ ID NO: 65492 - protein, 24 aa, Homo sapiens
  MOD_RES (1)..(1): Any amino acid
XSRDAKLVLLNMPGPPRNRNGDEN

SEQ ID NO: 65493 - protein, 33 aa, Homo sapiens
  MOD_RES (1)..(1): Any amino acid
XRDKALQDYRKKLLEHKEIDGRLKECECTFLSI

SEQ ID NO: 65494 - protein, 131 aa, Homo sapiens
MDPLQKRNPASPSKSSPMTAAETSQEGPAPSQPSYSEQPMMGLSNLSPGPGPSQAVPLPEGLLRQRYREEKTLEERRWERLEFLQRKKAFLRHVRRRHRDHMAPYAVGREARISPLGDRSQNRFRCECRYC

SEQ ID NO: 65495 - protein, 153 aa, Homo sapiens
  MOD_RES (1)..(1): Any amino acid
XDPRRPYPTDLEMRSGLLGQMNNPSTNGVNGHLPGDALAAGRLPDVLAPQYPWQSNDMSMNMLPPNHSSDFLLEPPGHNKENEDDVEIMSTDSSSSSKMEFHHVGQTGSELLTSSDPPTSASQSAGITGVSHRAWQEPSLLSTEDCLINTSWL

SEQ ID NO: 65496 - protein, 50 aa, Homo sapiens
MAFPHLQQPSFLLASLKADSINKPFAQQCQDLVKVIEDFPAKWPNDEVGL

SEQ ID NO: 65497 - protein, 148 aa, Homo sapiens
MEPRAVAEAVETGEEDVIMEALRSYNQEHSQSFTFDDAQQEDRKSVRILSRDRNCLDPFTSRQSLQALACYADISVSEGSVPESADMDVVLESLKCLCNLVLSSPVAQMLAAEARLVVKLTERVGLYRERSFPHDVQFFDLRLLFLLT

SEQ ID NO: 65498 - protein, 179 aa, Homo sapiens
MPIVDKLKEALKPGRKDSADDGELGKLLASSAKKVLLQKIEFEPASKSFSYQLEALKSKYVLLNPKTEGASRHKSGDDPPARRQGSEHTYESCGDGVPAPQKVLFPTERLSLRWERVFRVGAGLHNLGNTCFLNATIQCLTYTPPLANYLLSKEHARSCHQGSFCMLCVMQNHIVQAFA

SEQ ID NO: 65499 - protein, 293 aa, Homo sapiens
MSAYAGQTQYSGMQQPAVYTAYSQTGQPYSLPTYDLGVMLPAIKTESGLSQTQSPLQSGCLSYSPGFSTPQPGQTPYSYQMPGSSFAPSSTIYANNSVSNSTNFSGSQQDYPSYTAFGQNQYAQYYSASTYGAYMTSNNTADGTPSSTSTYQLQESLPGLTNQPGEFDTMQSPSTPIKDLDERTCRSSGSKSRGRGRKNNPSPPPDSDLERVFVWDLDETIIVFHSLLTGSYAQKYGKDPPMAVTLGLRMEEMIFNLADTHLFFNDLEECDQVHIDDVSSDDNGQDLRCKRRG

SEQ ID NO: 65500 - protein, 598 aa, Homo sapiens
MTMRSAVFKAAAAPAGGNPEQRLDYERAAALGGPEDEPGAAEAHFLPRHRKLKEPGPPLASSQGGSPAPSPAGCGGKGRGLLLPAGAAPGQQEESWGGSVPLPCPPPATKQAGIGGEPAAAGAGCSPRPKYQAVLPIQTGSLVAAAKEPTPWAGDKGGAASPAATASDPAGPPPLPLPGPPPLAPTATAGTLAASEGRWKSMRKSPLGGGGGSGASSQAACLKQILLLQLDLIEQQQQQLQAKEKEIEELKSERDTLLARIERMERRMQLVKKDNEKERHKLFQGYETEEREETELSEKIKLECQPELSETSQTLPPKPFSCGRSGKGHKRKSPFGSTERKTPVKKLAPEFSKVKTKTPKHSPIKEEPCGSLSETVCKRELRSQETPEKPRSSVDTPPRLSTPQKGPSTHPKEKAFSSEIEDLPYLSTTEMYLCRWHQPPPSPLPLRESSPKKEETVAIPSWRDHSVEPLRDPNPSDLLENLDDSVFSKRHAKLELDEKRRKRWDIQRIREQRILQRLQLRMYKKKGIQESEPEVTSFFPEPDDVESLMITPFLPVVAFGRPLPKLTPQNFELPWLDERSRCRLEIQKKQTPHRTCRK

SEQ ID NO: 65501 - protein, 426 aa, Homo sapiens
MEPAPSEVRLAVREAIHALSSSEDGGHIFCTLESLKRYLGEMEPPALPREKEEFASAHFSPVLRCLASRLSPAWLELLPHGRLEELWASFFLEGPADQAFLVLMETIEGAAGPSFRLMKMARLLARFLREGRLAVLMEAQCRQQTQPGFILLRETLLGKVVALPDHLGNRLQQENLAEFFPQNYFRLLGEEVVRVLQAVVDSLQGGLDSSVSFVSQVLGKACVHGRQQEILGVLVPRLAALTQGSYLHQRVCWRLVEQVPDRAMEAVLTGLVEAALGPEVLSRLLGNLVVKNKKAQFVMTQKLLFLQSRLTTPMLQSLLGHLAMDSQRRPLLLQVLKELLETWGSSSAIRHTPLPQQRHVSKAVLICLAQLGEPELRDSRDELLASMMAGVKCRLDSSLPPVRRLGMIVQIQLRGRPLLLPPPSAL

SEQ ID NO: 65502 - protein, 284 aa, Homo sapiens
MTKSSLRPLQKQSPQTGGLPPDCSKCCHGDYSFRGYQGPPGPPGPPGIPGNHGNNGNNGATGHEGAKGEKGDKGDLGPRGERGQHGPKGEKGYPGIPPELQIAFMASLATHFSNQNSGIIFSSVETNIGNFFDVMTGRFGAPVSGVYFFTFSMMKHEDVEEVYVYLMHNGNTVFSMYSYEMKGKSDTSSNHAVLKLAKGDEVWLRMGNGALHGDHQRFSTFAGFLLFETKCHGETPAGPRDSAAGKSKAYLCQAEWIWPVRKLLPVSWPRYQLFGFVRWKEQHI

SEQ ID NO: 65503 - protein, 60 aa, Homo sapiens
MRRGERRDAGGPRPESPVPAGRASLEEPPDGPSAGQATGPGEGRRSTESEVYDDGTNTFF

SEQ ID NO: 65504 - protein, 246 aa, Homo sapiens
  MOD_RES (1)..(1): Any amino acid
XNEKQPEHLGLDQYIIKRFDGKKISQEREKFADEGSIFYTLGECGLISFSDYIFLTTVLSTPQRNFEIAFKMFDLNGDGEVDMEEFEQVQSIIRSQTSMGMRHRDRPTTGNTLKSGLCSALTTYFFGADLKGKLTIKNFLEFQRKLQHDVLKLEFERHDPVDGRITERQFGGMLLAYSGVQSKKLTAMQRQLKKHFKEGKGLTFQEVENFFTFLKNINDVDTALSFYHMAGASLDKGKGTIFMGRR

SEQ ID NO: 65505 - protein, 224 aa, Homo sapiens
VISQLRILGRSITAGSKFDREIWSNELSPVLNLWKKLNQCPLAWQSKWEGPEDPLQYLRGLVARALAIQNWVDKAEKQALLSETLDLSELFHPDTFLNALRQETARAVGRSVDSLKFVASWKGRLQEAKLQIKISGLLLEGCSFDGNQLSENQLDSPSVSSVLPCFMGWIPQDACGPYSPDECISLPVYTSAERDRVVTNIDVPCGGNQDQWIQCGAALFLKNQ

SEQ ID NO: 65506 - protein, 162 aa, Homo sapiens
METFPAVAEKVLKEFQVLLQHSPSPIGSTRMLQLMTINMFAVHNSQLKDCFSEECRSVIQEQAAALGLAMFSLLVRRCTCLLKESAKAQLSSPEDQDDQDDIKVSSFVPDLKELLPSVKVWSDWMLGYPDTWNPPPTSLDLPSHVAVDVWSTLADFCNILTA

SEQ ID NO: 65507 - protein, 168 aa, Homo sapiens
MTPQSLLQTTLFLLSLLFLVQASASSGAHGRGHREDFRFCSQRNQTHRSSLHYKPTPDLRISIENSEEALTVHAPFPAAHPASRSFPDPRGLYHFCLYWNRHAGRLHLLYGKRDFLLSDKASSLLCFQHQEESLAQGPPLLATSVTSWWSPQNISLPSAASFTFSFHS

SEQ ID NO: 65508 - protein, 117 aa, Homo sapiens
  MOD_RES (1)..(1): Any amino acid
XVLNDLECHGAAVSEQSRAELEQKIDEARENIRKAEIIKLKAEARLDLLKQIGVSVDTWLKSAMNQVMEELENERWARPPAVTSNGTLHSIPKEKKAKSLKITWMFSMTAVPALLAP

SEQ ID NO: 65509 - protein, 56 aa, Homo sapiens
MSREMQDVDLAEVKPLVEKGEEQDIETLHGSVHVTLCGTPKGNRPVILTYHDIGMN

SEQ ID NO: 65510 - protein, 7 aa, Homo sapiens
RLKDIVL

SEQ ID NO: 65511 - protein, 421 aa, Homo sapiens
MSVSVLSPSRLLGDVSGILQAASLLILLLLLIKAVQLYLHRQWLLKALQQFPCPPSHWLFGHIQELQQDQELQRIQKWVETFPSACPHWLWGGKVRVQLYDPDYMKVILGRSDPKSHGSYRFLAPWIGYGLLLLNGQTWFQHRRMLTPAFHYDILKPYVGLMADSVRVMLDKWEELLGQDSPLEVFQHVSLMTLDTIMKCAFSHQGSIQVDRPSDPTEEGSTTEGGGAGEDQEEEAFGFSGYPPLGQRAPGLPRPCWCSGWNCFRNHLDQMPYTTMCIKEALRLYPPVPGIGRELSTPVTFPDGRSLPKGIMVLLSIYGLHHNPKVWPNPEVFDPFRFAPGSAQHSHAFLPFSGGSRNCIGKQFAMNELKVATALTLLRFELLPDPTRIPIPIARLVLKSKNGIHLRLRRLPNPCEDKDQL

SEQ ID NO: 65512 - protein, 166 aa, Homo sapiens
  MOD_RES (1)..(1): Any amino acid
XADGHRMLAIYDGFDGFAKGQIKEIGWTDVGGWTGQGGSILGTKRVLPGKYLEEIATQMRTHSINALLIIGGFEAYKSACDMAEARGRHQELCIPLCVVPATISNNVPGTEISLGSDTGLNAVVETCDRIKQSASGTKRRVFIIETMGGYCGYLANMGGLAAGADA

SEQ ID NO: 65513 - protein, 122 aa, Homo sapiens
MGSRNSSSAGSGSGDPSEGLPRRGAGLRRSEEEEEEDEDVDLAQVLAYLLRRGQVRLVQGGGAANLQFIQALLDSEEENDRAWDGRLGDRYNPPVDATPDTRELEFNEIKTQVELATGQLGL

SEQ ID NO: 65514 - protein, 616 aa, Homo sapiens
MPPRAPPAPGPRPPPRAAAATDTAAGAGGAGGAGGAGGPGFRPLAPRPWRWLLLLALPAACSAPPPRPVYTNHWAVQVLGGPAEADRVAAAHGYLNLGQIGNLEDYYHFYHSKTFKRSTLSSRGPHTFLRMDPQVKWLQQQEVKRRVKRQVRSDPQALYFNDPIWSNMWYLDSYASYDVNGNDYDPSPRYDASNENKHGTRCAGEVAASANNSYCIVGIAYNAKIGGIRMLDGDVTDVVEAKSLGIRPNYIDIYSASWGPDDDGKTVDGPGRLAKQAFEYGIKKGRQGLGSIFVWASGNGGREGDYCSCDGYTNSIYTISVSSATENGYKPWYLEECASTLATTYSSGAFYERKIVTTDLRQRCTDGHTGTSVSAPMVAGIIALALEANSQLTWRDVQHLLVKTSRPAHLKASDWKVNGAGHKVSHFYGFGLVDAEALVVEAKKWTAVPSQHMCVAASDKRPRSIPLVQVLRTTALTSACAEHSDQRVVYLEHVVVRTSISHPRRGDLQIYLVSPSGTKSQLLAKRLLDLSNEGFTNWEFMTVHCWGEKAEGQWTLEIQDLPSQVRNPEKQGDLETPVANQLTTEERFVSTLSILFHWSVYLSWSQYHIVLITVAL

SEQ ID NO: 65515 - protein, 173 aa, Homo sapiens
CTDKLERDRLILFLNKLILNKKNVKDLMDSNGIRILVDLLTLAHLHVSRATVPLQSNVIEAAPDMKRESEKEWYFGNADKERSGPYGFHEMQELWTKGMLNAKTRCWAQGMDGWRPLQSIPQLKWCLLASGQAVLNETDLATLILNMLITMCGYFPSRVLFFKEILWKEMKSY

SEQ ID NO: 65516 - protein, 245 aa, Homo sapiens
AVFILDVKGKVFCEYFKELEEESIRDNFVIVYELLDELMDFGFPQTTDSKILQEYITQQSNKLETGKSRVPPTVTNAVSWRSEGIKYKKNEVFIDVIESVNLLVNANGSVLLSEIVGTIKLKVFLSGMPELRLGLNDRVLFELTGRSKNKSVELEDVKFHQCVRLSRFDNDRTISFIPPDGDFELMSYRLSTQVKPLIWIESVIEKFSHSRVEIMVKAKGQFKKQSVANGVEISVPVPSDADSPR

SEQ ID NO: 65517 - protein, 1135 aa, Homo sapiens
MYASLGSGPVAPLPASVPPSVLGSWSTGGSRSCVRQETKSPGGARTSGHWASVWQEVLKQLQGSIEDEAMASSGQIDLLERLKELNLDSSNFPGVKLRSKMSLRSYGSREGSVSSRSGECSPVPMGSFPRRGFVNGSRESTGYLEELEKERSLLLADLDKEEKEKDWYYAQLQNLTKRIDSLPLTENFSLQTDMTRRQLEYEARQIRVAMEEQLGTCQDMEKRAQRSSQNKHETGSHDAERQNEGQGVGEINMATSGNGQGSTTRMDHETASVLSSSSTHSAPRRLTSHLGTKVEMVYSLLSMLGTHDKDDMSRTLLAMSSSQDSCISMRQSGCLPLLIQLLHGNDKDSVLLGNSRGSKEARARASAALHNIIHSQPDDKRGRREIRVLHLLEQIRAYCETCWEWQEAHEPGMDQDKNPMPAPVEHQICPAVCVLMKLSFDEEHRHAMNELGGLQAIAELLQVDCEMYGLTNDHYSITLRRYAGMALTNLTFGDVANKATLCSMKGCMRALVAQLKSESEDLQQVIASVLRNLSWRADVNSKKTLREVGSVKALMECALEVKKESTLKSVLSALWNLSAHCTENKADICAVDGALAFLVGTLTYRSQTNTLAIIESGGGILRNVSSLIATNEDHRQILRENNCLQTLLQHLKSHSLTIVSNACGTLWNLSARNPKDQEALWDMGAVSMLKNLIHSKHKMIAMGSAAALRNLMANRPAKYKDANIMSPGSSLPSLHVRKQKALEAELDAQHLSETFDNIDNLSPKASHRSKQRHKQSLYGDYVFDTNRHDDNRSDNFNTGNMTVLSPYLNTTVLPSSSSSRGSLDSSRSEKDRSLERERGIGLGNYHPATENPGTSSKRGLQISTTAAQIAKVMEEVSAIHTSQEDRSSGSTTELHCVTDERNALRRSSAAHTHSNTYNFTKSENSNRTCSMPYAKLEYKRSSNDSLNSVSSSDGYGKRGQMKPSIESYSEDDESKFCSYGQYPADLAHKIHSANHMDDNDGELDTPINYSLKYSDEQLNSGRQSPSQNERWARPKHIIEDEIKQSEQRQSRNQSTTYPVYTESTDDKHLKFQPHFGQQECVSPYRSRGANGSETNRVGSNHGINQNVSQSLCQEDDYEDDKPTNYSERYSEEEQH

SEQ ID NO: 65518 - protein, 68 aa, Homo sapiens
MAIEDGNLEEMEEEVRLKKRKRRRNVDKDPAKEDVEKAKKRRGRPPAEKLSPNPPKLTKQMNAIIDTV

SEQ ID NO: 65519 - protein, 156 aa, Homo sapiens
MEEPTSSTNENKMKSPCESNKRKVDKKKNLHRASAPEQSLKETEKAKYPTLVFYCRKNKKRNSNQLENNQPTESSTDPIKEKGDLDISAGSPQDGEEEKDLVFLGARACLEEHIRRSVLYVGDSDTLSKMKTSESPPSGHIPQSGVFCNSPNAVSN

SEQ ID NO: 65520 - protein, 319 aa, Homo sapiens
MSKSESPKEPEQLRKLFIGGLSFETTDESLRSHFEQWGTLTDCVVMRDPNTKRSRGFGFVTYATVEEVDAAMNARPHKVDGRVVEPKRAVSREDSQRPGAHLTVKKIFVGGIKEDTEEHHLRDYFEQYGKIEVIEIMTDRGSGKKRGFAFVTFDDHDSVDKIVIQKYHTVNGHNCEVRKALSKQEMASASSSQRGRSGSGNFGGGRGGGFGGNDNFGRGGNFSGRGFGGSRGGGGYGGSGDGYNGFGNDGSNFGGGGSYNDFGNYNNQSSNFGPMKGGNFGGRSSGPYGGGGQYFAKPRNQGGYGGSSSSSSYGSGRRF

SEQ ID NO: 65521 - protein, 95 aa, Homo sapiens
MCSSVAAKLWFLTDRRIREDYPQKEILRALKAKCCEEELDFRAVVMDEVVLTIEQGNLGLRINGELITAYPQVVVVRVPTPWVQSDSDITVLRHL

SEQ ID NO: 65522 - protein, 285 aa, Homo sapiens
MPNIKIFSGSSHQDLSQKIADRLGLELGKVVTKKFSNQETCVEIGESVRGEDVYIVQSGCGEINDNLMELLIMINACKIASASRVTAVIPCFPYARQDKKDKGFFDIPVDNLYAEPAVLKWIRENISEWRNCTIVSPDAGGAKRVTSIADRLNVDFALIHKERKKANEVDRMVLVGDVKDRVAILVDDMADTCGTICHAADKLLSAGATRVYAILTHGIFSGPAISRINNACFEAVVVTNTIPQEDKMKHCSKIQVIDISMILAEAIRRTHNGESVSYLFSHVPL

SEQ ID NO: 65523 - protein, 13 aa, Homo sapiens
MATSADSPSSPLG

SEQ ID NO: 65524 - protein, 271 aa, Homo sapiens
MFGLRRRPQPSKSAVIPDYMRDLYRLQSGEEEEEQIHSTGLEYPERPASRANTVRSFHHEEHLENIPGTSENSAFRFLFNLSSIPENEVISSAELRLFREQVDQGPDWERGFHRINIYEVMKPPAEVVPGHLITRLLDTRLVHHNVTRWETFDVSPAVLRWTREKQPNYGLAIEVTHLHQTRTHQGQHVRISRSLPQGSGNWAQLRPLLVTFGHDGRGHALTRRRRAKRSPKHHSQRARKKNKNCRRHSLYVDFSDVGWNDWIVAPPGYQA

SEQ ID NO: 65525 - protein, 193 aa, Homo sapiens
MAALDLRAELDSLVLQLLGDLEELEGKRTVLNARVEEGWLSLAKARYAMGAKSVGPLQYASHMEPQVCLHASEAQEGLQKFKVVRAGVHAPEEVGPREAGLRRRKGPTKTPEPESSEAPQDPLNWFGILVPHSLRQAQASFRDGVLEAKKRKCFLERVIQCVVSPAAEQEAEDESCPEDWAAAVPAETSAKAI

SEQ ID NO: 65526 - protein, 151 aa, Homo sapiens
MPHIDNDVKLDFKDVLLRPKRSTLKSRSEVDLTRSFSFRNSKQTYSGVPIIAANMDTVGTFEMAKFSLFTAVHKHYSLVQWQEFAGQNPDCLEHLAASSGTGSSDFEQLEQILEAIPQVKYICLDVANGYSEHFVEFVKDVRKRFPQHTIM

SEQ ID NO: 65527 - protein, 527 aa, Homo sapiens
NSSHVDRRSMPSMGYMTHTVSAPSLHGKSADDTYLQLKKDLEYLDLKIKNNEPLINVLYKVLKKSARGCRPRRSMTGRDLLKDRSLKPVKIAESDTDVKLSIFCEQDRVLQDLEDKIRALKENKDQLESVLEVLHRQMEQYRDQPQHLEKIAYQQKLLQEDLVHIRAELSRESTEMENAWNEYLKLENDVEQLKQTLQEQHRRAFFFQEKSQIQKDLWRIEDVTAGLSANKENFRILVESVKNPERKTVPLFPHPPVPSLSTSESKPPPQPSPPTSPVRTPLEVRLFPQLQTYVPYRPHPPQLRKVTSPLQSPTKAKPKVQEDEAPPRPPLPELYSPEDQPPAVPPLPREATIIRHTSVRGLKRQSDERKRDRELGQCVNGDSRVELRSYVSEPELATLSGDMAQPSLGLVGPESRYQTLPGRGLSGSTSRLQQSSTIAPYVTLRRGLNAESSKATFPRPKSALERLYSGDHQRGKMSAEEQLERMKRHQKALVRERKRTLGQGERTGLPSSRYLSRPLPGDLGSVC

SEQ ID NO: 65528 - protein, 632 aa, Homo sapiens
MMSKETRQSKLAEAKEQLTDHHPQTNPSVGTAASDTKKKKINNGTNPETTTSGGCHSPEDEQKASHQHQEALRRELEAQVHTIRILTCQKTELQMALYYSQHAVKQLEGEARDLISRLHDSWKFAGELEQALSAVATQKKKADRYIEELTKERDALSLELYRNTITDEELKEKNAKLQEKLQLVESEKSEIQLNVKELKRKLERAKLLLPQQLQAEADHLGKELQSVSAKLQAQVEENELWNRLNQQQEEKMWRQEEKIQEWEEKIQEQEEKIREQEEKIREQEEKMRRQEEMMWEKEEKMRRQEEMMWEKEEKMRRQEEMMWEKEEKMRRLEEMMWEKEEKIRELEEKMHEQEKIREQEEKRQEEEKIREQEKRQEQEAKMWRQEEKIREQEEKIREQEKKMWRQEEKIHEQEKIREEEKRQEQEEMWRQEEKIREQEEIWRQKEKMHEQEKIRKQEEKVWRQEEKMHDQEEKIREQEEKMWRQEEKIREQEEKIREQEEKIREQEEMMQEQEEKMGEQEEKMQEQEKMRRQEEKIREQEEKIREQKEKIREQEEKIWEQEEKIREQEEMMQEQEEKMWEQEEKMCEQEEKMQEQEEKMRRQEEKMWEQEVRLRQQEEKMQEHQEHLEAAI

SEQ ID NO: 65529 - protein, 176 aa, Homo sapiens
MDRDLLRQSLNCHGSSLLSLLRSEQQDNPHFRSLLGSAAEPARGPPPQHPLQGRKEKRVDNIEIQKFISKKADLLFALSWKSDAPATSEINEDSEDHYAIMPPLEQFMEIPSMDRRELFFRDIERGDIVIGRISSIREFGFFMVLICLGSGIMRDIAHLEITVVQLLAVSYQTTKI

SEQ ID NO: 65530 - protein, 1148 aa, Homo sapiens
MEVDTEEKRHRTRSKGVRVPVEPAIQELFSCPTPGCDGSGHVSGKYARHRSVYGCPLAKKRKTQDKQPQEPAPKRKPFAVKADSSSVDECDDSDGTEDMDEKEEDEGEEYSEDNDEPGDEDEEDEEGDREEEEEIEEEDEDDDEDGEDVEDEEEEEEEEEEEEEEEENEDHQMNCHNTRIMQDTEKDDNNNDEYDNYDELVAKSLLNLGKIAEDAAYRARTESEMNSNTSNSLEDDSDKNENLGRKSELSLDLDSDVVRETVDSLKLLAQGHGVVLSENMNDRNYADSMSQQDSRNMNYVMLGKPMNNGLMEKMVEESDEEVCLSSLECLRNQCFDLARKLSETNPQERNPQQNMNIRQHVRPEEDFPGRTPDRNYSDMLNLMRLEEQLSPRSRVFASCAKEDGCHERDDDTTSVNSDRSEEVFDMTKGNLTLLEKAIALETERAKAMREKMAMEAGRRDNMRSYEDQSPRQLPGEDRKPKSSDSHVKKPYYDPSRTEKKESKCPTPGCDGTGHVTGLYPHHRSLSGCPHKDRVPPEILAMHESVLKCPTPGCTGRGHVNSNRNSHRSLSGCPIAAAEKLAKAQEKHQSCDVSKSSQASDRVLRPMCFVKQLEIPQYGYRNNVPTTTPRSNLAKELEKYSKTSFEYNSYDNHTYGKRAIAPKVQTRDISPKGYDDAKRYCKDPSPSSSSTSSYAPSSSSNLSCGGGSSASSTCSKSSFDYTHDMEAAHMAATAILNLSTRCREMPQNLSTKPQDLCATRNPDMEVDENGTLDLSMNKQRPRDSCCPILTPLEPMSPQQQAVMNNRCFQLGEGDCWDLPVDYTKMKPRRIDEDESKDITPEDLDPFQEALEERRYPGEVTIPSPKPKYPQCKESKKDLITLSGCPLADKSIRSMLATSSQELKCPTPGCDGSGHITGNYASHRSLSGCPRAKKSGIRIAQSKEDKEDQEPIRCPVPGCDGQGHITGKYASHRSASGCPLAAKRQKDGYLNGSQFSWKSVKTEGMSCPTPGCDGSGHVSGSFLTHRSLSGCPRATSAMKKAKLSGEQMLTIKQRASNGIENDEEIKQLDEEIKELNESNSQMEADMIKLRTQVTITTMESNLKTIEEENKVIEQQNESLLHELANLSQSLIHSLANIQLPHMEDGVWWGQ

SEQ ID NO: 65531 - protein, 139 aa, Homo sapiens
MDPLTKVPCGSQIAQTILWKAKSSLSFGIQPLQTWPTKDPELESQVNLSVSEDLGCRRGDFSRKHYGSVELLISSDADGAIQRAGRFRVENGSSDENATALPGTWRRTDVHLENPEYHTRWYFKYFLGQVHQNYIGNDA

SEQ ID NO: 65532 - protein, 101 aa, Homo sapiens
MGDVEKGKKIFIMKCSQCHTVEKGGKHKTGPNLHGLFGRKTGQAPGYSYTAANKNKGIIWGEDTLMEYLENPKKYIPGTKMIFVGIKKKEERADLIAYLKK

SEQ ID NO: 65533 - protein, 75 aa, Homo sapiens
MPQVTFNDVAIDFTHEEWGWLSSAQRDLYKDVMVQNYENLVSVGLSVTKPYVITLLEDGKEPWMMEKKLSKGMIP

SEQ ID NO: 65534 - protein, 385 aa, Homo sapiens
DVDDEYGVSQALARGLQSYYAVAHAVTERVDKQSALMVNGVLKQYQIKGLEWLVSLYNNNLNGILADEMGLGKTIQTIALITYLMEHKRINGPFLIIVPLSTLSNWAYEFDKWAPSVVKVSYKGSPAARRAFVPQLRSGKFNVLLTTYEYIIKDKHILAKIRWKYMIVDEGHRMKNHHCKLTQVLNTHYVAPRRLLLTGTPLQNKLPELWALLNFLLPTIFKSCSTFEQWFNAPFAMTGEKVDLNEEETILIIRRLHKVLRPFLLRRLKKEVEAQLPEKVEYVIKCDMSALQRVLYRHMQAKGVLLTDGSEKDKKGKGGTKTLMNTIMQLRKICNHPYMFQHIEESFSEHLGFTGGIVQGVPGLTSCAFSPASSTLQAGPVPSLG

SEQ ID NO: 65535 - protein, 37 aa, Homo sapiens
MDNQHYHLLGVKLEERGVAENSVVISNGDINLSLRKA

SEQ ID NO: 65536 - protein, 445 aa, Homo sapiens
MRPPGFRNFLLLASSLLFAGLSAVPQSFSPSLRSWPGAACRLSRAESERRCRAPGQPPGAALCHGRGRCDCGVCICHVTEPGMFFGPLCECHEWVCETYDGSTCAGTCHCGRCKCDNSDGSGLVYGKFCECDDRECIDDETEEICGGHGKCYCGNCYCKAGWHGDKCEFQCDITPWESKRRCTSPDGKICSNRGTCVCGECTCHDVDPTGDWGDIHGDTCECDERDCRAVYDRYSDDFCSGHGQCNCGRCDCKAGWYGKKCEHPQSCTLSAEESIRKCQGSSDLPCSGRGKCECGKCTCYPPGDRRVYGKTCECDDRRCEDLDGVVCGGHGTCSCGRCVCERGWFGKLCQHPRKCNMTEEQSKNLCESADGILCSGKGSCHCGKCICSAEEWYISGEFCDCDDRDCDKHDGLICTGNGICSCGNCECWDGWNGNACEIWLGSEYP

SEQ ID NO: 65537 - protein, 129 aa, Homo sapiens
MADFGISAGQFVAVVWDKSSPVEALKGLVDKLQALTGNEGRVSVENIKQLLQSAHKESSFDIILSGLVPGSTTLHSAEILAEIARILRPGGCLFLKEPVETAVDNNSKVKTASKLCSALTLSGLVEVKE

SEQ ID NO: 65538 - protein, 624 aa, Homo sapiens
MSVRYSSSKHYSSSRSGGGGGGGGCGGGGGVSSLRISSSKGSLGGGFSSGGFSGGSFSRGSSGGGCFGGSSGGYGGLGGFGGGSFRGSYGSSSFGGSYGGIFGGGSFGGGSFGGGSFGGGGFGGGGFGGGFGGGFGGDGGLLSGNEKVTMQNLNDRLASYLDKVRALEESNYELEGKIKEWYEKHGNSHQGEPRDYSKYYKTIDDLKNQILNLTTDNANILLQIDNARLAADDFRLKYENEVALRQSVEADINGLRRVLDELTLTKADLEMQIESLTEELAYLKKNHEEEMKDLRNVSTGDVNVEMNAAPGVDLTQLLNNMRSQYEQLAEQNRKDAEAWFNEKSKELTTEIDNNIEQISSYKSEITELRRNVQALEIELQSQLALKQSLEASLAETEGRYCVQLSQIQAQISALEEQLQQIRAETECQNTEYQQLLDIKIRLENEIQTYRSLLEGEGSSGGGGRGGGSFGGGYGGGSSGGGSSGGGHGGGHGGSSGGGYGGGSSGGGSSGGGYGGGSSSGGHGGSSSGGYGGGSSGGGGGGYGGGSSGGGSSSGGGYGGGSSSGGHKSSSSGSVGESSSKGPRSAETSWDTNKTRVIKTIIEEVAPDGRVLSSMVESETKKHYY

SEQ ID NO: 65539 - protein, 493 aa, Homo sapiens
TVNQLAHALHMDKDLKAGCLVRVFWPKAKCALLRDDLVLVDSPGTDVTTELDSWIDKFCLDADVFVLVANSESTLMNTEKHFFHKVNERLSKPNIFILNNRWDASASEPEYMEDVRRQHMERCLHFLVEELKVVNALEAQNRIFFVSAKEVLSARKQKAQGMPESGVALAEGFHARLQEFQNFEQIFEECISQSAVKTKFEQHTIRAKQILATVKNIMDSVNLAAEDKRHYSVEEREDQIDRLDFIRNQMNLLTLDVKKKIKEVTEEVANKVSCAMTDEICRLSVLVDEFCSEFHPNPDVLKIYKSLPRSLASTPTAPTTPATPDNASQEELMITLVTGLASVTSRTSMGIIIVGGVIWKTIGWKLLSVSLTMYGALYLYERLSWTTHAKERAFKQQFVNYATEKLRMIVSSTSANCSHQVKQQIATTFARLCQQVDITQKQLEEEIARLPKEIDQLEKIQNNSKLLRNKAVQLENELENFTKQFLPSSNEES

SEQ ID NO: 65540 - protein, 299 aa, Homo sapiens
MFANLKYVSLGILVFQTTSLVLTMRYSRTLKEEGPRYLSSTAVVVAELLKIMACILLVYKDSKCSLRALNRVLHDEILNKPMETLKLAIPSGIYTLQNNLLYVALSNLDAATYQVTYQLKILTTALFSVSMLSKKLGVYQWLSLVILMTGVAFVQWPSDSQLDSKELSAGSQFVGLMAVLTACFSSGFAGVYFEKILKETKQSVWIRNIQLGFFGSIFGLMGVYIYDGELVSKNGFFQGYNRLTWIVVVLQALGGLVIAAVIKYADNILKGFATSLSIILSTLISYFWLQDFVPTSLKE

SEQ ID NO: 65541 - protein, 31 aa, Homo sapiens
MKGGNADYGCEFLRLLKMVLLCRQLAEREVG

SEQ ID NO: 65542 - protein, 90 aa, Homo sapiens
MGMGRGAGRSALGFWPTLAFLLCSFPAATSPCKILKCNSEFWSATSGSHAPASDDTPEFCAALRSYALCTRRTARTCRGDLAYHSAVHGI

SEQ ID NO: 65543 - protein, 731 aa, Homo sapiens
MTHFEDIEPACCRSRAPSPCELPSDPLLSMKQPIMADGPRCKRRKQANPRRKNVVNYDNVVDTGSETDEEDKLHIAEDDGIANPLDQETSPASVPNHESSPHVSQALLPREEEEDEIREGGVEHPWHNNEILQASVDGPEEMKEDYDTMGPEATIQTAINNGTVKNANCTSDFEEYFAKRKLEERDGHAVSIEEYLQRSDTAIIYPEAPEELSRLGTPEANGQEENDLPPGTPDAFAQLLTCPYCDRGYKRLTSLKEHIKYRHEKNEENFSCPLCSYTFAYRTQLERHMVTHKPGTDQHQMLTQGAGNRKFKCTECGKAFKYKHHLKEHLRIHSGEKPYECPNCKKRFSHSGSYSSHISSKKCIGLISVNGRMRNNIKTGSSPNSVSSSPTNSAITQLRNKLENGKPLSMSEQTGLLKIKTEPLDFNDYKVLMATHGFSGTSPFMNGGLGATSPLGVHPSAQSPMQHLGVGMEAPLLGFPTMNSNLSEVQKVLQIVDNTVSRQKMDCKAEEISKLKGYHMKDPCSQPEEQGVTSPNIPPVGLPVVSHNGATKSIIDYTLEKVNEAKACLQSLTTDSRRQISNIKKEKLRTLIDLVTDDKMIENHNISTPFSCQFCKESFPGPIPLHQHERYLCKMNEEIKAVLQPHENIVPNKAGVFVDNKALLLSSVLSEKGMTSPINPYKDHMSVLKAYYAMNMEPNSDELLKISIAVGLPQEFVKEWFEQRKVYQYSN

SEQ ID NO: 65544 - protein, 567 aa, Homo sapiens
MNVISSLVAITGITFTILSYRHQDKYCQMPSFEEICVFSRTLFIVLFFLPSDVTQNSEQPAPEENDQLQFVLQEEFSSDDSTTNAQSVIFGGYAFFKLTLSRSPLVSQPGNKGREFVPDEQKQSILPSPKFSEEEIEPLPPTLEKKPSENMSIQLDSTFKQMKDEDLQSAIVQPSQMQTKLLQDQAASLQVFPSHSALKLEDISPEDLPSQALPVEGLSEQTMPSKSTSSHVKQSSNLTANDLPPQGILSQDTSSQDMLFHDMTSQDMQSLDMLSQDTPSHAMPPQDIPSQDMLSQALSAHAILPEASTSHIVQFPEIQHLLQQPPDLQPENTEPQNQQILQMSYQDIRSEVMEETKEWKSEEELHRRKSSRRHSLNQQTKALQYLRRHSLDVQAKGQKSSKRHSLDQQSKGWQSPKQKSLDQQIKDWLSPKRHSVDKQAQLNQTKEQLPDQQAEDQQAKGEQYPEGQSKDGQVKDQQTDKEQNSKKQTQDQQTEDQPAQEKKSPKGQFQNVQAEGQQAQVEKVPKLLCQDSESQIQQYQFWQFHKGNLQAGQPRTVNLLAKNPLTG

SEQ ID NO: 65545 - protein, 37 aa, Homo sapiens
MQKIKSLMTRQGLKSPQESLSDLGAIESLRVPGKLEP

SEQ ID NO: 65546 - protein, 142 aa, Homo sapiens
MAPEEDAGGEALGGSFWEAGNYRRTVQRVEDGHRLCGDLVSCFQERARIEKAYAQQLADWARKWRGTVEKGPQYGTLEKAWHAFFTAAERLSALHLEVREKLQGQDSERVRAWQRGAFHRPVLGGFRESRAAEDGFRKAQKP

SEQ ID NO: 65547 - protein, 79 aa, Homo sapiens
MPSTNRAGSLKDPEIAELFFKEDPEKLFTDLREIGHGSFGAVYFARDVRTNEVVAIKKMSYSGKQSTEKWQDIIKEVKF

SEQ ID NO: 65548 - protein, 676 aa, Homo sapiens
MGDLPPYPERPAQQPPGRRTSQASQRRHSRDQAQALAADPEERQQIPPDAQRNAPGWSQRGSLSQQENLLMPQVFQAEEARLGGMEYPSVNTGFPSEFQPQPYSDESRMQVAELTTSLMLQRLQQGQSSLFQQLDPTFQEPPVNPLGQFNLYQTDQFSEGAQHGPYIRDDPALQFLPSELGFPHYSAQVPEPEPLELAVQNAKAYLLQTSINCDLSLYEHLVNLLTKILNQRPEDPLSVLESLNRTTQWEWFHPKLDTLRDDPEMQPTYKMAEKQKALFTRSGGGTEGEQEMEEEVGETPVPNIMETAFYFEQAGVGLSSDESFRIFLAMKQLVEQQPIHTCRFWGKILGIKRSYLVAEVEFREGEEEAEEEEVEEMTEGGEVMEAHGEEEGEEDEEKAVDIVPKSVWKPPPVIPKEESRSGANKYLYFVCNEPGLPWTRLPHVTPAQIVNARKIKKFFTGYLDTPVVSYPPFPGNEANYLRAQIARISAATQVSPLGFYQFSEEEGDEEEEGGAGRDSYEENPDFEGIPVLELVDSMANWVHHTQHILPQGRCTWVNPLQKTEEEEDLGEEEEKADEGPEEVEQEVGPPLLTPLSEDAEIMHLAPWTTRLSCSLCPQYSVAVVRSNLWPGAYAYASGNLRTSTSAGVTSTAPRASTRPCQPPFNKSTPVAQRSWR

SEQ ID NO: 65549 - protein, 24 aa, Homo sapiens
MKVVPEKNAVRILWGRERGARAMG

SEQ ID NO: 65550 - protein, 2513 aa, Homo sapiens
MNHPFGKEEAASQKQLFGFFCECLRRGEWELAQACVPQLQEGQGDIPKRVEDILQALVVCPNLLRCGQDINPQRVAWVWLLVLEKWLAREKKLLPVVFRRKLEFLLLSEDLQGDIPENILEELYETLTQGAVGHVPDGNPRRESWTPRLSSEAVSVLWDLLRQSPQPAQALLELLLEEDDGTGLCHWPLQNALVDLIRKALRALQGPDSVPPGVVDAIYGALRTLRCPAEPLGVELHLLCEELLEACRTEGSPLREERLLSCLLHKASRGLLSLYGHTYAEKVTEKPPRATASGKVSPDHLDPERAMLALFSNPNPAEAWKVAYFYCLSNNKHFLEQILVTALTLLKEEDFPNLGCLLDREFRPLSCLLVLLGWTHCQSLESAKRLLQTLHRTQGPGCDELLRDACDGLWAHLEVLEWCIQQSSNPIPKRDLLYHLHGGDSHSVLYTLHHLTNLPALREEDVLKLLQKVPAKDPQQEPDAVDAPVPEHLSQCQNLTLYQGFCAMKYAIYALCVNSHQHSQCQDCKDSLSEDLASATEPANDSLSSPGAANLFSTYLARCQQYLCSIPDSLCLELLENIFSLLLITSADLHPEPHLPEDYAEDDDIEGKSPSGLRSPSESPQHIAHPERKSERGSLGVPKTLAYTMPSHVKAEPKDSYPGPHRHSFLDLKHFTSGISGFLADEFAIGAFLRLLQEQLDEISSRSPPEKPKQESQSCSGSRDGLQSRLHRLSKVVSEAQWRHKVVTSNHRSEEQPSRRYQPATRHPSLRRGRRTRRSQADGRDRGSNPSLESTSSELSTSTSEGSLSAMSGRNELHSRLHPHPQSSLIPMMFSPPESLLASCILRGNFAEAHQVLFTFNLKSSPSSGELMFMERYQEVIQELAQVEHKIENQNSDAGSSTIRRTGSGRSTLQAIGSAAAAGMVFYSISDVTDKLLNTSGDPIPMLQEDFWISTALVEPTAPLREVLEDLSPPAMAAFDLACSQCQLWKTCKQLLETAERRLNSSLERRGRRIDHVLLNADGIRGFPVVLQQISKSLNYLLMSASQTKSESVEEKGGGPPRCSITELLQMCWPSLSEDCVASHTTLSQQLDQVLQSLREALELPEPRTPPLSSLVEQAAQKAPEAEAHPVQIQTQLLQKNLGKQTPSGSRQMDYLGTFFSYCSTLAAVLLQSLSSEPDHVEVKVGNPFVLLQQSSSQLVSHLLFERQVPPERLAALLAQENLSLSVPQVIVSCCCEPLALCSSRQSQQTSSLLTRLGTLAQLHASHCLDDLPLSTPSSPRTTENPTLERKPYSSPRDSSLPALTSSALAFLKSRSKLLATVACLGASPRLKVSKPSLSWKELRGRREVPLAAEQVARECERLLEQFPLFEAFLLAAWEPLRGSLQQGQSLAVNLCGWASLSTVLLGLHSPIALDVLSEAFEESLVARDWSRALQLTEVYGRDVDDLSSIKDAVLSCAVACDKEGWQYLFPVKDASLRSRLALQFVDRWPLESCLEILAYCISDTAVQEGLKCELQRKLAELQVYQKILGLQSPPVWCDWQTLRSCCVEDPSTVMNMILEAQEYELCEEWGCLYPIPREHLISLHQKHLLHLLERRDHDKALQLLRRIPDPTMCLEVTEQSLDQHTSLATSHFLANYLTTHFYGQLTAVRHREIQALYVGSKLLMNMKVDWATVAVQTLQQLLVGQEIGFTMDEVDSLLSRYAEKALDFPYPQREKRSDSVIHLQEIVHQAADPETLPRSPSAEFSPAAPPGISSIHSPSLRERSFPPTQPSQEFVPPATPPARHQWVPDETESICMVCCREHFTMFNRRHHCRRCGRLVCSSCSTKKMVVEGCRENPARVCDQCYSYCNKDVPEEPSEKPEALDSSKNESPPYSFVVRVPKADEVEWILDLKEEENELVRSEFYYEQAPSASLCIAILNLHRDSIACGHQLIEHCCRLSKGLTNPEVDAGLLTDIMKQLLFSAKMMFVKAGQSQDLALCDSYISKVDVLNILVAAAYRHVPSLDQILQPAAVTRLRNQLLEAEYYQLGVEVSTKTGLDTTGAWHAWGMACLKAGNLTAAREKFSRCLKPPFDLNQLNHGSRLVQDVVEYLESTVRPFVSLQDDDYFATLRELEATLRTQSLSLAVIPEGKIMNNTYYQECLFYLHNYSTNLAIISFYVRHSCLREALLHLLNKESPPEVFIEGIFQPSYKSGKLHTLENLLESIDPTLESWGKYLIAACQHLQKKNYYHILYELQQFMKDQVRAAMTCIRFFSHKAKSYTELGEKLSWLLKAKDHLKIYLQETSRSSGRKKTTFFRKKMTAADVSRHMNTLQLQMEVTRFLHRCESAGTSQITTLPLPTLFGNNHMKMDVACKVMLGGKNVEDGFGIAFRVLQDFQLDAAMTYCRAARQLVEKEKYSEIQQLLKCVSESGMAAKSDGDTILLNCLEAFKRIPPQELEGLIQAIHNDDNKVRAYLICCKLRSAYLIAVKQEHSRATALVQQVQQAAKSSGDAVVQDICAQWLLTSHPRGAHGPGSRK

SEQ ID NO: 65551 - protein, 260 aa, Homo sapiens
MWATLPLLCAGAWLLGVPVCGAAELCVNSLEKFHFKSWMSKHRKTYSTEEYHHRLQTFASNWRKINAHNNGNHTFKMALNQFSDMSFAEIKHKYLWSEPQNCSATKSNYLRGTGPYPPSVDWRKKGNFVSPVKNQGACGSCWTFSTTGALESAIAIATGKMLSLAEQQLVDCAQDFNNHGCQGGLPSQAFEYILYNKGIMGEDTYPYQGKDGYCKFQPGKAIGFVKDVANITIVLYQPSIRTIPSRPELALGDEYPYYLI

SEQ ID NO: 65552 - protein, 215 aa, Homo sapiens
SKILFNEVTIGETDNMFNRYSFDITNVVRDVNSIELRFQSAVLYAAQQSKAHTRYQVPPDCPPLVQKGECHVNFVRKEQCSFSWDWGPSFPTQGIWKDVRIEAYNICHLNYFTFSPIYDKSAQEWNLEIESTFDVVSSKPVGGQVIVAIPKLQTQQTYSIELQPGKRIVELFVNISKNITVETWWPHGHGNQTGYNMTVLFELDGGLNIEKSAKL

SEQ ID NO: 65553 - protein, 99 aa, Homo sapiens
MDFGGHGLSSHYSPGVPYYLQTFVSEIRRVVAALKWNRFSILGHSFGGVVGGMFFCTFPEMVDKLILLDTPLFLLESDEMENLLTYKRRAIEHVLQVEA

SEQ ID NO: 65554 - protein, 115 aa, Homo sapiens
  MOD_RES (1)..(1): Any amino acid
XEGEIRFNLMAIVSDRKMIYEQKIAELQRQLAEEPMDTDQGNSMLSAIQSEVAKNQMLIEEEVQKLKRYKIENIRRKHNYLPFIMELLKTLAEHQQLIPLVEKFEKHFEKTLLGK

SEQ ID NO: 65555 - protein, 200 aa, Homo sapiens
MNNKFDALKDDDSGDHDQNEENSTQKDGEKEKTERDKNQSSSKRKVEQFWRFYSHMVRPGDLTGHSDFHLFKEGIKPMWEDDANKNGGKWIIRLRKGLASRCWENLILAMLGEQFMVGEEICGAVVSVRFQEDIISIWNKTASDQATTARIRDTLRRVLNLPPNTIMEYKTHTDSIKMPGRLGPQRLLFQNLWKPRLNVP

SEQ ID NO: 65556 - protein, 137 aa, Homo sapiens
MEEPEEPADSGQSLVPVYIYSPEYVSMCDSLAKIPKRASMVHSLIEAYALHKQMRIVKPKVASMEEMATFHTDAYLQHLQKVSQEGDDDHPDSIEYGLEMKHLVFVISMMLSWEYYDCDGNLSVFSTWIWICTMEMV

SEQ ID NO: 65557 - protein, 261 aa, Homo sapiens
MSHCSGYSDPSSFAEDGPEVLDEEGTQEDLEYKLKGLIDLTLDKSAKTRQAALEGIKNALASKMLYEFILERRMTLTDSIERCLKKGKSDEQRAAAALASVLCIQLGPGIESEEILKTLGPILKKIICDGSASMQARQTCATCFGVCCFIATDDITELYSTLECLENIFTKSYLKEKDTTVICSTPNTVLHISSLLAWTLLLTICPINEVKKKLEMHFHKLPSLLSCDDVNMRIAAGESLALLFELARGIESEMWVVITVI

SEQ ID NO: 65558 - protein, 94 aa, Homo sapiens
MGNLLKVLTREIENYPHFFLDFENAQPTEGEREIWNQISAVLQDSESILADLQAYKGAGPEIRDAIQNPNDIQLQEKAWNAVCPLVVRLKRFYE

SEQ ID NO: 65559 - protein, 38 aa, Homo sapiens
MKFNPFVTSDRSKNRKRHFNAPSHVRRKIMSSPLSKEL

SEQ ID NO: 65560 - protein, 174 aa, Homo sapiens
MNSSKSSETQCTERGCFSSQMFLWTVAGIPILFLSACFITRCVVTFRIFQTCDEKKFQLPENFTELSCYNYGSGIIVPKEFLSYKKPKMREFFIGLSDQVVEGQWQWVDGTPLTKSLSFWDVGEPNNIATLEDCATMRDSSNPRQNWNDVTCFLNYFRICEMVGINPLNKGKSL

SEQ ID NO: 65561 - protein, 132 aa, Homo sapiens
MDVCATSRTDREIKVTLVFEHVDQDLRTYLDKAPPPGLPAETIKDLMRQFLRGLDFLHANCIVHRDLKPENILVTSGGTVKLADFGLARIYSYQMALTPVVVTLWYRAPEVLLQSTYATPVDMWSVGCIFAE

SEQ ID NO: 65562 - protein, 66 aa, Homo sapiens
MASQKRPSQRHGSKYLATASTMDHARHGFLPRHRDTGILDSIGRFFGGDRGAPKRGSGKESRTLSR

SEQ ID NO: 65563 - protein, 125 aa, Homo sapiens
MSRRYDSRTTIFSPEGRLYQVEYAMEAIGHAGTCLGILANDGVLLAAERRNIHKLLDEVFFSEKIYKLNEDMACSVAGITSDANVLTNELRLIAQSGNCNTNKREWKDSNQSSQTKRSGAVDQKT

SEQ ID NO: 65564 - protein, 64 aa, Homo sapiens
HLDHAQKTLYMDVMLENYCHLISVGCHMTKPDVILKLERGEEPWTSFAGHTCLGGEDGLTGCLS

SEQ ID NO: 65565 - protein, 478 aa, Homo sapiens
MSQVTFSDVAIDFSHEEWACLDSAQRDLYKDVMVQNYENLVSVAGLSVTKPYVIMLLEDGKEPWMMEKKLSKAYPFPLSHSVPASVNFGFSALFEHCSEVTEIFELSELCVFWVLHFLSNSPNSTVEAFFKKKKKKKKKKKRQCFAFLIYFRLGIKMGKQGIINKEGYLEDSPQPVTMEKVVKQSYEFSNSNKNLEYTECDTFRSTFHSKSTLSEPQNNSAEGNSHKYDILKKNLSKKSVIKSERINGGKKLLNSNKSGAAFNQSKSLTLPQTCNREKIYTCSECGKAFGKQSILSRHWRIHTGEKPYECRECGKTFSHGSSLTRHQISHSGEKPYKCIECGKAFSHGSSLTNHQSTHTGEKPYECMNCGKSFSRVSLLIQHLRIHTQEKRYECRICGKAFIHSSSLIHHQKSHTGEKPYECRECGKAFCCSSHLTQHQRIHSMKKKYECNKCLKVFSSFSFLVQHQSIHTEEKPFEV

SEQ ID NO: 65566 - protein, 105 aa, Homo sapiens
NSKLVDLERKFQGLQQTVDKKVCSSNPCQNGGTCLNLHDSFFCICPPQWKGPLCSADVNECEIYSGTPLSCQNGGTCVNTMGSYRNPCSNIPKEPEEGSRDWHRE

SEQ ID NO: 65567 - protein, 335 aa, Homo sapiens
MMQESGTETKSNGSAIQNGSGGSNHLLECGGLREGRSNGETPAVDIGAADLAHAQQQQQQALQVARQLLLQQQQQQQVSGLKSPKRNDKQPALQVPVSVAMMTPQVITPQQMQQILQQQVLSPQQLQVLLQQQQALMLQQQQLQEFYKKQQEQLQLQLLQQQHAGKQPKEQQQVATQQLAFQQQLLQMQQLQQQHLLSLQRQGLLTIQPGQPALPLQPLAQGMIPTELQQLWKEVTSAHTAEETTGNNHSSLDLTTTCVSSSAPSKTSLIMNPHASTNGQLSVHTPKRESLSHEEHPHSHPLYGHGVCKWPGCEAVCEDFQSFLNLQKTKNACKP

SEQ ID NO: 65568 - protein, 80 aa, Homo sapiens
MGTPRAQHPPPPQLLFLILLSCPWIQGSDRDPTLATPPAGQTLAVPSLPRATEPGTGPLTTAVTPNGVRGAGPTAPELLT

SEQ ID NO: 65569 - protein, 121 aa, Homo sapiens
AESSFSEEEEEKLQAAFSLEKQDLHLVLETISFILEQAVYHNVKPAALQQQLENIHLRQDKAEAFVNTWSSMGQETVEKFRQRILAPCKSLEKVLVEFSHKELFDFYNKLETIQAQLDSLT

SEQ ID NO: 65570 - protein, 58 aa, Homo sapiens
MHLLQAGTSGSMEQWDHFHNQQEDTDSCSESVKFDARSMTALLPPNPKNSPSLQEKLK

SEQ ID NO: 65571 - protein, 301 aa, Homo sapiens
DHGAPFSCRTELDMQPQGLGLFVNTSAPRQLRTFVLPVTPPRLVAPRFLEVETSWPVDCTLDGLFPASEAQVYLALGDQMLNATVMNHGDTLTATATATARADQEGFLGPIVNLSEPTAHEGSTVTVSCMAGARVQVTLDGVPAAAPGQPAQLQLNATESDDGRSFFCSATLEVDGEFLHRNSSVQLRVLYGPKIDRATCPQHLKWKDKTRHVLQCQARGNPYPELRCLKEGSSREVPVGIPFFVNVTHNGTYQCQASSSRGKYTLVVVMDIEAGSSHFVPVFVAVLLTLGVVTIVLALMY

SEQ ID NO: 65572 - protein, 43 aa, Homo sapiens
MRPDWWRLTMGSSVSLRAGWRMRCRNCGPSMRTRWSSIRRSWR

SEQ ID NO: 65573 - protein, 131 aa, Homo sapiens
  MOD_RES (1)..(1): Any amino acid
XVPAMDIPQTKQDLELPKAPLRVHITSLLPTPEDNLEIVLHRWENNSCVEKKVLGEKTENPKKFKINCKASGAPQLSWKPQGPRTDPASSTARVLVEDDEIMQGFIRAFRPLPRHLWYLLDLKQMEEPCRF

SEQ ID NO: 65574 - protein, 1627 aa, Homo sapiens
MGFSTADGGGGPGARDLESLDACIQRTLSALYPPFEATAATVLWQLFSVAERCHGGDGLHCLTSFLLPAKRALQHLQQEACARYRGLVFLHPGWPLCAHEKVVVQLASLHGVRLQPGDFYLQVTSAGKQSARLVLKCLSRLGRGTEEVTVPEAMYGCVFTGAFLEWVNRERRHVPLQTCLLTSGLAVHRAPWSDVTDPVFVPSPGAILQSYSSCTGPERLPSSPSEAPVPTQATAGPHFQGSASCPDTLTSPCRRGHTGSDQLRHLPYPERAELGSPRTLSGSSDRDFEKVSPSEQGPRMPPENCGGSGERPDPMDQEDRPKALTFHTDLGIPSSRRRPPGDPTCVQPRRWFRESYMEALRNPMPLGSSEEALGDLACSSLTGASRDLGTGAVASGTQEETSGPRGDPQQTPSLEKERHTPSRTGPGAAGRTLPRRSRSWERAPRSSRGAQAAACHTSHHSAGSRPGGHLGGQAVGTPNCVPVEGPGCTKEEDVLASSACVSTDGGSLHCHNPSGPSDVPARQPHPEQEGWPPGTGDFPSQVPKQVLDVSQELLQSGVVTLPGTRDRHGRAVVQVRTRSLLWTREHSSCAELTRLLLYFHSIPRKEVRDLGLVVLVDARRSPAAPAVSQALSGLQNNTSPIIHSILLLVDKESAFRPDKDAIIQCEVVSSLKAVHKFVDSCQLTADLDGSFPYSHGDWICFRQRLEHFAANCEEAIIFLQNSFCSLNTHRTPRTAQEVAELIDQHETMMKLVLEDPLLVSLRLEGGTVLARLRREELGTEDSRDTLEAATSLYDRVDEEVHRLVLTSNNRLQQLEHLRELASLLEGNDQQSCQKGLQLAKENPQRTEEMVQDFRRGLSAVVSQAECREGELARWTRSSELCETVSSWMGPLDPEACPSSPVAECLRSCHQEATSVAAEAFPGAGVAVLKPHALGKPWASQQDLWLQYPQTRLRLEEALSEAAPDPSLPPLAQSPPKHERAQEAMRRHQKPPSFPSTDSGGGAWEPAQPLSGLPGRALLCGQDGETLRPGLCALWDPLSLLRGLPGAGATTAHLEDSSACSSEPTQTLASRPRKHPQKKMIKKTQSFEIPQPDSGPRDSCQPDHTSVFSKGLEVTSTVATEKKLPLWQHARSPPVTQSRSLSSPSGLHPAEEDGRQQVGSSRLRHIMAEMIATEREYIRCLGYVIDNYFPEMERMDLPQGLRGKHHVIFGNLEKLHDFHQQHFLRELERCQHCPLAVGRSFLRHEEQFGMYVIYSKNKPQSDALLSSHGNAFFKDKQRELGDKMDLASYLLRPVQRVAKYALLLQDLLKEASCGLAQGQELGELRAAEVVVCFQLRHGNDLLAMDAIRGCDVNLKEQGQLRCRDEFIVCCGRKKYLRHVFLFEDLILFSKTQKVEGSHDVYLYKQSFKTAEIGMTENVGDSGLRFEIWFRRRRKSQDTYILQASSAEVKSAWTDVIGRILWRQALKSRELRIQEMASMGIGNQPFMDVKPRDRTPDCAVISDRAPKCAVMSDRVPDSIVKGTESQMRGSTAVSSSDHAAPFKRPHSTISDSSTSSSSSQSSSILGSLGLLVSSSPAHPGLWSPAHSPWSSDIRACVEEDEPEPELETGTQAAVCEGAPAVLLSRTRQA

SEQ ID NO: 65575 - protein, 143 aa, Homo sapiens
  MOD_RES (1)..(1): Any amino acid
XFMRQLMEGLDYCHKKNFLHRDIKCSNILLNNRGQIKLADFGLARLYSSEESRPYTNKVITLWYRPPELLLGEERYTPAIDVWSCGCILGELFTKKPIFQANQELAQLELISTGWVRWLTPVIAALWEAKTGGSLEPRSSRPD

SEQ ID NO: 65576 - protein, 129 aa, Homo sapiens
MAGEITETGELYSSYEEEDDDSSTASDSDVLIRDNYERAEKRPILSVQRRGSPNPFEITDRVEMGQMASMFFNKVGVNLFYFCIIVYLYGDLAIYAAAVPFSLMQVTCSATGNDSCGVEADTKYNDTDR

SEQ ID NO: 65577 - protein, 37 aa, Homo sapiens
MTQKHQYFIQESDGYNRLVNIVPKKPPLLDRPGEGSY

SEQ ID NO: 65578 - protein, 266 aa, Homo sapiens
MSDIEEVVEEYEEEEQEEEEDWREDEDEQEEAAEEDAEAEAETEETRAEEDEEEEEAKEAEDGPMEESKPKPRSFMPNLVPPKIPDGERVDFDDIHRKRMEKDLNELQALIEAHFENRKKEEEELVSLKDRIERRRAERAEQQRIRNEREKERQNRLAEERARREEEENRRKAEDEARKKKALSNMMHFGGYIQKQAQTERKSGKRQTEREKKKKILAERRKVLAIDHLNEDQLREKAKELWQSIYNLEAEKFDLQEKFKQQKYEI

SEQ ID NO: 65579 - protein, 48 aa, Homo sapiens
MQAALEVTARYCGRELEQYGQCVAAKPESWQRDCHYLKMSIAQCTSSQ

SEQ ID NO: 65580 - protein, 90 aa, Homo sapiens
MEEAPLFPGESIKAIVKDVMYICPFMGAVSGTLTVTDFKLYFKNVERDPHFILDVPLGVISRVEKIGAQSHGDNSCGIEIVCKDMRNLRL

SEQ ID NO: 65581 - protein, 261 aa, Homo sapiens
MNTNSKEVLSLGVQVPEAWEELLTMKVEAKSHLQWQESRLKRSNPLAREIFRRHFRQLCYQETPGPREALTRLQELCYQWLRPHVSTKEQILDLLVLEQFLSILPKELQGWVREHCPESGEEAVILLEDLERELDEPQHEMVAHRHRQEVLCKEMVPLAEQTPLTLQSQPKEPQLTCDSAQKCHSIGETGEGQHLFDVERIPPGQAKTNNKPRAGKTGDPKTPYQIAVMVSSSESLVCSSLTLLPACRLLPEYHPGSFLDF

SEQ ID NO: 65582 - protein, 72 aa, Homo sapiens
MGDPGSELALRHLSQQRMKMKTTFSLSVKDHYDLFLNTLIWSAVMMKSLAPLILMRILNVKTILIIRRIKLL

SEQ ID NO: 65583 - protein, 61 aa, Homo sapiens
MMSWWRAAWQNLLPGQRGPVGWNQGAVRGVNPPPVRRRRYPKPPALLCHPAQPQPLDSPSV

SEQ ID NO: 65584 - protein, 611 aa, Homo sapiens
MACCLCQFKNSIEAVCKTVKLHCNSACLTNTTHCPEEASVGNPEGAFMKVLQARKNYTSTELIIEPEEPSDSSGINLSGFGSEQLDTNDESDVTSTLSYILPYFSAVNLDVKSLLLPFIKLPTTGNSLAKIQTVGKNRQRLNRVLMGPRSIQKRHFKEVGRQSIRREQGAQASVENTAEEKRLGSPAPRELKQPHTQQGPEKLAGNAVYTKPSFTQEHKAAVSVLKPFSKGAPSTSSPAKALPQVRDRWKDLTHAISILESAKARVTNMKTSKPIVHSRKKYRFHKTRSRMTHRTPKVKKSPKVRKKSYLSRLMLSNRLPFSAAKSLINSPSQGAFSSLRDLSPQENPFLEVSAPSEHFIENNNTKDTTARNAFEENVFMENTNMPEGTISENTNYNHPPEADSAGTAFNLGPTVKQTETKWEYNNVGTDLSPEPKSFNYPLLSSPGDQFEIQLTQQLQSVIPNNNVRRLIAHVIRTLKMDCSGAHVQVTCAKLVSRTGHLMKLLSGQQEVKASKIEWDTDQWKTENYINESTEAQSEQKEKSLEFTKELPGYGYTKKLILALIVTGILTILIILLCLIEICCHRRSLQEDEEGFSRDSEAPTEEESEALP

SEQ ID NO: 65585 - protein, 289 aa, Homo sapiens
MTQQPLRGVTSLRFNQDQSCFCCAMETGVRIYNVEPLMEKGHLDHEQVGSMGLVEMLHRSNLLALVGGGSSPKFSEISGLCDLCPSLEKQLLVFPGHKCGSLQLVDLASTKPGTSSAPFTINAHQSDIACVSLNQPGTVVASASQKGTLIRLFDTQSKEKLVELRRGTDPATLYCHDSSFLCASSDKGTVHIFALKDTRLNRRSALARVGKVGPMIGQYVDSQWSLASFTVPAESACICAFGRNTSKNVNSVIAICVDGTFHKYVFTPDGNCNREAFDVYLDICDDDDF

SEQ ID NO: 65586 - protein, 2502 aa, Homo sapiens
NWEDNSVIFLLVQSMVVDLKNLLFNPSKPFSRGSQPADVDLMIDCLVSCFRISPHNNQHFKICLAQNSPSTFHYVLVNSLHRIITNSALDWWPKIDAVYCHSVELRNMFGETLHKAVQGCGAHPAIRMAPSLTFKEKVTSLKFKEKPTDLETRSYKYLLLSMVKLIHADPKLLLCNPRKQGPETQGSTAELITGLVQLVPQSHMPEIAQEAMEALLVLHQLDSIDLWNPDAPVETFWEISSQMLFYICKKLTSHQMLSSTEILKWLREILICRNKFLLKNKQADRSSCHFLLFYGVGCDIPSSGNTSQMSMDHEELLRTPGASLRKGKGNSSMDSAAGCSGTPPICRQAQTKLEVALYMFLWNPDTEAVLVAMSCFRHLCEEADIRCGVDEVSVHNLLPNYNTFMEFASVSNMMSTGRAALQKRVMALLRRIEHPTAGNTEAWEDTHAKWEQATKLILNYPKAKMEDGQAAESLHKTIVKRRMSHVSGGGSIDLSDTDSLQEWINMTGFLCALGGVCLQQRSNSGLATYSPPMGPVSERKGSMISVMSSEGNADTPVSKFMDRLLSLMVCNHEKVGLQIRTNVKDLVGLELSPALYPMLFNKLKNTISKFFDSQGQVLLTDTNTQFVEQTIAIMKNLLDNHTEGSSEHLGQASIETMMLNLVRYVRVLGNMVHAIQIKTKLCQLVEVMMARRDDLSFCQEMKFRNKMVEYLTDWVMGTSNQAADDDVKCLTRDLDQASMEAVVSLLAGLPLQPEEGDGVELMEAKSQLFLKYFTLFMNLLNDCSEVEDESAQTGGRKRGMSRRLASLRHCTVLAMSNLLNANVDSGLMHSIGLGYHKDLQTRATFMEVLTKILQQGTEFDTLAETVLADRFERLVELVTMMGDQGELPIAMALANVVPCSQWDELARVLVTLFDSRHLLYQLLWNMFSKEVELADSMQTLFRGNSLASKIMTFCFKVYGATYLQKLLDPLLRIVITSSDWQHVSFEVDPTRLEPSESLEENQRNLLQMTEKFFHAIISSSSEFPPQLRSVCHCLYQVVSQRFPQNSIGAVGSAMFLRFINPAIVSPYEAGILDKKPPPRIERGLKLMSKILQSIANHVLFTKEEHMRPFNDFVKSNFDAARRFFLDIASDCPTSDAVNHSLSFISDGNVLALHRLLWNNQEKIGQYLSSNRDHKAVGRRPFDKMATLLAYLGPPEHKPVADTHWSSLNLTSSKFEEFMTRHQVHEKEEFKALKTLSIFYQAGTSKAGNPIFYYVARRFKTGQINGDLLIYHVLLTLKPYYAKPYEIVVDLTHTGPSNRFKTDFLSKWFVVFPGFAYDNVSAVYIYNCNSWVREYTKYHERLLTGLKGSKRLVFIDCPGKLAEHIEHEQQKLPAATLALEEDLKVFHNALKLAHKDTKVSIKVGSTAVQVTSAERTKVLGQSVFLNDIYYASEIEEICLVDENQFTLTIANQGTPLTFMHQECEAIVQSIIHIRTRWELSQPDSIPQHTKIRPKDVPGTLLNIALLNLGSSDPSLRSAAYNLLCALTCTFNLKIEGQLLETSGLCIPANNTLFIVSISKTLAANEPHLTLEFLEECISGFSKSSIELKHLCLEYMTPWLSNLVRFCKHNDDAKRQRVTAILDKLITMTINEKQMYPSIQAKIWGSLGQITDLLDVVLDSFIKTSATGGLGSIKAEVMADTAVALASGNVKLVSSKVIGRMCKIIDKTCLSPTPTLEQHLMWDDIAILARYMLMLSFNNSLDVAAHLPYLFHVVTFLVATGPLSLRASTHGLVINIIHSLCTCSQLHFSEETKQVLRLSLTEFSLPKFYLLFGISKVKSAAVIAFRSSYRDRSFSPGSYERETFALTSLETVTEALLEIMEACMRDIPTCKWLDQWTELAQRFAFQYNPSLQPRALVVFGCISKRVSHGQIKQIIRILSKALESCLKGPDTYNSQVLIEATVIALTKLQPLLNKDSPLHKALFWVAVAVLQLDEVNLYSAGTALLEQNLHTLDSLRIFNDKSPEEVFMAIRNPLEWHCKQMDHFVGLNFNSNFNFALVGHLLKGYRHPSPAIVARTVRILHTLLTLVNKHRNCDKFEVNTQSVAYLAALLTVSEEVRSRCSLKHRKSLLLTDISMENVPMDTYPIHHGDPSYRTLKETQPWSSPKGSEGYLAATYPTVGQTSPRARKSMSLDMGQPSQANTKKLLGTRKSFDHLISDTKAPKRQEMESGITTPPKMRRVAETDYEMETQRISSSQQHPHLRKVSVSESNVLLDEEVLTDPKIQALLLTVLATLVKYTTDEFDQRILYEYLAEASVVFPKVFPVVHNLLDSKINTLLSLCQDPNLLNPIHGIVQSVVYHEESPPQYQTSYLQSFGFNGLWRFAGPFSKQTQIPDYAELIVKFLDALIDTYLPGIDEETSEESLLTPTSPYPPALQSQLSITANLNLSNSMTSLATSQHSPASLPCSKSAVFMQLFPHQGIDKENVELSPTTGHCNSGRTRHGSASQVQKQRSAGSFKRNSIKKIV

SEQ ID NO: 65587 - protein, 99 aa, Homo sapiens
MVSPPEKDDGQKGEEAVGSTEHPEEVTTQAEAAIEEGEVETEGEAAVEGEEEAVSYGDAESEEEYYYTETSSPEGQISAADTTYPYFSPPQELPGEEAY

SEQ ID NO: 65588 - protein, 106 aa, Homo sapiens
MASQLQVFSPPSVSSSAFCSAKKLKIEPSGWDVSGQSSNDKYYTHSKTLPATQGQANSSHQVANFNIPAYDQGLLLPAPAVEHIVVTAADSSGSAATSTFQSSQTL

SEQ ID NO: 65589 - protein, 161 aa, Homo sapiens
MLLQSQTMGVSHSFTPKGITIPQREKPGHMYQNEDYLQNGLPTETTVLGDLSSLTSNAVSSVTAGAGLFLLADSMVALRTASQHCGSEMDYLSSLPYSEYYYPIYEIKDCLLTSVSLTGVLVVMLIFTVLELLLAAYSSVFWWKQLYSNNPGSSFSSTQSQ

SEQ ID NO: 65590 - protein, 170 aa, Homo sapiens
ACIARNCYPSPLNYYNFPKSCCTSVNEVICHGIPDRRPLQEGDIVNVKPGVRYRELGNIIQKHAQANGFSVVRSYCGHGIHKLFHTAPNVPHYAKNKAVGVMKSGHVFTIEPMICEGGWQDETWPDGWTAVTRDGKRSAQFEHTLLVTDTGCEILTRRLDSARPHFMSQF

SEQ ID NO: 65591 - protein, 101 aa, Homo sapiens
MVGSHADMAPASTAEGAGEKPGPAAPAPAAQYECGECGKSFRWSSRLLHHQRTHTGERPYKCPDCPKAFKGSSALLYHQRGHTGERPYQCPDCPKAFKRSS

SEQ ID NO: 65592 - protein, 171 aa, Homo sapiens
RRSKKAESEGPAQPCPGPPKLVPSADLKAPHSMVAAFDYNPQESSPNMDVEAELPFRAGDVITVFGGMDDDGFYYGELNGQRGLVPSNFLEGPGPEAGGLDREPRTPQAESQDWGCTTQGSPGPPGGPCTPSSGSAPRIERGEPQGRSEKVWGFFSKGKQLLRRLGSGKKE

SEQ ID NO: 65593 - protein, 394 aa, Homo sapiens
MAPEVVKREPYGKPVDVWGCGVILFILLSGCLPFYGTKERLFEGIIKGKYKMNPRQWSHISESAKDLVRRMLMLDPAERITVYEALNHPWLKERDRYAYKIHLPETVEQLRKFNARRKLKGAVLAAVSSHKFNSFYGDPPEELPDFSEDPTSSGLLAAERAVSQVLDSLEEIHALTDCSEKDLDFLHSVFQDQHLHTLLDLYDKINTKSSPQIRNPPSDAVQRAKEVLEEISCYPENNDAKELKRILTQPHFMALLQTHDVVAHEVYSDEALRVTPPPTSPYLNGDSPESANGDMDMENVTRVRLVQFQKNTDEPMGITLKMNELNHCIVARIMHGGMIHRQGTLHVGDEIREINGISVANQTVEQLQKMLREMRGSITFKIVPSYRTQSSSCE

SEQ ID NO: 65594 - protein, 153 aa, Homo sapiens
SEAIPESLKNMLLVMDTAEIFHSADARGGGPSALWEITWERIDCFLPHLRDELFKQTVIQDFEKPESPRAASSSSPGSPVASSPSRLSPTPDGPPPLAQPPLILQPLASPLQVGVPPMTLPIILNPALIEATSPVPLLATPRPTDPIPTSEVN

SEQ ID NO: 65595 - protein, 108 aa, Homo sapiens
MGPLQFRDVAIEFSLEEWHCLDAAQRNLYRDVMLENYRNLIFLGIVVSKPNLITCLEQGKKPLTMKRHEMIAKPPGQARWLMPIIPALWRAKAGGSSEVRSSRKSGGP

SEQ ID NO: 65596 - protein, 82 aa, Homo sapiens
DPKYSGKMKVLQQLLNHCRKNRDKVLLFSFSTKLLDVLQQYCMASGLDYRRLDGSTKSEERLKIVKEFNSTQDVNICLVSTM

SEQ ID NO: 65597 - protein, 611 aa, Homo sapiens
MLASLEKDKTAPGSAQVAGLCGRLTLHRDLRTGRWEPDPQRSRRCLRDPQRVLEYCRQMYPELQIARVEQATQAIPMERWCGGSRSGSCAHPHHQVVPFRCLPGEFVSEALLVPEGCRFLHQERMDQCESSTRRHQEAQEACSSQGLILHGSGMLLPCGSDRFRGVEYVCCPPPGTPDPSGTAVGDPSTRSWPPGSRVEGAEDEEEEESFPQPVDDYFVEPPQAEEEEETVPPPSSHTLAVVGKVTPTPRPTDGVDIYFGMPGEISEHEGFLRAKMDLEERRMRQINEVMREWAMADNQSKNLPKADRQALNEHFQSILQTLEEQVSGERQRLVETHATRVIALINDQRRAALEGFLAALQADPPQAERVLLALRRYLRAEQKEQRHTLRHYQHVAAVDPEKAQQMRFQVHTHLQVIEERVNQSLGLLDQNPHLAQELRPQIQELLHSEHLGPSELEAPAPGGSSEDKGGLQPPDSKDDTPMTLPKGSTEQDAASPEKEKMNPLEQYERKVNASVPRGFPFHSSEIQRDELAPAGTGVSREAVSGLLIMGAGGGSLIVLSMLLLRRKKPYGAISHGVVEVDPMLTLEEQQLRELQRHGYENPTYRFLEERP

SEQ ID NO: 65598 - protein, 86 aa, Homo sapiens
MPMIGDRVFVHYTGWLLDGTKFDSSLDRKDKFSFDLGKGEVIKAWDIAIATMKVGEVCHITCKPEYAYGSAGSPPKIPPNATLVFE

SEQ ID NO: 65599 - protein, 115 aa, Homo sapiens
MPYMRYSRKVWDQVKASNPDLKLWEIGKIIGGMWRDLTDEEKQEYLNEYEAEKIEYNESMKAYHNSPAYLAYINAKSRAEAALEEESRQRQSRMEKGEPYMSIQPAEDPDAKTRS

SEQ ID NO: 65600 - protein, 140 aa, Homo sapiens
AFAGEIPKVLVAGDTMDSVKQSAALCLLRLYRTSPDLVPMGDWTSRVVHLLNDQHLGVVTAATSLITTLAQKNPEEFKTSVSLAVSRLSRIVTSASTDLQDYTYYFVPAPWLSVKLLRLLQCYPPPDPAVRGRLTECLET

SEQ ID NO: 65601 - protein, 274 aa, Homo sapiens
MAEGSFSVQSESYSVEDMDEGSDEVGEEEMVEGNDYEEFGAFGGYGTLTSFDIHILRAFGSLGPGLRILSNEPWELENPVLAQTLVEALQLDPETLANETAARAANVARAAASNRAARAAAAAARTAFSQVVASHRVATPQTSQMLVTSKMAAPEAPATSAQSQTGSPAQEAATEGPSSACAFSQAPCAREVDANRPSTAFLGQNDVFDFTQPAGVSGMAFPRPKRPAPAQEAATEGPSAASGVPQTGPGREVAATRPKTTKSGKALAKTRWVE

SEQ ID NO: 65602 - protein, 172 aa, Homo sapiens
MRRLNRKKTLSLVKELDAFPKVPESYVETSASGGTVYQDTWMKYEYEVDKDFSSKLRINIDITVAMKCQYVGADVLDLAETMVASADGLVYEPTVFDLSPQQKEWQRMLQLIQSRLQEEHSLQDVIFKSAFKSTSTALPPREDDSSQSPNACRIHGHLYVNKVAGNFHITVG

SEQ ID NO: 65603 - protein, 35 aa, Homo sapiens
MIKRVQNLLGHYLIHGFRVRPEPNGDLDLEAMVAV

SEQ ID NO: 65604 - protein, 182 aa, Homo sapiens
MLLHKSQDSWGMRIQHFGPRTWKERSFGRGAQLPALGELSHRRGGAPALRVAFLHRPALGASLLGGLRLLEPLPQLHLPVFLLSPALPPQLRPQCRGEPRVASAHLCLLLRGLHHPRKCFHCVHCLIPRAHAPHLHSLAVDQEAHSKSGGSQVLQLETAALHHQLHLLLLGAGCLLSAQHVL

SEQ ID NO: 65605 - protein, 306 aa, Homo sapiens
MAARVLIIGSGGREHTLAWKLAQSHHVKQVLVAPGNAGTACSEKISNTAISISDHTALAQFCKEKKIEFVVVGPEAPLAAGIVGNLRSAGVQCFGPTAEAAQLESSKRFAKEFMDRHGIPTAQWKAFTKPEEACSFILSADFPALVVKASGLAAGKGVIVAKSKEEACKAVQEIMQEKAFGAAGETIVIEELLDGEEVSCLCFTDGKTVAPMPPAQDHKRLLEGDGGPNTGGMGAYCPAPQVSNDLLLKIKDTVLQRTVDGMQQEGTPYTGILYAGIMLTKNGPKVLEFNCRFGDPECQVGNPPTS

SEQ ID NO: 65606 - protein, 144 aa, Homo sapiens
MGLHSWQCGQLRQPPRALRGQRWRAWSRMEPRSPAAAMPGHRTTPEKSKDRGSNTIGARLNRVEDKVTQLDQRLALITDMLHQLLSLHGGSTPGSGGPPREGGAHITQPCGSGGSVDPELFLPSNTLPTYEQLTVPRRGPDEGS

SEQ ID NO: 65607 - protein, 722 aa, Homo sapiens
MDEADFSEHTTYKQEDLPYDGDLSQIKIGNDYSFTSKKDGLEVLNQIIFIADDPQEKAMHSETCGNTAVTIPLGKITENAANKKDEKEKQCTAALHIPANEGDASKSSISDILLHHLSKEPFLRGQGIDCETLPEISNADSFEEEAIIKSIISCYNKNSWPKEQTPELTDQLNPKRDGENSNKPGSATTTEENTSDLEGPVAAGDSSHQENVNVLTKTKGPGDKQKSYQGQSPQKQQTEKANSGNTFKYGQGQVHYQLPDFSKIAPKVKIPKNKIINKPLAIAKQASFSSKSRDKPTLVQDSLETTPESNCVEKQHQEQKGKITEPSQQIQMEPIVHIHQELLTGIESEASLSKLSPTSQKGTSSSSSYIFQKISQGKQMCQKLKEQTDQLKTKVQEFSKRIKQDSPYHLQDKKLVLEKLQGHLELLEQNFLATKDKHLTLQQQVHKHESTIVGDFDPERKVEGEIFKLEMLLEDVKEKMDESKYTSAPSLPVSSPVTLDDLASTFSSLSNEAPNEELCELAPQTYLNGHYGDAAAQNKPDQVAMRLSSNSGEDPNGTPRRQDCAEMTAPSPSCAFCRRLLEWKQNVEKKGHGRINCGRFSIVLHEKAPHSDSTPNSDTGHSFCSDSGTEMQSNKCQDCGTKIPTSRRACRKEPTKEFHYRYNTPGQNYSNHSKRGAFVQPHSLDESKNSSPCLVHSPDTSKSSPTSGWQEAELGLENMKSQ

SEQ ID NO: 65608 - protein, 111 aa, Homo sapiens
  MOD_RES (1)..(1): Any amino acid
XLIPTHHFRNIERKPEYLQPEKCVPPPYPGPVGTMWFIRDGCGIACAIVTWFLVLYAEFVVLFVMLIPSRDYVYSIINGIVFNLLAFLALASHCRAMLTDPVRGSAQRKCH

SEQ ID NO: 65609 - protein, 123 aa, Homo sapiens
MEDSMDMDMSPLRPQNYLFGCELKADKDYHFKVDNDENEHQLSLRTVSLGAGAKDELHIVEAEAMNYEGSPIKVTLATLKMSVQPTGGSLPKVEAKFINYVKNCFRMTDQEAIQDLWQWRKSL

SEQ ID NO: 65610 - protein, 256 aa, Homo sapiens
  MOD_RES (1)..(1): Any amino acid
XESRNTEMLAAACAVGVGCCFAAPIGGVLFSIEVTSTFFAVRNYWRGFFAATFSAFIFRVLAVWNRDEETITALFKTRFRLDFPFDLQELPAFAVIGIASGFGGALFVYLNRKIVQVMRKQKTINRFLMRKRLLFPALVTLLISTLTFPPGFGQFMAGQLSQKETLVTLFDNRTWVRQGLVEELEPPSTSQAWNPPRANVFLTLVIFILMKEQHLGVWWVKAWLPGSQMEFIRTAAPTGLCLGATLWSGQLRWQER

SEQ ID NO: 65611 - protein, 182 aa, Homo sapiens
  MOD_RES (1)..(1): Any amino acid
XLFLPQHHFLWYVKQQLQRHADPRSETGQYATYCQRAVERTLRTGEREARPSRMEVVSILLRNPFHHSLPFSIPVHFTNGTYHVVGFDGSSTVDEFLQRLNQEIGMRKPSHSGFALFTDDPSGRDLEHCLQGSVKICDAISKWEQAMKELHPGKSEGCTFAVKSKGRRTENGCSLPLKPVER

SEQ ID NO: 65612 - protein, 192 aa, Homo sapiens
MDRAHRLGQTKQVTVYRLICKGTIEERILQRAKEKSEIQRMVISGGNFKPDTLKPKEVVSLLLDDEELEKKLRLRQEEKRQQEETNRVKERKRKREKYAEKKKKEDELDGKRRKEGVNLVIPFVPSADNSNLSADGDDSFISVDSAMPSPFSEISISSELHTGSIPLDESSSLAPDSLVRKQGKGTNPSGGR

SEQ ID NO: 65613 - protein, 85 aa, Homo sapiens
MEVRWFRSQFSPAVFVYKGGRERTEEQMEEYRGRTTFVSKDISRGSVALVIHNITAQENGTYRCYFQEGRSYDEAILHLVVAGLG

SEQ ID NO: 65614 - protein, 407 aa, Homo sapiens
MYDNLYLHGIEDSEAGSADSYTSRPSDSDVSLEEDREAIRQEREQQAAIQLERAKSKPVAFAVKTNVSYCGALDEDVPVPSTAISFDAKDFLHIKEKYNNDWWIGRLVKEGCEIGFIPSPLRLENIRIQQEQKRGRFHGGISITRVTADISLAKRSVLNNPSKRAIIERSNTRSSLAEVQSEIERIFELARSLQLVVLDADTINHPAQLIKTSLAPIIVHVKVSSPKVLQRLIKSRGKSQSKHLNVQLVAADKLAQCPPEMFDVILDENQLEDACEHLGEYLEAYWRATHTTSSTPMTPLLGRNLGSTALSPYPTAISGLQSQRMRHSNHSTENSPIERRSLMTSDENYHNERARKSRNRLSSSSQHSRDHYPLVEEDYPDSYQDTYKPHRNRGSPGGYSHDSRHRL

SEQ ID NO: 65615 - protein, 96 aa, Homo sapiens
MLATDRSHYAKCNPYMDSPQSIGFQATISAPHMHAYALELLFDQLHEGAKALDVGSGSGILTACFARMVGCTGKVIGIDHIKELVDDSVNNVRKDD

SEQ ID NO: 65616 - protein, 127 aa, Homo sapiens
MVCGGFACSKNALCALNVVYMTDVINASWWVMSNKTRDELERSFDCCGLFNLTTLYQQDYDFCTAICKSQSPTCQMCGEKFLKHSDEALKILGGVGLFFSFTEILGVWLAMRFRNQKDPRANPSAFL

SEQ ID NO: 65617 - protein, 140 aa, Homo sapiens
MFCVTPPELETKMNITKGGLVLFSANSNSSCMELSKKIAERLGVEMGKVQVYQEPNRETRVQIQESVRGKDVFIIQTVSKDVNTTIMELLIMVYACKTSCAKSIIGVIPYFPYSKQCKMRKRGSIVSKLLASMMCKAGLT

SEQ ID NO: 65618 - protein, 114 aa, Homo sapiens
DKTGFHFCGGSLISEDWVVTAAHCGVRTSDVVVAGEFDQGSDEENIQVLKIAKVFKNPKFSILTVNNDITLLKLATPARFSQTVSAVCLPSADDDFPAGTLCATTGWGKTKYNG

SEQ ID NO: 65619 - protein, 103 aa, Homo sapiens
MQAAALPEEIRWLLEDAEEFLAEGLRNENLSAVARDHRDHILRGFQQIKARYYWDFQPQGGDIGQDSSDDNHSGTLGLSLTSDAPFLSDYQDEGILRRMNRRV

SEQ ID NO: 65620 - protein, 109 aa, Homo sapiens
MTELPAPLSYFQNAQMSEDNHLSNTVRSQNDNRERQEHNDRRSLGHPEPLSNGRPQGNSRQVVEQDEEEDEELTLKYGAKHVIMLFVPVTLCMVVVVATIKSVSFYTRK

SEQ ID NO: 65621 - protein, 502 aa, Homo sapiens [sequence omitted]

SEQ ID NO: 65622 - protein, 84 aa, Homo sapiens
  MOD_RES (1)..(1): Any amino acid
XFNLLAVLSYLKFFNCQKHSLPLWAPRPNHVQCLPGQLRGRTSSDHSGSATGGGLWVPGHSEERLWETCALLASFPPGHLPHDI

SEQ ID NO: 65623 - protein, 205 aa, Homo sapiens
  MOD_RES (1)..(1): Any amino acid
XEKRRLKEEIERRRAEAAEKRQKMPEDGLSDDKKPFKCFTPKGSSLKIEERAEFLNKSVQKSSGVKSTHQAAIVSKIDSRLEQYTSAIEGTKSAKPTKPAASDLPVPAEGVRNIKSMWEKGNVFSSPTAAGTPNKETAGLKVGVSSRINEWLTKTPDGNKSPAPKPSDLRPGDVSSKRNLWEKQSVDKVTSPTKEPVSKETHAVK

SEQ ID NO: 65624 - protein, 95 aa, Homo sapiens
MALNIHAFSAGLGGAIGYVLGGLDWTQTFLGSWFRTQNQVLFFFAAIIFTVSVALHLFSIDEEQYSPQQERSAEEPGALDGGEPHGVPAFPDEVQ

SEQ ID NO: 65625 - protein, 427 aa, Homo sapiens
TRSRERADGTGPTKGDMEIPFEEVLERAKAGDPKAQTEVGKHYLQLAGDTDEELNSCTAVDWLVLAAKQGRREAVKLLRRCLADRRGITSENEREVRQLSSETDLERAVRKAALVMYWKLNPKKKKQVAVAELLENVGQVNEHDGGAQPGPVPKSLQKQRRMLERLVSSESKNYIALDDFVEITKKYAKGVIPSSLFLQDDEDDDELAGKSPEDLPLRLKQPHHRLLRLLHPAGHLLPVLHLHGDLHPQGVPGQQGLGELPHPHRPAAALRAQPGCGAGRGQLRLEPPGALCPFPALCLLRHLLLPHRQQGLHPLLGAGCHHRLLYRDQLPEPEHPCRALHAQGPGHRGHRRPAIAAALHALELALPEGPWPDLHHRACRPPGRPQRQRPVPALCLPALSLLPHGTAEEFQGHLLLPCALPGVLHVV

SEQ ID NO: 65626 - protein, 540 aa, Homo sapiens
MLNYDAASGTMRKSQAKYGISGEKDVSPDLSCADEISECYHKLDSLTYKIDECEKKKREDYESQSNPVFRRYLNKILIEAGKLGLPDENKGDMHYDAEIILKRETLLEIQKFLNGEDWKPGALDDALSDILINFKFHDFETWKWRFEDSFGVDPYNVLMVLLCLLCIVVLVATELWTYVRWYTQLRRVLIISFLFSLGWNWMYLYKLAFAQHQAEVAKMEPLNNVCAKKMDWTGSIWEWFRSSWTYKDDPCQKYYELLLVNPIWLVPPTKALAVTFTTFVTEPLKHIGKGTGEFIKALMKEIPALLHLPVLIIMALAILDLFAVLKIEAHKQLLLKSFCYGAGKSVHVLRHIGGPESEPPQALRPRDRRRQEEIDYRPDGGAGDADFHYRGQMGPTEQGPYAKTYEGRREILRERDVDLRFQTGNKSPEVLRAFDVPDAEAREHPTVVPSHKSPVLDTKPKETGGILGEGTPKESSTESSQSAKPVSGQDTSGNTEGSPAAEKAQLKSEAAGSPDQGSTYSPARGVAGPRGQDPVSSPCG

SEQ ID NO: 65627 - protein, 207 aa, Homo sapiens
  MOD_RES (1)..(1): Any amino acid
XFMAPELLQGEEYDFSVDYFALGVTLYEMIAARGPFRARGEKVENKELKHRIISEPVKYPDKFSQASKDFCEALLEKDPEKRLGFRDETCDKLRAHPLFKDLNWRQLEAGMLMPPFIPDSKTVYAKDIQDVGAFSTVKGVAFDKTDTEFFQEFATGNCPIPWQEEMIETGIFGELNVWRSDGQMPDDMKGISGGSSSSSKSGMCLVS

SEQ ID NO: 65628 - protein, 56 aa, Homo sapiens
MISASRAAAARLVGAAASRGPTAARHQDSWNGLSHEAFRLVSRRDYASNQGSSCWY

SEQ ID NO: 65629 - protein, 71 aa, Homo sapiens
MGCASAKHVATVQNEEEAQKGKNYQNGDVFGDEYRIKPVEEVKYMKNGAEEEQKIAARNQENLHCGQNQTE

SEQ ID NO: 65630 - protein, 126 aa, Homo sapiens
MKSCGVSLATAAAAAAAFGDEEKKMAAGKASGESEEASPSLTAEEREALGGLDSRLFGFVRFHEDGARTKALLGKAVRCYESLILKAEGKVESDFFCQLGHFNLLLEDYPKECCLFIWSWFGLLPL

SEQ ID NO: 65631 - protein, 328 aa, Homo sapiens
MSLMVVSMACVGFFLLQGAWPHEGGQDKPFLSAWPSPVVSEGEHVALQCRSRLGFNEFSLSKEDGMPVPELYNRVFRNTVFIGPVTPAHAGTYRCRGSHPHFLTGWSAPSNPLVIMVTGVHRKPSLLAHPGPLVKSEETVILQCWSDVMFEHFLLHREGKFNDTLRLTGELHDGVSKANFSIGRMTQDLAGTYRCYGSVPHSPYQLSAPSDPLDIVITGLCGKPSLSAQPRPMVKAGESVTLSCSSRSSYDIYHLSRDGEAHELRFPAVPKVNGTFQANFPLGPATHGGTYRCFGSFRDSPYEWSDLSDPLLVSVTDSMKEKGKDVIL

SEQ ID NO: 65632 - protein, 14 aa, Homo sapiens
MTEYKLVVVGAGGV

SEQ ID NO: 65633 - protein, 94 aa, Homo sapiens
VLFPLLTKLLENISPADVGGMEETRMRASTLLSKSEAIPESLKNMLLVMDTAEIFHSADARGGGPSALWEITWERIDCFLPHLRDELFKQTVIQ

SEQ ID NO: 65634 - protein, 191 aa, Homo sapiens
MTPALTALLCLGLSLGPRTRVQAGPFPKPTLWAEPGSVISWGSPVTIWCQGSLEAQEYRLDKEGSPEPLDRNNPLEPKNKARFSIPSMTEHHAGRYRCHYYSSAGWSEPSDPLELVMTGFYNKPTLSALPSPVVASGGNMTLRCGSQKGYHHFVLMKEGEHQLPRTLDSQQLHSGGFQALFPVGPVNPSHS

SEQ ID NO: 65635 - protein, 16 aa, Homo sapiens
  MOD_RES (1)..(1): Any amino acid
XSYEQYVGPGTRLTVT

SEQ ID NO: 65636 - protein, 32 aa, Homo sapiens
MAIMLLCLLQLAAPLCSYSITIRFYLFWLNTP

SEQ ID NO: 65637 - protein, 394 aa, Homo sapiens
  MOD_RES (1)..(1): Any amino acid
XKLCNVLDRLNVIAESVVKKTGFFVNRPDSYCSILRPDEKWNELGGCVIPTGRLQTGILRTNCVDCLDRTNTAQFMVGKCALAYQLYSLGLIDKPNLQFDTDAVRLFEELYEDHGDTLSLQYGGSQLVHRVKTYRKIAPWTQHSKDIMQTLSRYYSNAFSDADRQDSINLFLGVFHPTEGKPHLWELPTDFYLHHKNTMRLLPTRRSYTYWWTPEVIKHLPLPYDEVICAVNLKKLIVKKFHKYEEEIDIHNEFFRPYELSSFDDTFCLAMTSSARHTLGAVSLPEARSLIHQKSWNCCVFGIYCGIWSGFSSNVTLCLRPLELIQVHLLCVNQMKLENQYWETKAIEKKLYYSGKRQPAPRRPPARRLCPAALRMTLGLIGKKRALCLSAPLP

SEQ ID NO: 65638 - protein, 7076 aa, Homo sapiens
MKGARWRRVPWVSLSCLCLCLLPHVVPGTTEDTLITGSKTPAPVTSTGSTTATLEGQSTAASSRTSNQDISASSQNHQTKSTETTSKAQTDTLTQMMTSTLFSSPSVHNVMETVTQETAPPDEMTTSFPSSVTNTLMMTSKTITMTTSTDSTLGNTEETSTAGTESSTPVTSAVSITAGQEGQSRTTSWRTSIQDTSASSQNHWTRSTQTTRESQTSTLTHRTTSTPSFSPSVHNVTGTVSQKTSPSGETATSSLCSVTNTSMMTSEKITVTTSTGSTLGNPGETSSVPVTGSLMPVTSAALVTVDPEGQSPVTFSRTSTQDTTAFSKNHQTQSVETTRVSQINTLNTLTPVTTSTVLSSPSGFNPSGTVSQETFPSGETTISSPSSVSNTFLVTSKVFRMPISRDSTLGNTEETSLSVSGTISAITSKVSTIWWSDTLSTALSPSSLPPKISTAFHTQQSEGAETTGRPHERSSFSPGVSQEIFTLHETTTWPSSFSSKGHTTWSQTELPSTSTGAATRLVTGNPSTGAAGTIPRVPSKVSAIGEPGEPTTYSSHSTTLPKTTGAGAQTQWTQETGTTGEALLSSPSYSVTQMIKTATSPSSSPMLDRHTSQQITTAPSTNHSTIHSTSTSPQESPAVSQRGHTQAPQTTQESQTTRSVSPMTDTKTVTTPGSSFTASGHSPSEIVPQDAPTISAATTFAPAPTGDGHTTQAPTTALQAAPSSHDATLGPSGGTSLSKTGALTLANSVVSTPGGPEGQWTSASASTSPDTAAAMTHTHQAESTEASGQTQTSEPASSGSRTTSAGTATPSSSGASGTTPSGSEGISTSGETTRFSSNPSRDSHTTQSTTELLSASASHGAIPVSTGMASSIVPGTFHPTLSEASTAGRPTGQSSPTSPSASPQETAAISRMAQTQRTRTSRGSDTISLASQATDTFSTVPPTPPSITSSGLTSPQTQTHTLSPSGSGKTFTTALISNATPLPVTYASSASTGHTTPLHVTDASSVSTGHATPLPVTDTSSESTGHATPLPVTSPSSVSTGHTTPLPVTDTSSESTGHVTPLPVTSLSSASTGDSTPLPVTDTSSASTGHVTPLPVTSLSSASTGDTTPLPVTDTSSASTGHATSLPVTDTSSVSTGHTTPLPVTDTSSASTGHATSLPVTDTSSVSTAHATPLPVTGLSSASTDDTTRLPVTDVSSASTGQAIPLPVTSPSSASTGDTTPLPVTDASSASTGDTTSLPVTIPSSASSGHTTSLPVTDASSVSTGHATSLLVTDASSVSTGDTTPLPVTDTNSASTGDTTPLHVTDASSVSTGHATSLPVTSLSSASTGDTTPLPVTSPSSASSGHTTPLPVTDASSVPTGHATSLPVTDASSVSTGHATPLPVTDASSVSTGHATPLPVTDTSSVSTGQATPLPVTSLSSASTGDTTPLPVTDTSSASTGQDTPLPVTSLSSVSTGDTTPLPVTSPSSASTGHATPLLVTDASSVSTGHATSLLVTDASSVSTGHATALHVTDASSLSTGDTTPLPVTSPSSASTGDTTPLPVTDTSSASTGHATSLPVTDTSSASTGHATPLPVTDTSSASTGQATPLPVTGPSSASTGHAIPLLVTDTSSASTGQATPLPVTSLSSASTGDTTPLPVTDASSVSTGHATSLPVTSLSSVSTGDTTPLPVTSPSSASSGHTTPLPVTDASSVSTGDTTPLPVTSPSSASSGHTTPLPVTSPSSASSGHTTPLPVTDASSASTGDTTPLPVTDTSSASTGHATHLPVTGLSSASTGDTTRLPVTNVSSASTGHATPLPVTSTSSASTGDTTPLPGTDTSSVSTGHTTPLLVTDASSVSTGDTTRLPVTSPSSASTGHTTPLPVTDTPSASTGDTTPLPVTNASSLSTRHTTSLHVTSPSSASTGHATSLPVTDTSSVSTGHATPLHVTSPSSASTGDTTPLPVTDTYSASTGQATPLPVTDTSSASTGDTTPLPVTDTSSASTGHATPLPVTNTSSVSTGHATPLHVTSPSSASTGHTTPLPVTDASSVSTGHATSLPVTDASSVFTGHATSLPVTIPSSASSGHTTPLPVTDASSVSTGHATSLPVTDASSVSTGHATPLPVTDASSVSTGHATPLPVTDTSSVSTGHATPLPLTSLSSVSTGDTTPLPVTDTSSASTGQATPLPVTSLSSVSTGDTTPLPVTDTSSASTGHATSLPVTDTSSASTGHATPLPDTDTSSASTGHATPLPVTDTSSASTGHATLLPVTDTSSASIGHATPLPVTDTSSISTGHATPLHVTSPSSASTGHATPLPVTDTSSASTGHANPLHVTSPSSASTGHATPLPVTDTSSASTGHATPLPVTSLSSVSTGDTTPLPVTSPSSASTGHTTPLPVTDTSSASTGQATALPVTSTSSASTGDTTPLPVTDTSSASTGQATPLPVTSLSSVSTGDTTPLPVTSPSSASTGHATPLLVTDASSASTGQATPLPVTDTSSAYTGDTTSLPVTDTSSSSTGDTTPLLVTETSSASTGHATPLHVTSPSSASTGDTTPVPVTDTSSVSTGHATPLPVTGLSSASTGDTTRLPVTDISSASTGQATPLPVTNTSSASTGHATPLPVTGLSSASTGDTTRLPVTDISSASTGQATPLPVTNTSSVSTGDTMPLPVTSPSSASTGHATPLPVTSTSSASTGHATPVPVTSTSSASTGHTTPLPVTDTSSASTGDTTPLPVTSPSSASTGHTTPLHVTIPSSASTGDTSTLPVTGASSASTGHATPLPVTDTSSVSTGHATPLPVTSFSSVSTGDTTPLPVTDTSSVSTGHATPLPVTSFSSVSTGDTTPLPVTDASSASTGHATPLPVTDTSSVSTGHATPLPLTSLSSVSTGDTTTLPVTDTSSVSTGHATPLPVTSFSSVSTGDTTPLPVTDASSASTGHATPLPVTDTSSVSTGHATPLPVTSLSSVSTGDTTPLPVTDASSASTGQATPLPVTSLSSVSTGDTTPLPVTIPSSASSGHTTSLPVTDTSSASTGQATPLPVTSLSSVSTGDTTPLLVTDASSVSTGHATPLPVTDTSSASTGDTTRLPVTDTSSASTGQATPLPVTSLSSVSTGDTTPLLVTNTSSVSRGHATSLPVTIPSSSSSGHTTPLPVTSTSSVSTGHVTPLPVTSTSSASTGHATSLPVTDTSSVSTGHATSLPVTDTSSVSTGHATPLPVTDASSVSTGHATPLPVTDASSASTGDTTPLPVTNTSSASTGQATPLPVTSLSSVSTGDTMPLPVTSPSSASTGHATPLPVTGLSSASTGDTTPLPVTDTSSASTGHVTPLPVTSLSSASTGDSTPLPVTDTSSASTGHVTPLPVTSLSSASTGDTTPLPVTDTSSASTGHATPLHVTDASSASTGQATLLPVTSLSSVSTGDTTPLPVTSPSSASTGHATPLLVTDTSSASTGHATPLPVTDASSVSTGHATSLPVTIRSSGSTGHTTPLPVTDTSSASTGQATSLLVTDTSSVSTGDTTPLPVTSTSSASTGHVTPLHVTSPSSASTGHATPLPVTSLSSASTGDTMPLPVTSPSSASTGDTTPLPVTDASSVSTGHTTPLPVTSPSSASTGHTTPLPVTDTTSASKGDTTPLPVTSPSSASTGHTTPLPVTDTSSASTGDTTPLPVTSPSSASTGHATPLPVTNASSLSTGHATPLHVTSPSSASTGHATPLPVTSTSSASTGHATSLPVTSTSSASTGHATPLPVTDNSSVSTGHATPLPVTGLSSATTDDTTRLPVTDVSSASTGQATPLPVTSLSSVSTGDTTPLPVTSPSSASTGHASPLLVTDASSASTGQATPLPVTDTSSVSTAHATPLPVTGLSSASTDDTTRLPVTDVSSASTGQAIPLPVTSPSSASTGDTTPLPVTDASSASTGDTTSLPVTIPSSASSGHTTSLPVTDASSVSTGHATSLLVTDASSVSTGDTTPLPVTDTNSASTGDTTPLHVTDASSVSTGHATSLPVTSLSSASTGDTTPLPVTSPSSASSGDTTPLPVTDTSSASTGHATHLPVTGLSSASTGDTTRLPVTNVSSASTGHATPLPVTSTSSASTGDTTPLPGTDTSSVSTGHTTPLLVTDASSVSTGDTTRLPVTSPSSASTGHTTPLHVTDASSVSTGHTTPLPVTDTSSASTGQATSLLVTDTSSVSTGDTTPLPVTSTSSASTGHVTPLHVTSPSSASTGHATPLPVTSLSSASTGDTTPLPVTDTSSVSTGHTTPLPVTSPSSASTGHTTPLPVTDTSSASKGDTTPLPVTSPSSASTGHTTPLPVTDTSSASTGDTTPLPVTNASSLSTGHATPLHVTSPSSASTGHATPLPVTSTSSASTGHATPLPVTSTSSASTGHATPLPVTDNSSVSTGHATPLPVTGLSSATTDDTTRLPVTDVSSASTGQATPLPVTSLSSVSTGDTTPLPVTSPSSASTGHASPLLVTDASSASTGQATPLPVTDTSSVSTAHATPLPVTGLSSASTDDTTRLPVTDVSSASTGQAIPLPVTSPSSASTGDTTPLPVTDASSASTGDTTSLPVTIPSSASSGHTTSLPVTDASSVSTGHATSLLVTDASSVSTGDTTPLPVTDTNSASTGDTTPLHVTDASSVSTGHATSLPVTSLSSASTGDTTPLPVTSPSSASSGHTTSLPVTDASSVSTGHATSLPVTIPSSASSGHTTPLPVTDASSVPTGHATSLPVTDASSVSTGHATPLPVTDASSVSTGHATPLPVTDTSSVSTGQATPLPVTSLSSASSTGDTTPLPVTDTSSASTGQDTPLPVTSLFSVSTGDTTPLPVTSPSSASTGHATHLLVTDASSVSTGHATSLLVTDASSVSTGHATALHVTDASSLSTGDTTPLPVTSPSSASTGDTTPLPVTDTSSVSTGHATSLPVTDTSSASTGHATSLPVTDTSSASTGQATPLPVTSPSSASTGHAIPLLVTDTSSASTGQATPLPVTSLSSASTGDTTPLPVTDASSVSTGHATSLPVTSLSSVSTGDTTPLPVTSPSSASTGHATPLHVTSPSSASTGHATPLPVTSLSSASTGDTTPLPVTSPSSASTGHATPLHVTDASSVSTGDTTPLPVTSPSSASSGHTTPLPVTDASSASTGDTTPLPVTDTSSASTGHATHLPVTGLSSASTGDTTRLPVTDVSSASTGHATPLPVTSTSSASTGDTTPLPGTDTSSVSTGHTTPLLVTDASSVSTGDTTRLPVTSPSSASTGHTTPLPVTDTPSASTGDTTPLPVTNASSLSTRHATSLHVTSPSSASTGHATPLPVTDTSAASTGHATPLPVTSTSSASTGDTTPLPVTDTSSASTGHATPLPVTNTSSVSTGHATPLHVTSPSSASTGHTTPLPVTDASSVSTGHATSLPVTDASSVSTGHATPLPVTDASSVSTGHATPLPLTSLSSVSTGDTTPLPVTDTSSASTGQATPLPVTSLSSVSTGDTTPLPVTDTSSASTGHATSLPVTDTSSASTGHATPLPVTDTSSISTGHATPLHVTSPSSASTGHATPLPVTDTSSASTGHATPLPVTSLSSVSTGDTTPLPVTSPSSASTGHATPLLVTDASSASTGQATPLPVTSLSSVSTGDTTPLPVTSPSSASTGHATSLPVTDTSSASTGDTTSLPVTDTSSAYTGDTTSLPVTDTSSSSTGDTTPLLVTETSSASTGDTTPVPVTDTSSVSTGHATPLPVTGLSSASTGDTTRLPVTDISSASTGQATPLPVTNTSSVSTGDTMPLPVTSPSSASTGHATPLPVTSTSSASTGHATPVPVTSTSLASTGHTTPLPVTSPSSASTGHTTPLPVTDTSSASTGDTTPLPVTNASSLSTGHTTPLHVTIPSSASTGDTSTLPVTGASSASTGHATPLPVTDTSSVSTGHATPLPVTSFSSVSTGDTTPLPVTDASSASTGHATPLPVTDTSSASTGDTTPLPVTDASSASTGQATPLPVTSLSSVSTGDTTPLPVTIPSSASSGHTTSLPVSDTSSASTGQATPLPVTSLSSVSTGDTTPLLVTDASSVSTGHATPLPVTDTSSASTGDTTRLPVTDTSSASTGQATPLPVTSLSSVSTGDTTPLLVTNTSSVSTGHATSLPVTIPSSSSSGHTTPLPVTSTSSVSTGHVTPLHVTSPSSSSTGQATPLPVTSTSSVSTGHVTPLHVTSPSSASTGHATPLPVTSTSSASTGHATPLPVTDASSVSTGHATPLPVTDTSSASTGDTTPLPVTDTSSASTGQATPLPVTSLSSVSTGHATPLAVSSATSASTVSSDSPLKMETSGMTTPSLKTDGGRRTATSPPPTTSQTIISTIPSTAMHTRSTAAPIPILPERGVSLFPYGADAGDLEFVRRTVDFTSPLFKPATGFPLGSSLRDSLYFTDNGQIIFPESDYQIFSYPNPLPTGFTGRDPVALVAPFWDDADFSTGRGTTFYQEYETFYGEHSLLVQQAESWIRKMTNNGGYKARWALKVTWVNAHAYPAQWTLGSNTYQAILSTDGSRSYALFLYQSGGMQWDVAQRSGNPVLMGFSSGDGYFENSPLMSQPVWERYRPDRFLNSNSGLQGLQFYRLHREERPNYRLECLQWLKSQPRWPSWGWNQVSCPCSWQQGRRDLRFQPVSIGRWGLGSRQLCSFTSWRGGVCCSYGPWGEFREGWHVQRPWQLAQELEPQSWCCRWNDKPYLCALYQQRRPHVGCATYRPPQPAWMFGDPHITTLDGVSYTFNGLGDFLLVGAQDGNSSFLLQGRTAQTGSAQATNFIAFAAQYRSSSLGPVTVQWLLEPHDAIRVLLDNQTVTFQPDHEDGGGQETFNATGVLLSRNGSEVSASFDGWATVSVIALSNILHASASLPPEYQNRTEGLLGVWNNNPEDDFRMPNGSTIPPGSPEEMLFHFGMTWQINGTGLLGKRNDQLPSNFTPVFYSQLQKNSSWAEHLISNCDGDSSCIYDTLALRNASIGLHTREVSKNYEQANATLNQYPPSINGGRVIEAYKGQTTLIQYTSNAEDANFTLRDSCTDLELFENGTLLWTPKSLEPFTLEILARSAKIGLASALQPRTVVCHCNAESQCLYNQTSRVGNSSLELWGALSCVRTSPAL

SEQ ID NO: 65639 - protein, 38 aa, Homo sapiens
MNHTVQTFFSPVNSGQPPNYEMLQEAGWLAQSLSPAIH

SEQ ID NO: 65640 - protein, 152 aa, Homo sapiens
MLQTTWPQESVTFEDVAVYFTQNQWASLDPAQRALYGEVMLENYANVASLVAFPFPKPALISHLERGEAPWGPDPWDTEILRGISQGGESWIKNEGLVIKQEASEETELHRMPVGGLLRNVSQHFDFKRKALKQTFNLNPNLILRGGMKFYE

SEQ ID NO: 65641 - protein, 112 aa, Homo sapiens
  MOD_RES (1)..(1): Any amino acid
XVGKVTPLQRVHDGEKHFECSFCGKSFRVHAQLTRHQKIHTDEKTYKCMECGKDFRFHSQLTEHQRIHTGRLNNLLLEEAEKTMEGKWKLLTYSFPHAGVHLYLRFSCRKKS

SEQ ID NO: 65642 - protein, 833 aa, Homo sapiens
MNYIFGNNTLLYSRGSRGGNTSSSHGSAGPKQKHWAKKGSSDELQAEPEPSRWQQIVAFFTRRHSFIDCISVATSSTQPTEAVLPSPPTVPVIPVLPVPAENTVILPTIPQANPPPVLVNTDSLETPTYVNGTDADYEYEEITLERGNSGLGFSIAGGTDNPHIGDDSSIFITKIITGGAAAQDGRLRVNDCILRVNEVDVRDVTHSKAVEALKEAGSIVRLYVKRRKPVSEKIMEIKLIKGPKGLGFSIAGGVGNQHIPGDNSIYVTKIIEGGAAHKDGKLQIGDKLLAVNNVCLEEVTHEEAVTALKNTSDFVYLKVAKPTSMYMNDGYAPPDITNSSSQPVDNHVSPSSFLGQTPASPARYSPVSKAVLGDDEITREPRKVVLHRGSTGLGFNIVGGEDGEGIFISFILAGGPADLSGELRKGDRIISVNSVDLRAASHEQAAAALKNAGQAVTIVAQYRPEEYSRFEAKIHDLREQMMNSSISSGSGSLRTSQKRSLYVRALFDYDKTKDSGLPSQGLNFKFGDILHVINASDDEWWQARQVTPDGESDEVGVIPSKRRVEKKERARLKTVKFNSKTRDKGEIPDDMGSKGLKHVTSNASDSESSYLILITDEYGCSKGGQEEYVLSYEPVNQQEVNYTRPVIILGPMKDRINDDLISEFPDKFGSCVPHTTRPKRDYEVDGRDYHFVTSREQMEKDIQEHKFIEAGQYNNHLYGTSVQSVREVAEKGKHCILDVSGNAIKRLQIAQLYPISIFIKPKSMENIMEMNKRLTEEQARKTFERAMKLEQEFTEHFTAIVQGDTLEDIYNQVKQIIEEQSGSYIWVPAKEKL

SEQ ID NO: 65643 - protein, 218 aa, Homo sapiens
MARKALKLASWTSMALAASGIYFYSNKYLDPNDFGAVRVGRAVATTAVISYDYLTSLKSVPYGSEEYLQLRSKVHLRSARRLCELCCANRGTFIKVGQHLGALDYLLPEEYTSTLKVLHSQAPQSSMQEIRQVIREDLGKEVLVLAVKQLFPEFEFMWLVDEAKKNLPLELDFLNEGRNAEKVSQMLRHFDFLKPGQQSETASQGTTTTTKKKWDRKL

SEQ ID NO: 65644 - protein, 194 aa, Homo sapiens
MATLSLTVNSGDPPLGALLAVEHVKDDVSISVEEGKENILHVSENVIFTDVNSILRYLARVATTAGLYGSNLMEHTEIDHWLEFSATKLSSCDSFTSTINELNHCLSLRTYLVGNSLSLADLCVWATLKGNAAWQEQLKQKKAPVHVKRWFGFLEAQQAFQSVGTKWDVSTTKARVLLTHWACKSCSSEPALPG

SEQ ID NO: 65645 - protein, 108 aa, Homo sapiens
YSIKEFKEVEKVQLHSRFPQISNSRHFITPNEWLKLPTRYIESEFCRRRRNKGSSFLEREPLCYQEGNNPSAKEAISEGYFSSLSLSQEREEDQDGSSLCRCDHPSNS

SEQ ID NO: 65646 - protein, 70 aa, Homo sapiens
MSERCCSRYSQAGVQWHDLGSLQPPPLCSSGSPTSVSLIAGITDLRSIYRLHANINTGEDGLQAHCPGDL

SEQ ID NO: 65647 - protein, 594 aa, Homo sapiens
MGLPEPGPLRLLALLLLLLLLLLLQLQHLAAAAADPLLGGQGPAKDCEKDQFQCRNERCIPSVWRCDEDDDCLDHSDEDDCPKKTCADSDFTCDNGHCIHERWKCDGEEECPDGSDESEATCTKQVCPAEKLSCGPTSHKCVPASWRCDGEKDCEGGADEAGCATLCAPHEFQCGNRSCLAAVFVCDGDDDCGDGSDERGCADPACGPREFRCGGDGGGACIPERWVCDRQFDCEDRSDEAAELCGRPGPGATSAPAACATASQFACRSGECVHLGWRCDGDRDCKDKSDEADCPLGTCRGDEFQCGDGTCVLAIKHCNQEQDCPDGSDEAGCLQGPTPALPPLLLGSWTFRSPCPSPGLNECLHNNGGCSHICTDLKIGFECTCPAGFQLLDQKTCGDIDECKDPDACSQICVNYKGYFKCECYPGYEMDLLTKNCKAAAGKSPSLIFTNRHEVRRIDLVKRNYSRLIPMLKNVVALDVEVATNRIYWCDLSYRKIYSAYMDKASDPKEQEVLIDEQLHSPEGLAVDWVHKHIYWTDSGNKTISVATVDGGRRRTLFSRNLSEPRAIAVDPLRGSAEPALVLGRLQATPTVQH

SEQ ID NO: 65648 - protein, 122 aa, Homo sapiens
MGCNMCVVQKPEEQYKVMLQVNGKELSKLSQEQTLQALRSSKEPLVIQVLRRSPRLRGDSSCHDLQLVDSGTQTDITFEHIMALGKLRPPTPPMVILEPYVLSELAEGGPSCPGRRCRKCQG

SEQ ID NO: 65649 - protein, 382 aa, Homo sapiens
MAVLFLLLFLCGTPQAADNMQAIYVALGEAVELPCPSPPTLHGDEHLSWFCSPAAGSFTTLVAQVQVGRPAPDPGKPGRESRLRLLGNYSLWLEGSKEEDAGRYWCTVLGQHHNYQNWRVYDVLVLKGSQLSARAADGSPCNVLLCSVVPSRRMDSVTWQEGKGPVRGRVQSFWGSEAALLLVCPGEGLSEPRSRRPRIIRCLMTHNKGVSFSLAASIDASPALCAPSTGWDMPWILMLLLTMGQGVVILALSIVLWRQRVRGAPGRGNRMRCYNCGGSPSSSCKEAVTTCGEGRPQPGLEQIKLPGNPPVTLIHQHPACVAAHHCNQVETESVGDVTYPAHRDCYLGDLCNSAVASHVAPAGILAAAATALTCLLPGLWSG

SEQ ID NO: 65650 - protein, 399 aa, Homo sapiens
  MOD_RES (1)..(1): Any amino acid
XLWLLVLCALLLLLVQLLRFLRADGDLTLLWAEWQGRRPEWELTDMVVWVTGASSGIGEELAYQLSKLGVSLVLSARRVHELERVKRRCLENGNLKEKDILVLPLDLTDTGSHEAATKAVLQEFGRIDILVNNGGMSQRSLCMDTSLDVYRKLIELNYLGTVSLTKCVLPHMIERKQGKIVTVNSILGIISVPLSIGYCASKHALRGFFNGLRTELATYPGIIVSNICPGPVQSNIVENSLAGEVTKTIGNNGDQSHKMTTSRCVRLMLISMANDLKEVWISEQPFLLVTYLWQYMPTWAWWITNKMGKKRIENFKSGVVRPISKFLNSMYQSCRKVQNFPVFKKLSGWVQWLMSVIPALWEAKADHLRPGVQDQPGQHSETPSLLKIQKVAGHGGACL

SEQ ID NO: 65651 - protein, 51 aa, Homo sapiens
AQRYEAASTIYGPHTLSAYIQLFRNLAKAIATELHLWKSSLWMQLFMKLQL

SEQ ID NO: 65652 - protein, 100 aa, Homo sapiens
MNSGGGFGLGLGFGLTPTSVIQVTNLSSAVTSEQMRTLFSFLGEIEELRLYPPDNAPLAFSSKVCYVKFRDPSSVGVAQHLTNTVFIDRALIVVPCAEDD

SEQ ID NO: 65653 - protein, 73 aa, Homo sapiens
  MOD_RES (1)..(1): Any amino acid
XSSTAGHTAGSGPMPAPSAGSASTTARTSAPTAGRTQVKKRKRKQILVTPLSKSSLKARLAAHSAIIPALWKA

SEQ ID NO: 65654 - protein, 48 aa, Homo sapiens
MKSDCMQTTICQERKKDPIEMFHSGQLVKVCAPMVRYSKRWKFYHIKL

SEQ ID NO: 65655 - protein, 166 aa, Homo sapiens
MGGCMHSTQDKSLHLEGDPNPSAAPTSTCAPRKMPKRISISKQLASVKALRKCSDLEKAIATTALIFRNSSDSDGKLEKAIAKDLLQTQFRNFAELPFTFYHEWKQPEVLTTCRCLILNFPAIRIGQETKPKYREILSELDEHTENKLDFEDFMILLLSITVMSDL

SEQ ID NO: 65656 - protein, 238 aa, Homo sapiens
  MOD_RES (1)..(1): Any amino acid
XPHPETQDSSTQTDTSHSGITNKLQHLKESHEMGQALQQARNVMQSWVLISKELISLLHLSLLHLEEDKTTVSQESRRAETLVCCCFDLLKKLRAKLQSLKAEREEARHREEMALRGKDAVGLHAKQEELVQQTVSLTSTLQQDWRSMQLDYTTWTALLSRSRQLTEKLTVKSQQALQERDVAIEEKQEVSRVLEQVSAQLEECKGQTEQLELENSRLATDLRAQLQILANMDSQLKE

SEQ ID NO: 65657 - protein, 205 aa, Homo sapiens
MFDTTPHSGRSTPSSSPSLRKRLQLLPPSRPPPEPEPGTMVEKGSDSSSEKGGVPGTPSTQSLGSRNFIRNSKKMQSWYSMLSPTYKQRNEDFRKLFSKLPEAERLIVDYSCALQREILLQGRLYLSENWICFYSNIFRWETTISIQLKEVTCLKKEKTAKLIPNAIQICTESEKVTEDPVTGPRGPPLSRPPPPNMQSPICSAP

SEQ ID NO: 65658 - protein, 437 aa, Homo sapiens
MPGFDYKFLEKPKRRLLCPLCGKPMREPVQVSTCGHRFCDTCLQEFLSEGVFKCPEDQLPLDYAKIYPDPELEVQVLGLPIRCIHSEEGCRWSGPLRHLQGHLNTCSFNVIPCPNRCPMKLSRRDLPAHLQHDCPKRRLKCEFCGCDFSGEAYESHEGMCPQESVYCENKCGARMMRRLLAQHATSECPKRTQPCTYCTKEFVFDTIQSHQYQCPRLPVACPNQCGVGTVAREDLPGHLKDSCNTALVLCPFKDSGCKHRCPKLAMARHVEESVKPHLAMMCALVSRQRQELQELRRELEELSVGSDGVLIWKIGSYGRRLQEAKAKPNLECFSPAFYTHKYGYKLQVSAFLNGNGSGEGTHLSLYIRVLPGAFDNLLEWPFARRGLSPFLGRADMPWCRSHSTRTEVPAQVLCPKSHKGVGIGEGERVVQRVCLEI

SEQ ID NO: 65659 - protein, 108 aa, Homo sapiens
MEGLVVAAGGDVSLHNFSARLWEQLVHFHVMRLTDSLFLWVGATPHLRNLAVAMCSRYDSIPVSTSLLGDTSDTTSTGLAQRLGRTVLTQCDTVQGSEGRLAWPVSVA

SEQ ID NO: 65660 - protein, 111 aa, Homo sapiens
MHNFEEELTCPICYSIFEDPRVLPCSHTFCRNCLENILQASGNFYIWRPLRIPLKCPNCRSITEIAPTGIESLPVNFALRAIIEKYQQEDHPDIVTCPEHYRQPLNVYCLL

SEQ ID NO: 65661 - protein, 136 aa, Homo sapiens
MESEMETQSARAEEGFTQVTRKGGRRAKKRQAEQLSAAGEGGDAGRMDTEEARPAKRPVFPPLCGDGLLSGKEETRKIPVPANRYTPLKENWMKIFTPIVEHLGLQIRFNLKSRNVEIRCMQVVRPGAVGLRNISI

SEQ ID NO: 65662 - protein, 953 aa, Homo sapiens
  MOD_RES (1)..(1): Any amino acid
XVTELEEDLGTARRDLIKSEELSSKHQRDLREALAQKEDMEERITTLEKRYLAAQREATSIHDLNDKLENELANKESLHRQCEEKARHLQELLEVAEQKLQQTMRKAETLPEVEAELAQRIAALTKAEERHGNIEEHLRQLEGQLEEKNQELARVRQREKMNEDHNKRLSDTVDRLLSESNERLQLHLKERMAALEEKNTLIQELESSQRQIEEQHHHKGRLSEEIEKLRQEVDQLKGRGGPFVDGVHSRSHMGSAADVRFSLGTTTHAPPGVHRRYSALREESAKDWETSPLPGMLAPAAGPAFDSDPEISDVDEDEPGGLVGSADVVSPSGHSDAQTLAMMLQEQLDAINEEIRMIQEEKESTELRAEEIETRVTSGSMEALNLKQLRKRGSIPTSLTALSLASASPPLSGRSTPKLTSRSAAQDLDRMGVMTLPSDLRKHRRKLLSPVSREENREDKATIKCETSPPSSPRTLRLEKLGHPALSQEEGKSALEDQGSNPSSSNSSQDSLHKGAKRKGIKSSIGRLFGKKEKGRLIQLSRDGATGHVLLTDSEFSMQEPMVPAKLGTQAEKDRRLKKKHQLLEDARRKGMPFAQWDGPTVVSWLELWVGMPAWYVAACRANVKSGAIMSALSDTEIQREIGISNALHRLKLRLAIQEMVSLTSPSAPPTSRTSSGNVWVTHEEMETLETSTKTDSEEGSWAQTLAYGDMNHEWIGNEWLPSLGLPQYRSYFMECLVDARMLDHLTKKDLRVHLKMVDSFHRTSLQYGIMCLKRLNYDRKELEKRREESQHEIKDVLVWTNDQVVHWVQSIGLRDYAGNLHESGVHGALLALDENFDHNTLALILQIPTQNTQARQVMEREFNNLLALGTDRKLDDGDDKVFRRAPSWRKRFRPREHHGRGGMLSASAETLPAGFRVSTLGTLQPPPAPPKKIMPEAHSHYLYGHMLSAFRD

SEQ ID NO: 65663 - protein, 634 aa, Homo sapiens
MTPILTVLICLGLSLGPRTHVQAGHLPKPTLWAEPGSVITQGSPVTLRCQGGQETQEYRLYREKKTAPWITRIPQELVKKGQFPIPSITWEHTGRYRCYYGSDTAGRSESSDPLELVVTGAYIKPTLSAQPSPVVNSGGNVTLQCDSQVAFDGFILCKEGEDEHPQCLNSQPHARGSSRAIFSVGPVSPSRRWWYRCYAYDSNSPYEWSLPSDLLELLVLGVSKKPSLSVQPGPIVAPEETLTLQCGSDAGYNRFVLYKDGERDFLQLAGAQPQAGLSQANFTLGPVSRSYGGQYRCYGAHNLSSEWSAPSDPLDILIAGQFYDRVSLSVQPGPTVASGENVTLLCQSQGWMQTFLLTKEGAADDPWRLRSTYQSQKYQAEFPMGPVTSAHAGTYRCYGSQSSKPYLLTHPSDPLELVVSAGPEDQPLTPTGSDPQSGLGRHLGVVIGILVAVILLLLLLLLLFLILRHRRQGKHWTSTQRKADFQHPAGAVGPEPTDRGLQWRSSPAADAQEENLYAAVKHTQPEDGVEMDTRSPHDEDPQAVTYAEVKHSRPRREMASPPSPLSGEFLDTKDRQAEEDRQMDTEAAASEAPQDVTYAQLHSLTLRREATEPPPSQEGPSPAVPSIYATLAIH

SEQ ID NO: 65664 - protein, 107 aa, Homo sapiens
MLSPVSRDASDALQGRKCLRPRSRRLPLPAAVRAHGPMAELTDSARVGAASSGPSVTLSPTPNRKVPAAPVSQDSDALLGRGPISVWVGVGELRAEGTAQVKARGCC

SEQ ID NO: 65665 - protein, 341 aa, Homo sapiens
MFKGKCPKVQRAWFLVNNNCLAFTPLHLLTHTPAEEAGIGDTPSLEDEAAGHVTQARMVSKSKDGTGSDDKKAKGADGKTKIATPRGAAPPGQKGQANATRIPAKTPPAPKTPPSSGEPPKSGDRSGYSSPGSPGTPGSRSRTPSLPTPPTREPKKVAVVRTPPKSPSSAKSRLQTAPVPMPDLKNVKSKIGSTENLKHQPGGGKVQIVYKPVDLSKVTSKCGSLGNIHHKPGGGQVEVKSEKLDFKDRVQSKIGSLDNITHVPGGGNKKIETHKLTFRENAKAKTDHGAEIVYKSPVVSGDTSPRHLSNVSSTGSIDMVDSPQLATLADEVSASLAKQGL

SEQ ID NO: 65666 - protein, 100 aa, Homo sapiens
MYNDTLNGSTEKRSAELPDAVGPIVQLQEKLYVPVKEYPDFNFVGRILGPRGLTAKQLEAETGCKIMVRGKGSMRDKKKEEQNRGKPNWEHLNEDLHVLI

SEQ ID NO: 65667 - protein, 143 aa, Homo sapiens
MEGRGPYRIYDPGGSVPSGEASAAFERLVKENSRLKEKMQGIKMLGELLEESQMEATRLRQKAEELVKDNELLPPPSPSLGSFDPLAELTGKDSNVTASPTAPACPSDKPAPVQKPPSSGTSSEFEVVTPEEQNSPESSSHAN

SEQ ID NO: 65668 - protein, 509 aa, Homo sapiens
MEDDTSWRSEATFQFTVERFSRLSESVLSPPCFVRNLPWKIMVMPRFYPDRPHQKSVGFFLQCNAESDSTSWSCHAQAVLKIINYRDDEKSFSRRISHLFFHKENDWGFSNFMAWSEVTDPEKGFIDDDKVTFEVFVQADAPHGVAWDSKKHTGYVGLKNQGATCYMNSLLQTLFFTNQLRKAVYMMPTEGDDSSKSVPLALQRVFYELQHSDKPVGTKKLTKSFGWETLDSFMQHDVQELCRVLLDNVENKMKGTCVEGTIPKLFRGKMVSYIQCKEVDYRSDRREDYYDIQLSIKGKKNIFESFVDYVAVEQLDGDNKYDAGEHGLQEAEKGVKFLTLPPVLHLQLMRFMYDPQTDQNIKINDRFEFPEQLPLDEFLQKTDPKDPANYILHAVLVHSGDNHGGHYVVYLNPKGDGKWCKFDDDVVSRCTKEEAIEHNYGGHDDDLSVRHCTNAYMLVYIRESKLTVGGAITRREKDRGSEAEGAAGSPSLYASADSRRGPVLWPPRE

SEQ ID NO: 65669 - protein, 151 aa, Homo sapiens
MATGADVRDILELGGPEGDAASGTISKKDIINPDKKKSKKSSETLTFKRPEGMHREVYALLYSDKNKGSCLLSRMQEDLKSFAPGHDFLAIGDAPPLLPSDTGQGYRTVKAKLGSKKVRPWKWMPFTNPARKDGAMFFHWRRAAEEGKDYP

SEQ ID NO: 65670 - protein, 829 aa, Homo sapiens
MTIPDVFPHLPLIAITRNPVFPRFIKIIEVKNKKLVELLRRKVRLAQPYVGVFLKRDDSNESDVVESLDEIYHTGTFAQIHEMQDLGDKLRMIVMGHRRVHISRQLEVEPEEPEAENKHKPRRKSKRGKKEAEDELSARHPAELAMEPTPELPAEVLMVEALTAEIVKTIRDIIALNPLYRESVLQMMQAGQRVVDNPIYLSDMGAALTGAESHELQDVLEETNIPKRLYKALSLLKKEFELSKLQQRLGREVEEKIKQTHRKYLLQEQLKIIKKELGLEKDDKDAIEEKFRERLKELVVPKHVMDVVDEELSKLGLLDNHSSEFNVTRNYLDWLTSIPWGKYSNENLDLARAQAVLEEDHYGMEDVKKRILEFIAVSQLRGSTQGKILCFYGPPGVGKTSIARSIARALNREYFRFSVGGMTDVAEIKGHRRTYVGAMPGKIIQCLKKTKTENPLILIDEVDKIGRGYQGDPSSALLELLDPEQNANFLDHYLDVPVDLSKVLFICTANVTDTIPEPLRDRMEMINVSGYVAQEKLAIAERYLVPQARALCGLDESKAKLSSDVLTLLIKQYCRESGVRNLQKQVEKVLRKSAYKIVSGEAESVEVTPENLQDFVGKPVFTVERMYDVTPPGVVMGLAWTAMGGSTLFVETSLRRPQDKDAKGDKDGSLEVTGQLGEVMKESARIAYTFARAFLMQHAPANDYLVTSHIHLHVPEGATPKDGPSAGCTIVTALLSLAMGRPVRQNLAMTGEVSLTGKILPVGGIKEKTIAAKRAGVTCIVLPAENKKDFYDLAAFITEGLEVHFVEHYREIFDIAFPDEQAEALAVER

SEQ ID NO: 65671 - protein, 1586 aa, Homo sapiens
MSKRRMSVGQQTWALLCKNCLKKWRMKRQTLLEWLFSFLLVLFLYLFFSNLHQVHDTPQMSSMDLGRVDSFNDTNYVIAFAPESKTTQEIMNKVASAPFLKGRTIMGWPDEKSMDELDLNYSIDAVRVIFTDTFSYHLKFSWGHRIPMMKEHRDHSAHCQAVNEKMKCEGSEFWEKGFVAFQAAINAAIIEIATNHSVMEQLMSVTGVHMKILPFVAQGGVATDFFIFFCIISFSTFIYYVSVNVTQERQYITSLMTMMGLRESAFWLSWGLMYAGFILIMATLMALIVKSAQIVVLTGFVMVFTLFLLYGLSLITLAFLMSVLIKKPFLTGLVVFLLIVFWGILGFPALYTRLPAFLEWTLCLLSPFAFTVGMAQLIHLDYDVNSNAHLDSSQNPYLIIATLFMLVFDTLLYLVLTLYFDKILPAEYGHRCSPLFFLKSCFWFQHGRANHVVLENETDSDPTPNDCFEPVSPEFCGKEAIRIKNLKKEYAGKCERVEALKGVVFDIYEGQITALLGHSGAGKTTLLNILSGLSVPTSGSVTVYNHTLSRMADIENISKFTGFCPQSNVQFGFLTVKENLRLFAKIKGILPHEVEKEVQRVVQELEMENIQDILAQNLSGGQNRKLTFGIAILGDPQVLLLDEPTAGLDPLSRHRIWNLLKEGKSDRVILFSTQFIDEADILADRKVFISNGKLKCAGSSLFLKKKWGIGYHLSLHLNERCDPESITSLVKQHISDAKLTAQSEEKLVYILPLERTNKFPELYRDLDRCSNQGIEDYGVSITTLNEVFLKLEGKSTIDESDIGIWGQLQTDGAKDIGSLVELEQVLSSFHETRKTISGVALWRQQVCAIAKVRFLKLKKERKSLWTILLLFGISFIPQLLEHLFYESYQKSYPWELSPNTYFLSPGQQPQDPLTHLLVINKTGSTIDNFLHSLRRQNIAIEVDAFGTRNGTDDPSYNGAIIVSGDEKDHRFSIACNTKRLNCFPVLLDVISNGLLGIFNSSEHIQTDRSTFFEEHMDYEYGYRSNTFFWIPMAASFTPYIAMSSIGDYKKKAHSQLRISGLYPSAYWFGQALVDVSLYFLILLLMQIMDYIFSPEEIIFIIQNLLIQVVIFSIVATDLNEYGFLGLFFGTMLIPPFTLIGSLFIFSEISPDSMDYLGASESEIVYLALLIPYLHFLIFLFILRCLEMNCRKKLMRKDPVFRISPRSNAIFPNPEEPEGEEEDIQMERMRTVNAMAVRDFDETPVIIASCLRKEYAGKKKNCFSKRKKKIATRNVSFCVKKGEVIGLLGHNGAGKSTTIKMITGDTKPTAGQVILKGSGGGEPLGFLGYCPQENALWPNLTVRQHLEVYAAVKGLRKGDAMIAITRLVDALKLQDQLKAPVKTLSEGIKRKLCFVLSILGNPSVVLLDEPSTGMDPEGQQQMWQVIRATFRNTERGALLTTHYMAEAEAVCDRVAIMVSGRLRCIGSIQHLKSKFGKDYLLEMKLKNLAQMEPLHAEILRLFPQAAQQERFSSLMVYKLPVEDVRPLSQAFFKLEIVKQSFDLEEYSLSQSTLEQVFLELSKEQELGDLEEDFDPSVKWKLLLQEEP

SEQ ID NO: 65672 - protein, 65 aa, Homo sapiens
MAGYKPVAIQTYPILGEKITQDTLYWNNYKTPVQIKEFGAVSKVDFSPQPPYNYAVTASSRIHIY

SEQ ID NO: 65673 - protein, 118 aa, Homo sapiens
MMDSPFLELWQSKAVSIREQLGLGDRPNDSYCYNSAKNSTVLQGVTFGGIPTVLLIDVSCFLFLILVFSIIRRRFWDYGRIALVSEADSESRFQRLSSTSSSGQQDFENELGCCPWLT

SEQ ID NO: 65674 - protein, 75 aa, Homo sapiens
  MOD_RES (1)..(1): Any amino acid
XLLQPPSCPNGMSAENGLEKSGFSQHQNKSPPKVKAEDGMQCLQLKETLATQEPTDNQVRLRKRKVRHMHRFSGF

SEQ ID NO: 65675 - protein, 306 aa, Homo sapiens
MLSSFNEWFWQDRFWLPPNVTWTELEDRDGRVYPHPQDLLAALPLALVLLAMRLAFERFIGLPLSRWLGVRDQTRRQVKPNATLEKHFLTEGHRPKEPQLSLLAAQCGLTLQQTQRWFRRRRNQDRPQLTKKFCEASWRFLFYLSSFVGGLSVLYHESWLWAPVMCWDRYPNQTLKPSLYWWYLLELGFYLSLLIRLPFDVKRKDFKEQVIHHFVAVILMTFSYSANLLRIGSLVLLLHDSSDYLLEMEKDIRSDVEESDSSEEAAAAQEPLQLKNGAAGGPRPAPTDGPRSRVAGRLTNRHTTAT

SEQ ID NO: 65676 - protein, 934 aa, Homo sapiens
MVVVPPVGAKGNTPATGTTQGKKAEGTQNQSKKAEGAPNQGRKAEGTPNQGKKTEGTPNQGKKAEGAPIQGKKADSVANQGTKVEGITNQGKKAEGSPSEGKKAEGSPNQGKKADAAANQGKKTESASVQGRNTDVAQSPEAPKQEAPAKKKSGSKKKGEPGPPDADGPLYLPYKTLVSTVGSMVFNEGEAQRLIEILSEKAGIIQDTWHKATQKGDPVAILKRQLEEKEKLLATEQEDAAVAKSKLRELNKEMAAEKAKAAAGEAKVKKQLVAREQEITAVQARMQASYREHVKEVQQLQGKIRTLQEQLENGPNTQLARLQQENSILRDALNQATSQVESKQNAELAKLRQELSKVSKELVEKSEAVRQDEQQRKALEAKAAAFEKQVLQLQASHRESEEALQKRLDEVSRELCHTQSSHASLRADAEKAQEQQQQMAELHSKLQSSEAEVRSKCEELSGLHGQLQEARAENSQLTERIRSIEALLEAGQARDAQDVQASQAEADQQQTRLKELESQVSGLEKEAIELREAVEQQKVKNNDLREKNWKAMEALATAEQACKEKLLSLTQAKEESEKQLCLIEAQTMEALLALLPELSVLAQQNYTEWLQDLKEKGPTLLKHPPAPAEPSSDLASKLREAEETQSTLQAECDQYRSILAETEGMLRDLQKSVEEEEQVWRAKVGAAEEELQKSRVTVKHLEEIVEKLKGELESSDQVREHTSHLEAELEKHMAAASAECQNYAKEVAGLRQLLLESQSQLDAAKSEAQKQSDELALVRQQLSEMKSHVEDGDIAGAPASSPEAPPAEQDPVQLKTQLEWTEAILEDEQTQRQKLTAEFEEAQTSACRLQEELEKLRTAGPLESSETEEASQLKERLEKEKKLTSDLGRAATRLQELLKTTQEQLAREKDTVKKLQEQLEKAEDGSSSKEGTSV

SEQ ID NO: 65677 - protein, 52 aa, Homo sapiens
IDTEDEVGPLAHLAPSPQSEAVAHEFQELSLQSSQNLPPLNERKNVNIPPCY

SEQ ID NO: 65678 - protein, 67 aa, Homo sapiens
MRQAFGQWTQGYGRDDRQVQPCQHRSGLGMDPKRVRRWNKLPAHMVSGRMRRLQGTERTVSLSTRRC

SEQ ID NO: 65679 - protein, 192 aa, Homo sapiens
MQMARLLGLCAWARKSVRMASSRMTRRDPLTNKVALVTASTDGIGFAIARRLAQDRAHVVVSSRKQQNVDQAVATLQGEGLSVTGTVCHVGKAEDRERLVAMAVKLHGGIDILVSNAAVNPFFGSLMDVTEEVWDKLWMDKEKEESMKETLRIRRLGEPEDCAGIVSFLCSEDASYITGETVVVGGGTPSRL

SEQ ID NO: 65680 - protein, 451 aa, Homo sapiens
MGENDPPAVEAPFSFRSLFGLDDLKISPVAPDAVAAQILSLLPLKFFPIIVIGIIALILALAIGLGIHFDCSGKYRCRSSFKCIELIARCDGVSDCKDGEDEYRCVRVGGQNAVLQVFTAASWKTMCSDDWKGHYANVACAQLGFPSYVSSDNLRVSSLEGQFREEFVSIDHLLPDDKVTALHHSVYVREGCASGHVVTLQCTACGHRRGYSSRIVGGNMSLLSQWPWQASLQFQGYHLCGGSVITPLWIITAAHCVYDLYLPKSWTIQVGLVSLLDNPAPSHLVEKIVYHSKYKPKRLGNDIALMKLAGPLTFNEMIQPVCLPNSEENFPDGKVCWTSGWGATEDGGDASPVLNHAAVPLISNKICNHRDVYGGIISPSMLCAGYLTGGVDSCQGDSGGPLVCQERRLWKLVGATSFGIGCAEVNKPGVYTRVTSFLDWIHEQMERDLKT

SEQ ID NO: 65681 - protein, 244 aa, Homo sapiens
MKAGGNAKFREFLESQEDYDPCWSLQEKYNSRAAALFRDKVVALAEGREWSLESSPAQNWTPPQPRTLPSMVHRVSGQPQSVTASSDKAFEDWLNDDLGSYQGAQGNRYVGFGNTPPPQKKEDDFLNNAMSSLYSTESCFVAQAADWRAVVRPQLTATSASQVQGWSSFTTGASRFASAAKEGATKFGSQASQKASELGHSLNENVLKPAQEKVKEGKIFDDVSSGVSQLASKVQGVGSKGWRD

SEQ ID NO: 65682 - protein, 25 aa, Homo sapiens
MRRKFMLQWESHTFGKFHYKFFRDV

SEQ ID NO: 65683 - protein, 187 aa, Homo sapiens
MERKDFETWLDNISVTFLSLTDLQKNETLDHLISLSGAVQLRHLSNNLETLLKRDFLKLLPLELSFYLLKWLDPQTLLTCCLVSKQWNKVISACTEVWQTACKNLGWQIDDSVQDALHWKKVYLKAILRMKQLEDHEAFETSSLIGHSARVYALYYKDGLLCTGPISNIASSLKSSLIPLGRVSHSP

SEQ ID NO: 65684 - protein, 50 aa, Homo sapiens
  MOD_RES (1)..(1): Any amino acid
XIPCSWRTKGHIHDKKTEPFRLLAWSWCLNVPQLKRDEETLETVLRRLKR

SEQ ID NO: 65685 - protein, 162 aa, Homo sapiens
MLRFPTCFPSFRVVGEKQLPQEIIFLVWSPKRDLIALANTAGEVLLHRLASFHRVWSFPPNENTGKEVTCLAWRPDGKLLAFALADTKKIVLCDVEKPESLHSFSVEAPVSCMHWMEVTVESSVLTSFYNAEDESNLLLPKLPTLPKNYSNTSKIFSEENSD

SEQ ID NO: 65686 - protein, 115 aa, Homo sapiens
MRLAVGALLVCAVLGLCLAVPDKTVRWCAVSEHEATKCQSFRDHMKSVIPSDGPSVACVKKASYLDCIRAIAVSRCCLKESGRKPYFLCFQSLWNNSLLTGKRSGCCDTGCRFGV

SEQ ID NO: 65687 - protein, 375 aa, Homo sapiens
MPGWRLLTQVGAQVLGRLGDGLGAALGPGNRVTTNSLNVSLIRRNVGSEEKVGDLKKRTHIWLFVRGLHGKSGTWWDEHLSEENVPFIKQLVSDEDKAQLASKLCPLKDEPWPIHPWEPGSFRVGLIALKLGMMPLWTKDGQKHVVTLLQVQDCHVLKYTSKENCNGKMATLSVGGKTVSRFRKATSILEFYRELGLPPKQTVKIFNITDNAAIKPGTPLYAAHFRPGQYVDVTAKTIGKGFQGVMKRWGFKGQPATHGQTKTHRRPGAVATGDIGRVWPGTKMPGKMGNIYRTEYGLKVWRINTKHNIIYVNGSVPGHKNCLVKVKDSKLPAYKDLGKNLPFPTYFPDGDEEELPEDLYDENVCQPGAPSITFA

SEQ ID NO: 65688 - protein, 313 aa, Homo sapiens
METGPEDPSSMPEESSPRRTPQSIPYQDLPHLVNADGQYLFCRYWKPTGTPKALIFVSHGAGEHSGRYEELARMLMGLDLLVFAHDHVGHGQSEGERMVVSDFHVFVRDVLQHVDSMQKDYPGLPVFLLGHSMGGAIAILTAAERPGHFAGMVLISPLVLANPESATTFKVLAAKVLNLVLPNLSLGPIDSSVLSRNKTEVDIYNSDPLICRAGLKVCFGIQLLNAVSRVERALPKLTVPFLLLQGSADRLCDSKGAYLLMELAKSQDKTLKIYEGAYHVLHKELPEVTNSVFHEINMWVSQRTATAGTASPP

SEQ ID NO: 65689 - protein, 131 aa, Homo sapiens
  MOD_RES (1)..(1): Any amino acid
XFYMQSVHLPGKPQTLAVKRKADSEEERDDVSTLGSMLPAKASPVAESPKVMDEKSSLGEKAESVANVNANTPSSELVALTPAPSVPPPTLAMVSRQMGDSKPPQAIVKPQILTHIIEGFVIQEGAEPFPS

SEQ ID NO: 65690 - protein, 1915 aa, Homo sapiens
MMNEDAAQKSDSGEKFNGSSQRRKRPKKSDSNASFLRAARAGNLDKVVEYLKGGIDINTCNQNGLNALHLAAKEGHVGLVQELLGRGSSVDSATKKGNTALHIASLAGQAEVVKVLVKEGANINAQSQNGFTPLYMAAQENHIDVVKYLLENGANQSTATEDGFTPLAVALQQGHNQAVAILLENDTKGKVRLPALHIAARKDDTKSAALLLQNDHNADVQSKMMVNRTTESGFTPLHIAAHYGNVNVATLLLNRGAAVDFTARNGITPLHVASKRGNTNMVKLLLDRGGQIDAKTRDGLTPLHCAARSGHDQVVELLLERGAPLLARTKNGLSPLHMAAQGDHVECVKHLLQHKAPVDDVTLDYLTALHVAAHCGHYRVTKLLLDKRANPNARALNGFTPLHIACKKNRIKVMELLVKYGASIQAITESGLTPIHVAAFMGHLNIVLLLLQNGASPDVTNIRGETALHMAARAGQVEVVRCLLRNGALVDARAREEQTPLHIASRLGKTEIVQLLLQHMAHPDAATTNGYTPLHISAREGQVDVASVLLEAGAAHSLATKKGFTPLHVAAKYGSLDVAKLLLQRRAAADSAGKNGLTPLHVAAHYDNQKVALLLLEKGASPHATAKNGYTPLHIAAKKNQMQIASTLLNYGAETNIVTKQGVTPLHLASQEGHTDMVTLLLDKGANIHMSTKSGLTSLHLAAQEDKVNVADILTKHGADQDAHTKLGYTPLIVACHYGNVKMVNFLLKQGANVNAKTKNGYTPLHQAAQQGHTHIINVLLQHGAKPNATTANGNTALAIAKRLGYISVVDTLKVVTEEVTTTTTTITEKHKLNVPETMTEVLDVSDEEGDDTMTGDGGEYLRPEDLKELGDDSLPSSQFLDGMNYLRYSLEGGRSDSLRSFSSDRSHTLSHASYLRDSAVMDDSVVIPSHQVSTLAKEAERNSYRLSWGTENLDNVALSSSPIHSGRASPCLERDNSSFLVSFMVDARGGAMRGCRHNGLRIIIPPRKCTAPTRVTCRLVKRHRLATMPPMVEGEGLASRLIEVGPSGAQFLGKLHLPTAPPPLNEGESLVSRILQLGPPGTKFLGPVIVEIPHFAALRGKERELVVLRSENGDSWKEHFCDYTEDELNEILNGMDEVLDSPEDLEKKRICRIITRDFPQYFAVVSRIKQDSNLIGPEGGVLSSTVVPQVQAVFPEGALTKRIRVGLQAQPMHSELVKKILGNKATFSPIVTLEPRRRKFHKPITMTIPVPKASSDVMLNGFGGDAPTLRLLCSITGGTTPAQWEDITGTTPLTFVNECVSFTTNVSARFWLIDCRQIQESVTFASQVYREIICVPYMAKFVVFAKSHDPIEARLRCFCMTDDKVDKTLEQQENFAEVARSRDVEVLEGKPIYVDCFGNLVPLTKSGQHHIFSFFAFKENRLPLFVKVRDTTQEPCGRLSFMKEPKSTRGLVHQAICNLNITLPIYTKESESDQEQEEEIDMTSEKNPQDEQERIEERLAYIADHLGFSWTELARELDFTEEQIHQIRIENPNSLQDQSHALLKYWLERDGKHATDTNLVECLTKINRMDIVHLMETNTEPLQERISHSYAEIEQTITLDHSEGFSVLQEELCTAQHKQKEEQAVSKESETCDHPPIVSEEDISVGYSTFQDGVPKTEGDSSATALFPQTHKEQVQQDFSGKMQDLPEESSLEYQQEYFVTTPGTETSETQKAMIVPSSPSKTPEEVSTPAEEEKLYLQTPTSSERGGSPIIQEPEEPSEHREESSPRKTSLVIVESADNQPETCERLDEDAAFEKELTEELGELEASSDEEAMVTTRVVRRRVIIQGDDMPEIPPETVTEEEYIDEHGHTVVKKVTRKIIRRYVSSEGTEKEEIMVQGMPQEPVNIEEGDGYSKVIKRVVLKSDTEQSEDNNE

SEQ ID NO: 65691 - protein, 189 aa, Homo sapiens
MAVETLSPDWEFDRVDDGSQKIHAEVQLKNYGKFLEEYTSQLRRIEDALDDSIGDVWDFNLDPIALKLLPYEQSSLLELIKTENKVLNKVITVYAALCCEIKKLKYEAETKFYNGLLFYGEGATDASMVEGDCQIQMGRFISFLQELSCFVTRCYEVVMNVVHQLAALYISNKIAPKIIETTGVHFQVF

SEQ ID NO: 65692 - protein, 81 aa, Homo sapiens
LLKGVTIASGGVLPRIHPELLAKKRGTKGKSETILSPPPEKRGRKATSGKKGGKKSKAAKPRTSKKLLDCTSHISSTQQHY

SEQ ID NO: 65693 - protein, 84 aa, Homo sapiens
MTPEEAERWIVNLIRNARLDAKIDSKLGHVVMGNNAVSPYQQVIEKTKSLSFRSQMLAMNIEKKLNQNSRSEAPNWATQDSGFY

SEQ ID NO: 65694 - protein, 766 aa, Homo sapiens
  MOD_RES (1)..(1): Any amino acid
XLLALLLLLLLLLLLQLQHLAAAAADPLLGGQGPAKDCEKDQFQCRNERCIPSVWRCDEDDDCLDHSDEDDCPKKTCADSDFTCDNGHCIHERWKCDGEEECPDGSDESEATCTKQVCPAEKLSCGPTSHKCVPASWRCDGEKDCEGGADEAGCATSLGTCRGDEFQCGDGTCVLAIKHCNQEQDCPDGSDEAGCLQGLNECLHNNGGCSHICTDLKIGFECTCPAGFQLLDQKTCGDIDECKDPDACSQICVNYKGYFKCECYPGYEMDLLTKNCKAAAGKSPSLIFTNRHEVRRIDLVKRNYSRLIPMLKNVVALDVEVATNRIYWCDLSYRKIYSAYMDKASDPKEQEVLIDEQLHSPEGLAVDWVHKHIYWTDSGNKTISVATVDGGRRRTLFSRNLSEPRAIAVDPLRGFMYWSDWGDQAKIEKSGLNGVDRQTLVSDNIEWPNGITLDLLSQRLYWVDSKLHQLSSIDFSGGNRKTLISSTDFLSHPFGIAVFEDKVFWTDLENEAIFSANRLNGLEISILAENLNNPHDIVIFHELKQPRAPDACELSVQPNGGCEYLCLPAPQISSHSPKYTCACPDTMWLGPDMKRCYRAPQSTSTTTLASTMTRTVPATTRAPGTTVHRSTYQNHSTETPSLTAAVPSSVSVPRAPSISPSTLSPATSNHSQHYANEDSKMGSTVTAAVIGIIVPIVVIALLCMSGYLIWRNWKRKNTKSMNFDNPVYRKTTEEEDEDELHIGRTAQIGHVYPARVALSLEDDGLP

SEQ ID NO: 65695 - protein, 433 aa, Homo sapiens
MPCGKQGNLQVPGSKVLPGLGEGCKEMWLRKVIYGGEVWGKSPEPEFPSLVNLCQSWKINNLMSTVHSDEAGMLSYFLFEELMRCDKDSMPDGNLSEEEKLFLSYFPLHKFELEQNIKELNTLADQVDTTHELLTKTSLVASSSGAVSGVMNILGLALAPVTAGGSLMLSATGTGLGAAAAITNIVTNVLENRSNSAARDKASRLGPLTTSHEAFGGINWSEIEAAGFCVNKCVKAIQGIKDLHAYQMAKSNSGFMAMVKNFVAKRHIPFWMARGVQRAFEGTTLAMTNGAWVMGAAGAGFLLMKDMSSFLQSWKHLEDGARTETAEELRALAKKLEQELDRLTQHHRHLPQKASQTCSSSRGRAVRGSRVVKPEGSRSPLPWPVVEHQPRLGPGVALRTPKRTVCAPRMLGHQPAPPAPARKGRQAPGRHRQ

SEQ ID NO: 65696 - protein, 40 aa, Homo sapiens
  MOD_RES (1)..(1): Any amino acid
XFALMMGSNRKFVDPSAALDLLKGAFRSSEEQQQQSQEQI

SEQ ID NO: 65697 - protein, 47 aa, Homo sapiens
MPQSKSRKIAILGYRSVGSSSQDLRTCCEWCYSSAGRTGASPWAHLI

SEQ ID NO: 65698 - protein, 183 aa, Homo sapiens
MSTVKEQLIEKLIEDDENSQCKITIVGTGAVGMACAISILLKDLADELALVDVALDKLKGEMMDLQHGSLFFSTSKITSGKVDILTYIVWKISGLPVTRVIGSGCNLDSARFRYLIGEKLGVHPTSCHGWIIGEHGDSSVPLWSGVNVAGVALKTLDPKLGTDSDKEHWKNIHKQVIQRDYME

SEQ ID NO: 65699 - protein, 100 aa, Homo sapiens
MGWGGGGGCTPRPPIHQQPPERRVVTVVFLGLLLDLLAFTLLLPLLPGLLESHGRAHDPLYGSWQGGVDWFATAIGMPVEKRYNSVLFGVSVCATHWGHL

SEQ ID NO: 65700 - protein, 79 aa, Homo sapiens
MSLPSTPDIKIKEEEPVEVDSSPPDSPASSPCSPPLKEKEVTPKPVLISTPTPTIVRPGSLPLHLGYDPLHPTLPSPTS

SEQ ID NO: 65701 - protein, 80 aa, Homo sapiens
MRRISLTSSPVRLLLFLLLLLIALEIMVGGHSLCFNFTIKSLSRPGQPWCEAQVFLNKNLFLQYNSDNNMVKPLGLLGKK

SEQ ID NO: 65702 - protein, 72 aa, Homo sapiens
MAAAEPMGPAQVPMNSEVIVDPIQVRGECPCSHRSHPHPIRSPALWCYIEHSPATLRSLGSEDSGEAPSPGS

SEQ ID NO: 65703 - protein, 159 aa, Homo sapiens
MQWAVGRRWAWAALLLAVAAVLTQVVWLWLGTQSFVFQREEIAQLARQYAGLDHELAFSRLIVELRRLHPGHVLPDEELQWVFVNAGGWMGAMCLLHASLSEYVLLFGTALGSRGHSVSCAIVTQGATGLRSRIPSSLAPSTSGERAPPKVRSSTQGRR

SEQ ID NO: 65704 - protein, 375 aa, Homo sapiens
MALRLLKLAATSASARVVAAGAQRVRGIHSSVQCKLRYGMWHFLLGDKASKRLTERSRVITVDGNICTGKGKLAKEIAEKLGFKHFPEAGIHYPDSTTGDGKPLATDYNGNCSLEKFYDDPRSNDGNSYRLQSWLYSSRLLQYSDALEHLLTTGQGVVLERSIFSDFVFLEAMYNQGFIRKQCVDHYNEVKSVTICDYLPPHLVIYIDVPVPEVQRRIQKKGDPHEMKITSAYLQDIENAYKKTFLPEMSEKCEVLQYSAREAQDSKKVVEDIEYLKFDKGPWLKQDNRTLYHLRLLVQDKFEVLNYTSIPIFLPEVTIGAHQTDRVLHQFREFSLFNGRKPDAVKILCSLLEADRSLLEADRSLLEADRVQDSC

SEQ ID NO: 65705 - protein, 528 aa, Homo sapiens
MEPAVSLAVCALLFLLWVRLKGLEFVLIHQRWVFVCLFLLPLSLIFDIYYYVRAWVVFKLSSAPRLHEQRVRDIQKQVREWKEQGSKTFMCTGRPGWLTVSLRVGKYKKTHKNIMINLMDILEVDTKKQIVRVEPLVTMGQVTALLTSIGWTLPVLPELDDLTVGGLIMGTGIESSSHKYGLFQHICTAYELVLADGSFVRCTPSENSDLFYAVPWSCGTLGFLVAAEIRIIPAKKYVKLRFEPVRGLEAICAKFTHESQRQENHFVEGLLYSLDEAVIMTGVMTDEAEPSKLNSIGNYYKPWFFKHVENYLKTNREGLEYIPLRHYYHRHTRSIFWELQLLCFSVSDVPQRDIIPFGNNPIFRYLFGWMVPPKISLLKLTQGETLRKLYEQHHVVQDMLVPMKCLQQALHTFQNDIHVYPIWLCPFILPSQPGLVHPKGNEAELYIDIGAYGEPRVKHFEARSCMRQLEKFVRSVHGFQMLYADCYMNREEFWEMFDGSLYHKLREKLGCQDAFPEVYDKICKAARH

SEQ ID NO: 65706 - protein, 187 aa, Homo sapiens
MDRMTEDALRLNLLKRSLDPADERDDVLAKRLKMEGHEAMERLKMLALLKRKDLANLEVPHELPTKQDGSGVKGYEEKLNGNLRPHGDNRTAGRPGKENINDEPVDMSARRSEPERGRLTPSPDIIVLSDNEASSPRSSSRMEERLKAANLEMFKGKGIEERQQLIKQLRDELRLEEARLVLLKKLR

SEQ ID NO: 65707 - protein, 65 aa, Homo sapiens
MSSSMWYIMQSIQSKYSLSERLIRTIAAIRSFPHDNVEDLIRGSMVAIESGLLVQLSCLMIREQM

SEQ ID NO: 65708 - protein, 813 aa, Homo sapiens
MRALWVLGLCCVLLTFGSVRADDEVDVDGTVEEDLGKSREGSRTDDEVVQREEEAIQLDGLNASQIRELREKSEKFAFQAEVNRMMKLIINSLYKNKEIFLRELISNASDALDKIRLISLTDENALSGNEELTVKIKCDKEKNLLHVTDTGVGMTREELVKNLGTIAKSGTSEFLNKMTEAQEDGQSTSELIGQFGVGFYSAFLVADKVIVTSKHNNDTQHIWESDSNEFSVIADPRGNTLGRGTTITLVLKEEASDYLELDTIKNLVKKYSQFINFPIYVWSSKTETVEEPMEEEEAAKEEKEESDDEAAVEEEEEEKKPKTKKVEKTVWDWELMNDIKPIWQRPSKEVEEDEYKAFYKSFSKESDDPMAYIHFTAEGEVTFKSILFVPTSAPRGLFDEYGSKKSDYIKLYVRRVFITDDFHDMMPKYLNFVKGVVDSDDLPLNVSRETLQQHKLLKVIRKKLVRKTLDMIKKIADDKYNDTFWKEFGTNIKLGVIEDHSNRTRLAKLLRFQSSHHPTDITSLDQYVERMKEKQDKIYFMAGSSRKEAESSPFVERLLKKGYEVIYLTEPVDEYCIQALPEFDGKRFQNVAKEGVKFDESEKTKESREAVEKEFEPLLNWMKDKALKDKIEKAVVSQRLTESPCALVASQYGWSGNMERIMKAQAYQTGKDISTNCTRLMTTFLNYYASQKKTFEINPRHPLIRDMLRRIKEDEDDKTVLDLAVVLFETATLRSGYLLPDTKAYGDRIERMLRLSLNIDPDAKVEEEPEEEPEETAEDTTEDTEQDEDEEMDVGTDEEEETAKESTAEKDEL

SEQ ID NO: 65709 - protein, 117 aa, Homo sapiens
MDDLRYGVYPVKGASGYPGAERNLLEYSYFEKGPLTFRDVVIEFSQEEWQCLDTAQQDLYRKVMLENFRNLVFLGIDVSKPDLITCLEQGKDPWNMKRHSMVATPPDGVSLLFPRPE

SEQ ID NO: 65710 - protein, 372 aa, Homo sapiens
MALMQELYSTPASRLDSFVAQWLQPHREWKEEVLDAVRTVEEFLRQEHFQGKRGLDQDVRVLKVVKVGSFGNGTVLRSTREVELVAFLSCFHSFQEAAKHHKDVLRLIWKTMWQSQDLLDLGLEDLRMEQRVPDALVFTIQTRGTAEPITVTIVPAYRALGPSLPNSQPPPEVYVSLIKACGGPGNFCPSFSELQRNFVKHRPTKLKSLLRLVKHWYQQYVKARSPRANLPPLYALELLTIYAWEMGTEEDENFMLDEGFTTVMDLLLEYEVICIYWTKYYTLHNAIIEDCVRKQLKKERPIILDPADPTLNVAEGYRWDIVAQRASQCLKQDCCYDNRENPISSWNVKGTRHPLDSGAEGLPRFQPHREPL

SEQ ID NO: 65711 - protein, 55 aa, Homo sapiens
MPRYCAAICCKNRRGRNNKDRKLSFYPFPLHDKERLEKWLKNMKRDSWVPRKRPF

SEQ ID NO: 65712 - protein, 160 aa, Homo sapiens
MASGDFCSPGEGMEILQQVCSKQLPPCNLSKEDLLQNPYFSKLLLNLSQHVDESGLSLTLAKEQAQAWKEVRLHKTTWLRSEILHRVIQELLVDYYVKIQDTNVTSEDKKFHETLEQRLLVTELMRLLGPSQEREIPPLLGLEKADLLELMPLSEDFVWM

SEQ ID NO: 65713 - protein, 67 aa, Homo sapiens
MSNEVETSATNGQPDQQAAPKAPSKKEKKKGPEKTDEYLLARFKGDGVKYKAKLIGIDDVPDARGDK

SEQ ID NO: 65714 - protein, 137 aa, Homo sapiens
  MOD_RES (1)..(1): Any amino acid
XSSHVETRAHAEERLLKKLFSGYNKWSRPVANISDVVLVRFGLSIAQLIDVDEKNQMMTTNVWVKQEWHDYKLRWDPADYENVTSIRIPSELIWRPDIVLYNNCRRALLGRSAFRHQTPSWPFWENSVDCRVPWRGC

SEQ ID NO: 65715 - protein, 164 aa, Homo sapiens
MDEDTVATLLECKTLFILRGLPGSGKSTLARVIVDKYRDGTKMVSADAYKITPGARGAFSEEYKRLDEDLAAYCRRRDIRILVLDDTNHERERLEQLFEMADQYQYQVVLVEPKTAWRLDCAQLKEKNQWQLSADDLKKLKPGLEKDFLPLYFGWFLTKKSSET

SEQ ID NO: 65716 - protein, 138 aa, Homo sapiens
VTANVGSLFDDPENLQKNWLREFYQALGSFYFLHESLKNIYQFDFKAKKYRKVAGKEIYSDTLESTPMLEKEKFPQDYFPECKWSRKGFIRTRWCIADCAFDLVNIHLFHDASNLVAWETSPSVYSGIRHKALGYVLD

SEQ ID NO: 65717 - protein, 265 aa, Homo sapiens
  MOD_RES (1)..(1): Any amino acid
XQFIAESGGPFIDQVYVLQSYAEGWKEGTWEEKVDERPCIDQLLYSQDKHEYYRDGGLVSPKCRLPLKALTLPGLLWKSCQLTASMCPVPGQLALKHGRGWFWGYEETRGLNVSCLSVQGSASIVAPLLLRNTSARSVMLDRAENLLHDHYGGKEYWDTRRSMVFARHLREVGDEFRSRHLNSTDDADRIPFQEDWMKMKVKLGSALGGPYLGVHLRRKDFIWGHRQDVPSLEGAVRKIRSLMKTHRLDKVFVATDAVRKEYEEL

SEQ ID NO: 65718 - protein, 100 aa, Homo sapiens
MAIGFVGCLGAIKENKCLLLTFFLLLLLVFLLEATIAILFFAYTDKIDRYAQQDLKKGLHLYGTQGNVGLTNAWSIIQTDFRCCGVSNYTDWFEVYNATR

SEQ ID NO: 65719 - protein, 142 aa, Homo sapiens
  MOD_RES (1)..(1): Any amino acid
XFDVDGTLTAPRQKITKEMDDFLQKLRQKIKIGVVGGSDFEKVQEQLGNDVVEKYDYVFPENGLVAYKDGKLLCRQNIQSHLGEALIQDLINYCLSYIAKIKLPKKRGTFIEFRNGMLNVSPIGRSCSQEERIEFYELDKKI

SEQ ID NO: 65720 - protein, 135 aa, Homo sapiens
  MOD_RES (1)..(1): Any amino acid
XRLTFSSAYQGNSLMYHDSPCSNGYVYIPLAFLLMLYAVYLVECWHCQARHELQHRVDVSSVRERVGRMQQATPCIWWKAISYHYVRRTRQVTRYRNGDAYTTTQVPGCLGSQVVPLRSPWRNAQLDAGSDEEPA

SEQ ID NO: 65721 - protein, 436 aa, Homo sapiens
  MOD_RES (1)..(1): Any amino acid
XKTEKEESTEVLKAQSAGTVRSAAPPQEKKRKVEKDTMSDQALEALSASLGTRQAEPELDLRSIKEVDEAKAKEEKLEKCGEDDETIPSEYRLKPATDKDGKPLLPEPEEKPKPRSESELIDELSEDFDRSECKEKPSKPTEKTEESKAAAPAPVSEAVCRTSMCSIQSAPPEPATLKGTVPDDAVEALADSLGKKEADPEDGKPVMDKVKEKAKEEDREKLGEKEETIPPDYRLEEVKDKDGKPLLPKESKEQLPPMSEDFLLDALSEDFSGPQNASSLKFEDAKLAAAISEVVSQTPASTTQAGAPPRDTSQSDKDLDDALDKLSDSLGQRQPDPDENKPMEDKVKEKAKAEHRDKLGERDDTIPPEYRHLLDDNGQDKPVKPPTKKSEDSKKPADDQDPIDALSGDLDSCPSTTETSQNTAKTTEETSKPKDD

SEQ ID NO: 65722 - protein, 30 aa, Homo sapiens
MAAAEVADTQLMLGVGLIALTKDRGAVGNV

SEQ ID NO: 65723 - protein, 52 aa, Homo sapiens
DVGGGYFLPRLQGKLGYFLALTGFRLKGRDVYRAGIATHFVDSEKNGDDTIT

SEQ ID NO: 65724 - protein, 162 aa, Homo sapiens
MGPLRESKEHRVQHHDKEISRSRIPRLILRPHMPQQQHKVSPASESPFSEEESREFNPSSSGRSARTVSSNSFCSDDTGCPSSQSVSPVKTPSDAGNSPIGFCPGSDEGFTRKKCTIGMVGEGSIQSSRYKKESKSGLVKPGSEADFSSSSSTGSISAPEVH

SEQ ID NO: 65725 - protein, 693 aa, Homo sapiens
MEGPHLPNKKKHKKQAVKTEPEKKSQSTKLSVVHEKKSQEGKPKEHTEPKSLPKQASDTGSNDAHNKKAVSRSAEQQPSEKSTEPKTKPQDMISAGGESVAGITAISGKPGDKKKEKKSLTPAVPVESKPDKPSGKSGMDAALDDLIDTLGGPEETEEENTTYTGPEVSDPMSSTYIEELGKREVTIPPKYRELLAKKEGITGPPADSSKPIGPDDAIDALSSDFTCGSPTAAGKKTEKEESTEVLKAQSAGTVRSAAPPQEKKRKVEKDTMSDQALEALSASLGTRQAEPELDLRSIKEVDEAKAKEEKLEKCGEDDETIPSEYRLKPATDKDGKPLLPEPEEKPKPRSESELIDELSEDFDRSECKEKPSKPTEKTEESKAAAPAPVSEAVCRTSMCSIQSAPPEPATLKGTVPDDAVEALADSLGKKEADPEDGKPVMDKVKEKAKEEDREKLGEKEETIPPDYRLEEVKDKDGKPLLPKESKEQLPPMSEDFLLDALSEDFSGPQNASSLKFEDAKLAAAISEVVSQTPASTTQAGAPPRDTSSDKDLDDALDKLSDSLGQRQPDPDENKPMEDKVKEKAKAEHRDKLGERDDTIPPEYRHLLDDNGQDKPVKPPTKKSEDSKKPADDQDPIDALSGDLDSCPSTTETSQNTAKDKCKKAASSSKAPKNGGKAKDSAKTTEETSKPKDD

SEQ ID NO: 65726 - protein, 152 aa, Homo sapiens
MQCDFTEDQTAEFKEAFQLFDRTGDGKILYSQCGDVMRALGQNPTNAEVLKVLGNPKSDEMNVKVLDFEHFLPMLQTVAKNKDQGTYEDYVEGLRVFDKEGNGTVMGAEIRHVLVTLGEKMTEEEVEMLVAGHEDSNGCINYEELVRMVLNG

SEQ ID NO: 65727 - protein, 168 aa, Homo sapiens
MAATALLEAGLARVLFYPTLLYTLFRGKVPGRAHRDWYHRIDPTVLLGALPLRSLTRQVSRAGEPGPLPRPRRSVPVGPLGSPPSLLSHLFASAAGTGRERARGDHHERGVRDEVPVQLFTGVEETRSRAAAAQHSRHDWDPHLGQPPEGSPICSQVPVAGPVCLRAL

SEQ ID NO: 65728 - protein, 112 aa, Homo sapiens
MPSDKTIGGGDDSFNTFFSETGAGKHVPRAVFVDLEPTVIDEVRTGTYRQLFHPEQLITGKEDAANNYARGHYTIGKEIIDLVLDRIRKLADQCTGLQGFLVFHSFGGGTGS

SEQ ID NO: 65729 - protein, 68 aa, Homo sapiens
MAGLRNESEQEPLLGDTPGSREWDILETEEHYKSRWRSIRILYLTMFLSSVGFSVVMMSIWPYLQKEM

SEQ ID NO: 65730 - protein, 95 aa, Homo sapiens
MAIGKRLATLPTKEQKTQRLISELSLLNHKLPARVWLPTAGFDHHVVRVPHTQAVVLNSKDKAPYLIYVEVLECENFDTTSVPARIPENRIRSTR

SEQ ID NO: 65731 - protein, 91 aa, Homo sapiens
MDEKVFTKELDQWIEQLNECKQLSESQVKSLCEKMPSIKLQSSDGEIFEVDVEIAKQSVTIKTMLEDLGMDDEGDDDPVPLPNVNAAILKK

SEQ ID NO: 65732 - protein, 104 aa, Homo sapiens
MKALIVLGLVLLSVTVQGKVFERCELARTLKRLGMDGYRGISLANWMCLAKWESGYNTRATNYNAGDRSTDYGIFQINSRYWCNDGKTPGAVNACHLSCSGKTS

SEQ ID NO: 65733 - protein, 371 aa, Homo sapiens
MAAVTMSVPGRKAPPRPGPVPEAAQPFLFTPRGPSAGGGPGSGTSPQVEWTARRLVWVPSELHGFEAAALRDEGEEEAEVELAESGRRLRLPRDQIQRMNPPKFSKAEDMAELTCLNEASVLHNLRERYYSGLIYTYSGLFCVVINPYKQLPIYTEAIVEMYRGKKRHEVPPHVYAVTEGAYRSMLQDREDQSILCTGESGAGKTENTKKVIQYLAHVASSPKGRKEPGVPGELERQLLQANPILEAFGNAKTVKNDNSSRFGKFIRINFDVAGYIVGANIETYLLEKSRAIRQAKDECSFHIFYQLLGGAGEQLKALSRVWLAPAVTATQPPPPGGSCSRSLPKLRGFSLARLLLTPAGDSGFAEAPPGS

SEQ ID NO: 65734 - protein, 125 aa, Homo sapiens
MATASPSVFLLMVNGQVESAQFPEYDDLYCKYCFVYGQDWAPTAGLEEGISQITSKSQDVRQALVWNFPIDVTFKSTNPYGYRAQRVWTRCVRERCGSRLWGRARALLTWPAQKDHPHVCPRIYV

SEQ ID NO: 65735 - protein, 298 aa, Homo sapiens
  MOD_RES (1)..(1): Any amino acid
XHSENSRATPGACLSPQHSQDGAWRRPAAAEETLGVRDGHQACRDFLELAEIHSRKWQRALQYEQEQRVHLEETIEQLAKQHNSLERAFHSAPGRPANPSKSFIEGSLLTPKGEDSEEDEDTEYFDAMEDSTSFITVITEAKEDRKAEGSTGTSSVDWSSADNVLDGASLVPKGSSKVKRRVRIPNKPNYSLNLWSIMKNCIGRELSRIPMPVNFNEPLSMLQRLTEDLEYHHLLDKAVHCTSSVEQMCLVAAFSVSSYSTTVHRIAKPFNPMLGETFELDRLDDMGLRSLCEQVSHH

SEQ ID NO: 65736 - protein, 62 aa, Homo sapiens
MLFLKLSVFRAVEFFIRDKYEKKKYYDKNAIAITNISSSDAPLQPLVSSPSLQAAVDKNKLE

SEQ ID NO: 65737 - protein, 68 aa, Homo sapiens
  MOD_RES (1)..(1): Any amino acid
XLIQTMHSNLAGKITGMLLEIDNSELLHMLESPESLRSKVDEAVAVLQAHHAKKEAAQKVGAVAAATS

SEQ ID NO: 65738 - protein, 203 aa, Homo sapiens
  MOD_RES (1)..(1): Any amino acid
XTIMEKSETELKDTYARWLPLGLGLNHLGKGEAIEAILAALEVVSEPFRSFANTLVDVCAYAGSGNVLKVQQLLHICSEHFDSKEKEEDKDKKEKKDKDKKEAPADMGAHQLRYGEPTLRRAVPLALALISVSNPRLNILDTLSKFSHDADPEVSYNSIFAMGMVGSGTNNARLAAMLRQLAQYHAKDPNNLFMVRLAQGLTH

SEQ ID NO: 65739 - protein, 66 aa, Homo sapiens
  MOD_RES (1)..(1): Any amino acid
XGSQAQKVIICHRGTRHSLSWTDEKQLKEQNIIRTAKVWTPEDPRKLNSKSSFNNIENEPPFEFVS

SEQ ID NO: 65740 - protein, 14 aa, Homo sapiens
MASKPEKRVASSVF

SEQ ID NO: 65741 - protein, 520 aa, Homo sapiens
MAAALRVAAVGARLSVLASGLRAAVRSLCSQATSVNERIENKRRTALLGGGQRRIDAQHKRGKLTARERISLLLDPGSFVESDMFVEHRCADFGMAADKNKFPGDSVVTGRGRINGRLVYVFSQIMDQAITVGAPVIGLNDSGGARIQEGVESLAGYADIFLRNVTASGVIPQISLIMGPCAGGAVYSPALTDFTFMVKDTSYLFITGPDVVKSVTNEDVTQEELGGAKTHTTMSGVAHRAFENDVDALCNLRDFFNYLPLSSQDPAPVRECHDPSDRLVPELDTIVPLESTKAYNMVDIIHSVVDEREFFEIMPNYAKNIIVGFARMNGRTVGIVGNQPKVASGCLDINSSVKGARFVRFCDAFNIPLITFVDVPGFLPGTAQEYGGIIRHGAKLLYAFAEATVPKVTVITRKAYGGAYDVMSSKHLCGDTNYAWPTAEIAVMGAKGAVEIIFKGHENVEAAQAEYIEKFANPFPAAVRGFVDDIIQPSSTRARICCDLDVLASKKVQRPWRKHANIPL

SEQ ID NO: 65742 - protein, 412 aa, Homo sapiens
MTQKGSMKPVKKKKTEEPELEPLCCCEYIDRNGEKNHVATCLCDCQDLDEGCDRWITCKSLQPETCERIMDTISDRLRIPWLRGAKKVNISIIPPLVLLPVFLHVASWHFLLGVVVLTSLPVLALWYYYLTHRRKEQTLFFLSLGLFSLGYMYYVFLQEVVPKGRVGPVQLAVLTCGLFLILLALHRAKKNPGYLSNPASGDRSLSSSQLECLSRKGQEKTKGFPGADMSGSLNNRTTKDDPKGSSKMPAGSPTKAKEDWCAKCQLVRPARAWHCRICGICVRRMDHHCVWINSCVGESNHQAFILALLIFLLTSVYGITLTLDTICRDRSVFTALFYCPGVYANYSSALSFTCVWYSVIITAGMAYIFLIQLINISYNVTEREVQQALRQKTGRRLLCGLIVDTGKVLAHL

SEQ ID NO: 65743 - protein, 149 aa, Homo sapiens
MAELQEVQITEEKPLLPGQTPEAAKEAELAARILLDQGQTHSVETPYGSVTFTVYGTPKPKRPAILTYHDVGLNYKSCFQPLFQFEDMQEIIQNFVRVHVDAPGMEEGAPVFPLGYQYPSLDQLADMIPCVLQYLNFSTIIGVGVGAGA

SEQ ID NO: 65744 - protein, 90 aa, Homo sapiens
MGQSWELTAAERAMRIQGALTVGLVRQCQTIHGRDRTCIPPRLPPEWVTTLFFIIMGIISLTVTCGLLVASHWRREATKYARWIAFTGSK

SEQ ID NO: 65745 - protein, 409 aa, Homo sapiens
SVRLEFDYSEDKSSWDNQQENPPPTKKIGKKPVAKMPLRRPKMKKTPEKLDNTPASPPRSPAEPNDIPIAKGTYTFDIDKWDDPNFNPFSSTSKMQESPKLPQQSYNFDPDTCDESVDPFKTSSKTPSSPSKSPASFEIPASAMEANGVDGDGLNKPAKKKKTPLKTVKKSPKRSPLSDPPSQDPTPAATPETPPVISAVVHATDEEKLAVTNQKWTCMTVDLEADKQDYPQPSDLSTFVNETKFSSPTEELDYRNSYEIEYMEKIGSSLPQDDDAPKKQALYLMFDTSQESPVKSSPVRMSESPTPCSGSSFEETEALVNTAAKNQHPVPRGLAPNQESHLQVPEKSSQKELEAMGLGTPSEAIEIREAAHPTDVSISKTALYSRIGTAEVEKPAGLLFQQPDLDSAL

SEQ ID NO: 65746 - protein, 144 aa, Homo sapiens
MSDTEEQEYEEEQPEEEAAEEEEEGEVPDSAEEERPKPSRPVVPPLIPPKIPEGERVDFDDIHRKRMEKDLLELQTLIDVHFEQRKKEEEELVALKERIERRRSERAEQQRFRTEKERERQAKLAEEKMRKEEEEAKKRAEDDA

SEQ ID NO: 65747 - protein, 129 aa, Homo sapiens
MLQFPHISQCEELRLSLERDYHSLCERQPIGRLLFREFCATRPELSRCVAFLDGVAEYEVTPDDKRKACGRQLTQNFLSHTGPDLIPEVPRQLVTNCTQRLEQGPCKDLFQELTRLTHEYLSVAPFADY

SEQ ID NO: 65748 - protein, 115 aa, Homo sapiens
  MOD_RES (1)..(1): Any amino acid
XMQFGVPLARNQLIQKKLADMLTEITLGLHACLQLGRLKDQDKAAPEMVSLLKRNNCGKALDIARQARDMLGGNGISDEYHVIRHAMNLEAVNTYEGMFLRQVSSEGSPGVRPDS

SEQ ID NO: 65749 - protein, 145 aa, Homo sapiens
MAASSSEISEMKGVEESPKVPGEGPGHSEAETGPPQVLAGVPDQPEAPQPGPNTTAAPVDSGPKAGLAPETTETPAGASETAQATDLSLSPGGESKANCSPEDPCQETVSKPESRNSLQQGDVDGAQRLGRVAKLLSIVALVGGV

SEQ ID NO: 65750 - protein, 182 aa, Homo sapiens
MGRLHCTEDPVPEAVGGDMQQLNQLGAQQFSALTEVLFHFLTEPKEVERFLAQLSEFATTNQISLGSLRSIVKSLLLVPNGALKKSLTAKQVQADFITLGLSEEKATYFSEKWKQNAPTLARWAIGQTLMINQLIDMEWKFGVTSGSSELEKVGSIFLQLKLVVKKGNQTENVYIGLGAHRV

SEQ ID NO: 65751 - protein, 170 aa, Homo sapiens
  MOD_RES (1)..(1): Any amino acid
XGGGPAARGPEGQPAPEARVHFRVARFIMEAGVKLGMRSIPIATACTIYHKFFCETNLDAYDPYLIAMSSIYLAGKVEEQHLRTRDIINVSNRFIPWTQRSPKVLAQACPKRSPGWSAAWGHCHHVAMTAGPHRTSWEDWLCCWRRAGEGNGMLPLCQSLEVAVQVMVGA

SEQ ID NO: 65752 - protein, 179 aa, Homo sapiens
VIVVNQVNAGHLFVQQHTHPTFHALRSLDQQMYLCYSQPGIPTLPTPVEITVICAAPGADGAWWRAQVVASYEETNEVEIRYVDYGGYKRVKVDVLRQIRSDFVTLPFQGAEVLLDSVMPLSDDDQFSPEADAAMSEMTGNTALLAQVTSYSPTGLPLIQLWSVVGDETGFSIVQFKNK

SEQ ID NO: 65753 - protein, 18 aa, Homo sapiens
MSCVLGGVIPLGLLFLVC

SEQ ID NO: 65754 - protein, 10 aa, Homo sapiens
  MOD_RES (1)..(1): Any amino acid
XLGKCSAPVS

SEQ ID NO: 65755 - protein, 52 aa, Homo sapiens
MTSLYGRHAEKTTDMPKPSAPKVHVQRSVSRDTIAIHFSASGEEEEEEEEEF

SEQ ID NO: 65756 - protein, 105 aa, Homo sapiens
MMGLGNGRRSMKSPPLVLAALVACIIVLGFNYWIASSRSVDLQTRIMELEGRVRRAAAERGAVELKKNEFQGELEKQREQLDKIQSSHNFQLESVNKLYQDEKTS

SEQ ID NO: 65757 - protein, 198 aa, Homo sapiens
MSMLAERECRKRRPDPGRRKQKWAVDPQNTAWSNDDSKFGQRMLEKMGWSKGKGLGAQEQGATDHIKVQVKNNHLGLGATINNEDNWIAHQDDFNQLLAELNTCHGQETTDSSDKKEKKSFSLEEKSKISKNRVHYMKFTKGKDLSSRSKTDLDCIFGKRQSKKTPEGDASPSTPEENETTTTSAFTIQEYFAKRMAA

SEQ ID NO: 65758 - protein, 258 aa, Homo sapiens
MVLLHVKRGDESQFLLQAPGSTELEELTVQVARVYNGRLKVQRLCSEMEELAEHGIFLPPNMQGLTDDQIEELKLKDEWGEKCVPSGGAVFKKDDIGRRNGQAPNEKMKQVLKKTIEEAKAIISKKQVEAGVCVTMEMVKDALDQLRGAVMIVYPMGLPPYDPIRMEFENKEDLSGTQAGLNVIKEAEAQLWWAAKELRRTKKLSDYVGKNEKTKIIAKIQQRLEENDDDAYLNSPWADNTALKRHFHGVKDIKWRPR

SEQ ID NO: 65759 - protein, 97 aa, Homo sapiens
MDLYSTPAAALDRFVARRLQPRKEFVEKARRALGALAAALRERGGRLGAAAPRVLKTVKVRPAPASNPSHKSTLPSSTVAAKGASMRPASQSCGGTL

SEQ ID NO: 65760 - protein, 116 aa, Homo sapiens
MVRTKADSVPGTYRKVVAARAPRKVLGSSTSATNSTSVSSRKAENKYAGGNPVCVRPTPKWQKGIGEFFRLSPKDSEKENQIPEEAGSSGLGKAKRKLQDVHLRLRPSDYISYGNK

SEQ ID NO: 65761 - protein, 185 aa, Homo sapiens
DYNGYNDGYGFGSDRFGRDLNYCFSGMSDHRYGDGGSTFQSTTGHCVHMRGLPYRATENDIYNFFSPLNPVRVHIEIGPDGRVTGEADVEFATHEDAVAAMSKDKANMQHRYVELFLNSTAGASGGAYGSQMLGGMGLSNQSSYGGPASQQLSGGYGGGYGGQSSMSGYDQVLQENSSDFQSNIA

SEQ ID NO: 65762 - protein, 369 aa, Homo sapiens
MIERCICLVCLDAPGGVELSDTHRALQLLHGGGYSKNGANRWYDKSLQFVVGRDGTCGVVCEHSPFDGIVLVQCTEHLLKHVTQSSRKLIRADSVSELPAPRRLRWKCSPEIQGHLASSAEKLQRIVKNLDFIVYKFDNYGKTFIKKQKCSPDAFIQVALQLAFYRLHRRLVPTYESASIRRFQEGRVDNIRSATPEALAFVRAVTDHKAAVPASEKLLLLKDAIRAQTAYTVMAITGMAIDNHLLALRELARAMCKELPEMFMDETYLMSNRFVLSTSQVPTTTEMFCCYGPVVPNGYGACYNPQPETILFCISSFHSCKETSSSKFAKAVEESLIDMRDLCSLLPPTESKPLATKEKATRPSQGHQP

SEQ ID NO: 65763 - protein, 54 aa, Homo sapiens
  MOD_RES (1)..(1): Any amino acid
XNALPQENGLSPGAIAGIVIGVVALVALIAVALACFLHFGKTGRFPLPWSSCSL

SEQ ID NO: 65764 - protein, 102 aa, Homo sapiens
MESMFSSPAEAALQRETGVPGLLTPLPDLDGVLPCSSLTSYWEMLWLWLHDWRRRQGQRCSFWVTQPTAGVNLALGGPGLGIRGSWGFTSMTVIAFNGGVSP

SEQ ID NO: 65765 - protein, 164 aa, Homo sapiens
MKIAVLFCFFLLIIFQTDFGKNEEIPRKQRRKIYHRRLRKSSTSHKHRSNRQLGIQQTTVFTPVARLPIVNFDYSMEEKFESFSSFPGVESSYNVLPGKKGHCLVKGITMYNKAVWSPEPCTTCLCSDGRVLCDETMCHPQRCPQTVIPEGECCPVCSATGTEI

SEQ ID NO: 65766 - protein, 102 aa, Homo sapiens
LCCRRPPLGLYARMRRLPGPEVSGRSVAAASGPGAWGTDHYCLELLRKRDYEGYLCSLLLPAESRSSVFALRAFNVELAQAGLLLLLSCCTVCHWDLNTKHC

SEQ ID NO: 65767 - protein, 34 aa, Homo sapiens
MVMYARKQQRLSDGCHDRRGDSQPYQVTGGSSLI

SEQ ID NO: 65768 - protein, 101 aa, Homo sapiens
MWRGLWTLAAQAIVHAPEQRRTSPRLRRHHLRAKLWPRPLRHRSDPDQRPRQRPRPPNSHSTPRPAPCSPRQPAPAQRSPLRGASGPRTGALVPRSPEFHR

SEQ ID NO: 65769 - protein, 422 aa, Homo sapiens
MMMAKKWAKFLRDFENFKAACVPWENKIKAIESQFGSSVASYFLFLRWMYGVNMVLFILTFSLIMLPEYLWGLPYGSLPRKTVPRAEEASAANFGVLYDFNGLAQYSVLFYGYYDNKRTIGWMNFRLPLSYFLVGIMCIGYSFLVVLKAMTKNIGDDGGGDDNTFNFSWKVFTSWDYLIGNPETADNKFNSITMNFKEAITEEKAAQVEENVHLIRFLRFLANFFVFLTLGGSGYLIFWAVKRSQEFAQQDPDTLGWWEKNEMNMVMSLLGMFCPTLFDLFAELEDYHPLIALKWLLGRIFALLLGNLYVFILALMDEINNKIEEEKLVKANITLWEANMIKAYNASFSENSTGPPFFVHPADVPRGPCWETMVGQEFVRLTVSDVLTTYVTILIGDFLRACFVRFCNYCWCWDLEYGYWQK

SEQ ID NO: 65770 - protein, 1089 aa, Homo sapiens
MASSPELPTEDEQGSWGIDDLHISLQAEQEDTQKKAFTCWINSQLARHTSPSVISDLFTDIKKGHVLLDLLEVLSGQQLPRDKGSNTFQCRINIEHALTFLRNRSIKLINIHVTDIIDGNPSIILGLIWTIILHFHIEKLAQTLSCNYNQPSLDDVSVVDSSPASSPPAKKCSKVQARWQMSARKALLLWAQEQCATYESVNVTDFKSSWRNGMAFLAIIHALRPDLIDMKSVKHRSNKDNLREAFRIAEQELKIPRLLEPEDVDVVDPDEKSIMTYVAQFLQYSKDAPGTGEEAQGKVKDAMGWLTLQKEKLQKLLKDSENDTYFKKYNSLLSFMESFNEEKKSFLDVLSIKRDLDELDKDHLQLREAWDGLDHQINAWKIKLNYALPPPLHQTEAWLQEVEELMDEDLSASQDHSQAVTLIQEKMTLFKSLMDRFEHHSNILLTFENKDENHLPLVPPNKLEEMKRRINNILEKKFILLLEFHYYKCLVLGLVDEVKSKLDIWNIKYGSRESVELLLEDWHKFIEEKEFLARLDTSFQKCGEIYKNLAGECQNINKQYMMVKSDVCMYRKNIYNVKSTLQKVLACWATYVENLRLLRACFEETKKEEIKEVPFETLAQWNLEHATLNEAGNFLVEVSNDVVGSSISKELRRLNKRWRKLVSKTQLEMNLPLMIKKQDQPTFDNSGNILSKEEKATVEFSTDMSVELPENYNQNIKAGEKHEKENEEFTGQLKVAKDVEKLIGQVEIWEAEAKSVLDQDDVDTSMEESLKHLIAKGSMFDELMARSEDMLQMDIQNISSQESFQHVLTTGLQAKIQEAKEKVQINVVKLIAALKNLTDVSPDLDIRLKMEESQKELESYMMRAQQLLGQRESPGELISKHKEALIISNTKSLAKYLKAVEELKNNVTEDIKMSLEEKSRDVCAKWESLHHELSLYVQQLKIDIEKGKLSDNILKLEKQINKEKKLIRRGRTKGLIKEHEACFSEEGCLYQLNHHMEVLRELCEELPSQKSQQEVKRLLKDYEQKIERLLKCASEIHMTLQPTAGGTSKNEGTITTSENRGGDPHSEAPFAKSDNQPSTEKVLNVDNVF

SEQ ID NO: 65771 - protein, 238 aa, Homo sapiens
  MOD_RES (1)..(1): Any amino acid
XSNLVLFLNGAPFCWEGAQASEALLLFMGLTYLGSPFGGWLADARLGRARAILLSLALYLLGMLAFPLLAAPATRAALCGSARLLNCTAPGPDAAARCCSPATFAGLVLVGLGVATVKANITPFGADQVKDRGPEATRRFFNWFYWSINLGAILSLGGIAYIQQNVSFVTGYAIPTVCVGLAFVVFLCGQSVFITKPPDGSAFTDMFKILTYSCCSQKRSGERQSNGCRQHMFYRVFI

SEQ ID NO: 65772 - protein, 174 aa, Homo sapiens
MLVAAAAERNKDPILHVLRQYLDPAQRGVRVLEVASGSGQHAAHFARAFPLAEWQPSDVDQRCLDSIAATTQAQGLTNVKAPLHLDVTWGWEHWGGILPQSLDLLLCINMAHVSPLRCTEVCGEPSMGVCRGTTHPAWGQLGCQICPHHSRGALQSSRTPAQTQGPAHHLRALC

SEQ ID NO: 65773 - protein, 163 aa, Homo sapiens
MENPQDIFSSNGGCLSDIVIEKYLVESKESVSHVQLACSMQDCAFPLDGTELCIWNTKDPSHQLLILRGHHQPITAMAFGNKVNPLLICSASLDYVIMWNLDECREKVLQGTAASRERHLRVSMLRESLQGSAAFPRWSAVKFKNSAQHFVPGVPWGYSQGDD

SEQ ID NO: 65774 - protein, 211 aa, Homo sapiens
  MOD_RES (1)..(1): Any amino acid
XKSEEEEKLAELARQLQESAAKLHALRTEYFAQHEQGAAAGAADISTLDQKLRLVTSDFHQLILAFLQVYDDELGECCQRPGPDLHPCGPIIQATHQNLTSYSQIPRGQPKKPALVTMTTVPTCATLPLAQGFRDVHFGFLSERLRAFQPLTGWSCETPRSGMLLQVVMAVADTSAKAVETVKKQQGEQICWGGSSSVMSLATKMNELMEK

SEQ ID NO: 65775 - protein, 129 aa, Homo sapiens
  MOD_RES (1)..(1): Any amino acid
XSDGAHFQKSYTLTTGMDLVVKTVPVPDTGDSVELFIFDSAGKELFSEMLDKLWESPNVLCLVYDVTNEESFNNCSKWLEKARSQAPGISLPGVLVGNKTDLAGRRAVDSAEARAWALGQGLECFETSV

SEQ ID NO: 65776 - protein, 117 aa, Homo sapiens
MSRVPSPPPPAEMSSGPVAESWCYTQIKVVKFSYMWTINNFSFCREEMGEVIKSSTFSSGANDKLKWCLRVNPKGLDEESKDYLSLYLLLVSCPKSEVRAKFKFSILNAKGEETKAM

SEQ ID NO: 65777 - protein, 573 aa, Homo sapiens
MEAGGLPLELWRMILAYLHLPDLGRCSLVCRAWYELILSLDSTRWRQLCLGCTECRHPNWPNQPDVEPESWREAFKQHYLASKTWTKNALDLESSICFSLFRRRRERRTLSVGPGREFDSLGSALAMASLYDRIVLFPGVYEEQGEIILKVPVEIVGQGKLGEVALLASIDQHCSTTRLCNLVFTPAWFSPIMYKTTSGHVQFDNCNFENGHIQVHGPGTCQVKFCTFKNTHIFLHNVPLCVLENCEFVGSENNSVTVEGHPSADKNWAYKYLLGLIKSSPTFLPTEDSDFLMSLDLESRDQAWSPKTCDIVIEGSQSPTSPASSSPKPGSKAGSQEAEVGSDGERVAQTPDSSDGGLSPSGEDEDEDQLMYRLSYQVQGPRPVLGGSFLGPPLPGASIQLPSCLVLNSLQQELQKDKEAMALANSVQGCLIRKCLFRDGKGGVFVCSHGRAKMEGNIFRNLTYAVRCIHNSKIIMLRNDIYRCRASGIFLRLEGGGLIAGNNIYHNAEAGVDIRKKSNPLILCNQIHHGLRSGIVVLGNGKGIIRNNQIFSNKEAGIYILYHGNPVVRKCHP

SEQ ID NO: 65778 - protein, 91 aa, Homo sapiens
MTKDKEPIVKSFHFVCLMIIIVGTRIQFSDGNEFAVDKSKRGLIHVPKDLPLKTKVLDMSQNYIAELQVSDMSFLSELTVLRLSHNRIQLL

SEQ ID NO: 65779 - protein, 156 aa, Homo sapiens
MIQAILVFNNHGKPRLVRFYQRFPEEIQQQIVRETFHLVLKRDDNICNFLEGGSLIGGSDYKLIYRHYATLYFVFCVDSSESELGILDLIQVFVETLDKCFENVCELDLIFHMDKVHYILQEVVMGGMVLETNMNEIVAQIEAQNRLEKSEDQVLA

SEQ ID NO: 65780 - protein, 235 aa, Homo sapiens
MDSELMHSIVGSYHKPPERVFVPSFTQNEPSQNCHPANLEVTSPKILHSPNSQALILALKTLQEKIHRLELERTQAEDNLNILSREAAQYKKALENETNERNLAHQELIKQKKEKQLEYTKRMVLNVEREKNMILEQQAQLQREKEQDQMKLYAKLEKLDVLEKECFRLTTTQKTAEDKIKHLEEKLKEEEHQRKLFQDKASELQTGLEISKIIMSSVSNLKHSKEKKKSSKVCI

SEQ ID NO: 65781 - protein, 49 aa, Homo sapiens
  MOD_RES (1)..(1): Any amino acid
XGILSALGNFLAQMIEKKRKKENSRSLDVGGPLRYAVYGGKTPQPSPPR

SEQ ID NO: 65782 - protein, 557 aa, Homo sapiens
IGRALLWTTENLFPETPYLRKHKVIFVVSAGENYERKEFVKMMALRAKCQGYVIFVISLGSTRKDDMEELASYPLDQHLIQLGRIHKPDLNYIAKFLKPFLYSVRRGFNQYPPPMLEDACRLINLGGENIQNDGFQFVTELQEDFLGGNGFIGQELNSGRESPFVKTEDNGSDYLVYLPSQMFEPQKLMINYEKDQKSAEIASLTSGHENYGRKEEPDHTYEPGDVSLQEYYMDVAFLIDASQRVGSDEFKEVKAFITSVLDYFHIAPTPLTSTLGDRVAVLSYSPPGYMPNTEECPVYLEFDLVTYNSIHQMKHHLQDSQQLNGDVFIGHALQWTIDNVFVGTPNLRKNKVIFVISAGETNSLDKDVLRNVSLRAKCQGYSIFVFSFGPKHNDKELEELASHPLDHHLVQLGRTHKPDWNYIIKFVKPFVHLIRRAINKYPTEDMKATCVNMTSPNPENGGTENTVLLLPGIYEIKTENGDLFDEFDSQAQHLLVLGNNHSSGSETATDLMQKLYLLFSTEKLAMKDKEKAHLEEISALVVDKQQEKEDGEDTRSS

SEQ ID NO: 65783 - protein, 143 aa, Homo sapiens
MDLGSDAGSSSSSSRASSQSNSTKVTPCSECKSSSSPGGSLDLVSALEDYEEPFPVYQKKVIDEWAPEEDGEEEEEEDERDQRGYRDDRSPAREPGDVSARTRSGGGGGRSATTAMPPPVPNGNLHQHDPQDLRHNGNVVVAG

SEQ ID NO: 65784 - protein, 177 aa, Homo sapiens
ENWQFEEWGSQVTVVSSDMREWVAPEKADIIVSELLGSFADNELSPECLDGAQHFLKDDGVSIPGEYTSFLAPISSSKLYNEVRACREKDRDPEAQFEMPYVVRLHNFHQLSAPQPCFTFSHPNRDPMIDNNRYCTLEFPVEVNTVLHGFAGYFETVLYQDITLSIRPETHSPGISP

SEQ ID NO: 65785 - protein, 164 aa, Homo sapiens
MAAPRPSPAISVSVSAPAFYAPQKKFGPVVAPKPKVNPFRPGDSEPPPAPGAQRAQMGRVGEIPPPPPEDFPLPPPPLAGDGDDAEGALGGAFPPPPPPIEESFPPAPLEEEIFPSPPPPPEEEGGPEAPIPPPPQPREKVSSIDLEIDSLSSLLDDMTKNDPF

SEQ ID NO: 65786 - protein, 362 aa, Homo sapiens
MSDPSQLTQNVCLTQEMELSKAFSGQRTLLSAILSMLSLSFSTTSLLSNYWFVGTQKVPKPLCEKGLAAKCFDMPVSLDGDTNTSTQEVVQYNWETGDDRFSFRSFRSGMWLSCEETVEEPALLHPQSWKQFRALRSSGTAAAKGERCRSFIELTPPAKREILWLSLGTQITYIGLQFISFLLLLTDLLLTGNPACGLKLSAFAAVSSVLSGLLGMVAHMMYSQVFQATVNLGPEDWRPHVWNYGWAFYMAWLSFTCCMASAVTTFNTYTRMVLEFKCKHSKSFKENPNCLPHHHQCFPRRLSSAAPTVGPLTSYHQYHNQPIHSVSEGVDFYSELRNKGFQRGASQELKEAVRSSVEEEQC

SEQ ID NO: 65787 - protein, 40 aa, Homo sapiens
FLLQVYAPLPGRPDAFHRCIFLFCCREQPCCAGLRGFVAV

SEQ ID NO: 65788 - protein, 230 aa, Homo sapiens
MSGFDDPGIFYSDSFGGDAQADEGQARKSQLQRRFKEFLRQYRVGTDRTGFTFKYSLAPSLIEHLLPARYCSGCWAAALKLDLAPASRDELKRHYNLGEYWIEVEMEDLASFDEDLADYLYKQPAEHLQLLEEAAKEVADEVTRPRPSGEEVLQDIQVMLKSDASPSSIRSLKSDMMSHLVKIPGIIIAASAVRAKATRISIQCRSCRNTLTNIAMRPGLEGYALPRKCN

SEQ ID NO: 65789 - protein, 79 aa, Homo sapiens
MGNSYAGQLKTTRFEEVLHNSIEASLRSNNLVPRPIFSQLYLEAEQQLAALEGGSRVDNEEEEEEGEGGLETNGPPNPF

SEQ ID NO: 65790 - protein, 245 aa, Homo sapiens
MSRLRALLGLGLLVAGSRVPRIKSQTIACRSGPTWWGPQRLNSGGRWDSEVMASTVVKYLSQEEAQAVDQELFNEYQFSVDQLMELAGLSCATAIAKAYPPTSMSRSPPTVLVICGPGNNGGDGLVCARHLKLFGYEPTIYYPKRPNKPLFTALVTQCQKMDIPFLGEMPAEPMTIDELYELVVDAIFGFSFKGDVREPFHSILSVLKGLTVPIASIDIPSGAGIQKVGWGRLGPYPPDSCPHQV

SEQ ID NO: 65791 - protein, 3934 aa, Homo sapiens
MTTMLQKSDSNASFLRAARAGNLDKVVEYLKGGIDINTCNQNGLNALHLAAKEGHVGLVQELLGRGSSVDSATKKGNTALHIASLAGQAEVVKVLVKEGANINAQSQNGFTPLYMAAQENHIDVVKYLLENGANQSTATEDGFTPLAVALQQGHNQAVAILLENDTKGKVRLPALHIAARKDDTKSAALLLQNDHNADVQSKMMVNRTTESGFTPLHIAAHYGNVNVATLLLNRGAAVDFTARNGITPLHVASKRGNTNMVKLLLDRGGQIDAKTRDGLTPLHCAARSGHDQVVELLLERGAPLLARTKNGLSPLHMAAQGDHVECVKHLLQHKAPVDDVTLDYLTALHVAAHCGHYRVTKLLLDKRANPNARALNGFTPLHIACKKNRIKVMELLVKYGASIQAITESGLTPIHVAAFMGHLNIVLLLLQNGASPDVTNIRGETALHMAARAGQVEVVRCLLRNGALVDARAREEQTPLHIASRLGKTEIVQLLLQHMAHPDAATTNGYTPLHISAREGQVDVASVLLEAGAAHSLATKKGFTPLHVAAKYGSLDVAKLLLQRRAAADSAGKNGLTPLHVAAHYDNQKVALLLLEKGASPHATAKNGYTPLHIAAKKNQMQIASTLLNYGAETNIVTKQGVTPLHLASQEGHTDMVTLLLDKGANIHMSTKSGLTSLHLAAQEDKVNVADILTKHGADQDAHTKLGYTPLIVACHYGNVKMVNFLLKQGANVNAKTKNGYTPLHQAAQQGHTHIINVLLQHGAKPNATTANGNTALAIAKRLGYISVVDTLKVVTEEVTTTTTTITEKHKLNVPETMTEVLDVSDEEGDDTMTGDGGEYLRPEDLKELGDDSLPSSQFLDGMNYLRYSLEGGRSDSLRSFSSDRSHTLSHASYLRDSAVMDDSVVIPSHQVSTLAKEAERNSYRLSWGTENLDNVALSSSPIHSGFLVSFMVDARGGAMRGCRHNGLRIIIPPRKCTAPTRVTCRLVKRHRLATMPPMVEGEGLASRLIEVGPSGAQFLGPVIVEIPHFAALRGKERELVVLRSENGDSWKEHFCDYTEDELNEILNGMDEVLDSPEDLEKKRICRIITRDFPQYFAVVSRIKQDSNLIGPEGGVLSSTVVPQVQAVFPEGALTKRIRVGLQAQPMHSELVKKILGNKATFSPIVTLEPRRRKFHKPITMTIPVPKASSDVMLNGFGGDAPTLRLLCSITGGTTPAQWEDITGTTPLTFVNECVSFTTNVSARFWLIDCRQIQESVTFASQVYREIICVPYMAKFVVFAKSHDPIEARLRCFCMTDDKVDKTLEQQENFAEVARSRDVEVLEGKPIYVDCFGNLVPLTKSGQHHIFSFFAFKENRLPLFVKVRDTTQEPCGRLSFMKEPKSTRGLVHQAICNLNITLPIYTKESESDQEQEEEIDMTSEKNDETESTETSVLKSHLVNEVPVLASPDLLSEVSEMKQDLIKMTAILTTDVSDKAGSIKVKELVKAAEEEPGEPFEIVERVKEDLEKVNEILRSGTCTRDESSVQSSRSERGLVEEEWVIVSDEEIEEARQKAPLEITEYPCVEVRIDKEIKGKVEKDSTGLVNYLTDDLNTCVPLPKEQLQTVQDKAGKKCEALAVGRSSEKEGKDIPPDETQSTQKQHKPSLGIKKPVRRKLKEKQKQKEEGLQASAEKAELKKGSSEESLGEDPGLAPEPLPTVKATSPLIEETPIGSIKDKVKALQKRVEDEQKGRSKLPIRVKGKEDVPKKTTHRPHPAASPSLKSERHAPGSPSPKTERHSTLSSSAKTERHPPVSPSSKTEKHSPVSPSAKTERHSPASSSSKTEKHSPVSPSTKTERHSPVSSTKTERHPPVSPSGKTDKRPPVSPSGRTEKHPPVSPGRTEKRLPVSPSGRTDKHQPVSTAGKTEKHLPVSPSGKTEKQPPVSPTSKTERIEETMSVRELMKAFQSGQDPSKHKTGLFEHKSAKQKQPQEKGKVRVEKEKGPILTQREAQKTENQTIKRGQRLPVTGTAESKRGVRVSSIGVKKEDAAGGKEKVLSHKIPEPVQSVPEEESHRESEVPKEKMADEQGDMDLQISPDRKTSTDFSEVIKQELEDNDKYQQFRLSEETEKAQLHLDQVLTSPFNTTFPLDYMKDEFLPALSLQSGALDGSSESLKNEGVAGSPCGSLMEGTPQISSEESYKHEGLAETPETSPESLSFSPKKSEEQTGETKESTKTETTTEIRSEKEHPTTKDITGGSEERGATVTEDSETSTESFQKEATLGSPKDTSPKRQDDCTGSCSVALAKETPTGLTEEAACDEGQRTFGSSAHKTQTDSEVQESTATSDETKALPLPEASVKTDTGTESKPQGVIRSPQGLELALPSRDSEVLSAVADDSLAVSHKDSLEASPVLEDNSSHKTPDSLEPSPLKESPCRDSLESSPVEPKMKAGIFPSHFPLPAAVAKTELLTEVASVRSRLLRDPDGSAEDDSLEQTSLMESSGKSPLSPDTPSSEEVSYEVTPKTTDVSTPKPAVIHECAEEDDSENGEKKRFTPEEEMFKMVTKIKMFDELEQEAKQKRDYKKEPKQEESSSSSDPDADCSVDVDEPKHTGSGEDESGVPVLVTSESRKVSSSSESEPELAQLKKGADSGLLPEPVIRVQPPSPLPSSMDSNSSPEEVQFQPVVSKQYTFKMNEDTQEEPGKSEEEKDSESHLAEDRHAVSTEAEDRSYDKLNRDTDQPKICDGHGCEAMSPSSSAAPVSSGLQSPTGDDVDEQPVIYKESLALQGTHEKDTEGEELDVSRAESPQADCPSESFSSSSSLPHCLVSEGKELDEDISATSSIQKTEVTKTDETFENLPKDCPSQDSSITTQTDRFSMDVPVSDLAENDEIYDPQITSPYENVPSQSFFSSEESKTQTDANHTTSFHSSEVYSVTITSPVEDVVVASSSSGTVLSKESNFEGQDIKMESQQESTLWEMQSDSVSSSFEPTMSATTTVVGEQISKVIITKTDVDSDSWSEIREDDEAFEARVKEEEQKIFGLMVDRQSQGTTPDTTPARTPTEEGTPTSEQNPFLFQEGKLFEMTRSGAIDMTKRSYADESFHFFQIGQESREETLSEDVKEGATGADPLPLETSAESLALSESKETVDDEADLLPDDVSEEVEEIPASDAQLNSQMGISASTETPTKEAVSVGTKDLPTVQTGDIPPLSGVKQISCPDSSEPAVQVQLDFSTLTRSVYSDRGDDSPDSSPEEQKSVIEIPTAPMENVPFTESKSKIPVRTMPTSTPAPPSAEYESSVSEDFLSSVDEENKADEAKPKSKLPVKVPLQRVEQQLSDLDTSVQKTVAPQGQDMASIAPDNRSKSESDASSLDSKTKCPVKTRSYTETETESRERAEELELESEEGATRPKILTSRLPVKSRSTTSSCRGGTSPTKESKEHFFDLYRNSIEFFEEISDEASKLVDRLTQSEREQEIVSDDESSSALEVSVIENLPPVETEHSVPEDIFDTRPIWDESIETLIERIPDENGHDHAEDPQDEQERIEERLAYIADHLGFSWTELARELDFTEEQIHQIRIENPNSLQDQSHALLKYWLERDGKHATDTNLVECLTKINRMDIVHLMETNTEPLQERISHSYAEIEQTITLDHSEGFSVLQEELCTAQHKQKEEQAVSKESETCDHPPIVSEEDISVGYSTFQDGVPKTEGDSSATALFPQTHKEQVQQDFSGKMQDLPEESSLEYQQEYFVTTPGTETSETQKAMIVPSSPSKTPEEVSTPAEEEKLYLQTPTSSERGGSPIIQEPEEPSEHREESSPRKTSLVIVESADNQPETCERLDEDAAFEKELTEELGELEASSDEEAMVTTRVVRRRVIIQGDDMPEIPPETVTEEEYIDEHGHTVVKKVTRKIIRRYVSSEGTEKEEIMVQGMPQEPVNIEEGDGYSKVIKRVVLKSDTEQSEDNNE

SEQ ID NO: 65792 - protein, 178 aa, Homo sapiens
MEPEPEPAAVEVPAGRVLRGSLVAAEWRPEEGFVELKSPAGKFWQTMGFSEQGRQRLHPEEALYLLECGSIHLFHQDLPLSIQEAYQLLLTDHTVTFLQYQVFSHLKRLGYVVRRFQPSSVLSPYERQLNLDASVQHLEDGDGKRKRSSSSPRQPPHPSARPSPRAAPGQRGWAGDRR

SEQ ID NO: 65793 - protein, 41 aa, Homo sapiens
LFVFVVCGSGQPHKLASPGDCQNFLKVVTSRGSHPTPKTGN

SEQ ID NO: 65794 - protein, 159 aa, Homo sapiens
  MOD_RES (1)..(1): Any amino acid
XGKEPGCETIGLLMSSMDDLIRHCNGKLGSYKINGRTKAMVACYPGNGTGYVRHVDNPNGDGRCVTCIYYLNKDWDAKVSGGILRIFPEGKAQFADIEPKFDRLLFFWSDRRNPHEVQPAYATRGRLTLSPRLECSGMISAHCNLRLPGFKRFSCLSAS

SEQ ID NO: 65795 - protein, 106 aa, Homo sapiens
MDQFPESVTENFEYDDLAEACYIGDIVVFGTVFLSIFYSVIFAIGLVGNLLVVFALTNSKKPKSVTDIYLLNLALSDLLFVATLPFWTHYLINEKGLHNAMCKFTT

SEQ ID NO: 65796 - protein, 95 aa, Homo sapiens
  MOD_RES (1)..(1): Any amino acid
XTMMPLPTFWSILFFIMLLLLGLDSQGCFIFSLVKYVPLTYNKTYVYPNWAIGLGWSLALSSMLCVPLVIVIRLCQTEGPFLVRVKYLLTPREPN

SEQ ID NO: 65797 - protein, 185 aa, Homo sapiens
MMAAGAALALALWLLMPPVEVGGAGPPPIQDGEFTFLLPAGRKQCFYQSAPANASLETEYQVIGGAGLDVDFTLESPQGVLLVSESRKADGVHTSPLRPCGPGWSAASRCSRYCGPSRHVTATCKRATWSGSTSGQLSTWRCCCWWLCCRSARSSASSRTSARCPRSPCHGRKNGTKEGQQGVCI

SEQ ID NO: 65798 - protein, 456 aa, Homo sapiens
MLDDRARMEAAKKEKVEQILAEFQLQEEDLKKVMRRMQKEMDRGLRLETHEEASVKMLPTYVRSTPEGSEVGDFLSLDLGGTNFRVMLVKVGEGEEGQWSVKTKHQMYSIPEDAMTGTAEMLFDYISECISDFLDKHQMKHKKLPLGFTFSFPVRHEDIDKGILLNWTKGFKASGAEGNNVVGLLRDAIKRRGDFEMDVVAMVNDTVATMISCYYEDHQCEVGMIVGTGCNACYMEEMQNVELVEGDEGRMCVNTEWGAFGDSGELDEFLLEYDRLVDESSANPGQQLYEKLIGGKYMGELVRLVLLRLVDENLLFHGEASEQLRTRGAFETRFVSQVESDTGDRKQIYNILSTLGLRPSTTDCDIVRRACESVSTRAAHMCSAGLAGVINRMRESRSEDVMRITVGVDGSVYKLHPSFKERFHASVRRLTPSCEITFIESEEGSGRGAALVSAVA

SEQ ID NO: 65799 - protein, 92 aa, Homo sapiens
  MOD_RES (1)..(1): Any amino acid
XSGADSDGQPGPGEADHCRRILVRDAKGTIREIVLPKGLDLDRPKRTRTSFTAEQLYRLEMEFQRCQYVVGRERTELARQLNLSETQNQPQS

SEQ ID NO: 65800 - protein, 251 aa, Homo sapiens
  MOD_RES (1)..(1): Any amino acid
XQALTEEHARQQHNERLRKQFGAQANVIGPWIQTKMEEIGRISIEMHGTLEDQLSHLRQYEKSIVNYKPKIDQLEGDHQLIQEALIFDNKHTNYTMEHIRVGWEQLLTTIARTINEVENQILTRDAKGISQEQMNEFRASFNHFDRGEAEFARIMSIVDPNRLGVVTFQAFIDFMSRETADTDTADQVMASFKILAGDKNYITMDELRRELPPDQAEYCIARMAPYTGPDSVPGALDYMSFSTALYGESDL

SEQ ID NO: 65801 - protein, 199 aa, Homo sapiens
MSDNQSWNSSGSEEDPETESGPPVERCGVLSKWTNYIHGWQDRWVVLKNNALSYYKSEDETEYGCRGSICLSKAVITPHDFDECRFDISVNDSVWYLRAQDPDHRQQWIDAIEQHKTESGYGSESSLRRHGSMVSLVSGASGYSATSTSSFKKGHSLREKLAEMETFRDILCRQVDTLQKYFDACADAVSKDELQRDKG

SEQ ID NO: 65802 - protein, 521 aa, Homo sapiens
MSQIRKLDEDASPNEEKGDVPKDTLDDLFPNEDEQSPAPSPGGGDVSGQHGGYEIPARLRTLHNLVIQYASQGRYEVAVPLCKQALEDLEKTSGHDHPDVATMLNILALVYRDQNKYKEAAHLLNDALAIREKTLGKDHPAVAATLNNLAVLYGKRGKYKEAEPLCKRALEIREKVLGKFHPDVAKQLSNLALLCQNQGKAEEVEYYYRRALEIYATRLGPDDPNVAKTKNNLASCYLKQGKYQDAETLYKEILTRAHEKEFGSVNGDNKPIWMHAEEREESKDKRRDSAPYGEYGSWYKACKVDSPTVNTTLRSLGALYRRQGKLEAAHTLEDCASRNRKQGLDPASQTKVVELLKDGSGRRGDRRSSRDMAGGAGPRSESDLEDVGPTAEWNGDGSGSLRRSGSFGKLRDALRRSSEMLVKKLQGGTPQEPPNPRMKRASSLNFLNKSVEEPTQVGAGGCLGTGQLRPGLHACCQASLQHASSSSNSSWLCLRPTLGWTTGRHEGNPASPGGGRVNGQC

SEQ ID NO: 65803 - protein, 207 aa, Homo sapiens
MPVWCCRCSLAGHFRNYSDTETEGEIFNSLVQYFGDNLGRKVKAMPLVEETSLLEDSSVTFPVVIIGNGPSGICLSYMLSGYRPYLSSEAIHPNTILNSKLEEARHLSIVDQDLEYLSEGLEGRSSNPVAVLFDTLLHPDADFGYDYPSVLHWKLEQHHYIPHVVLGKGPPGGAWHNMEGSMLTISFGSWMELPGLKFKDWVSSKRR

SEQ ID NO: 65804 - protein, 175 aa, Homo sapiens
MAASAKKKNKKGKTISLTDFLAEDGGTGGGSTYVSKPVSWADETDDLEGDVSTTWHSNDDDVYRAPPIDRSILPTAPRAAREPNIDRSRLPKSPPYTAFLGNLPYDVTEESIKEFFRGLNISAVRLPREPSNPERLKGFGYAEFEDLDSLLSALSLNEECFCYAQTFKVTQGICA

SEQ ID NO: 65805 - protein, 680 aa, Homo sapiens
MPKPTLLLRGGWERERSPGDSELGRQFRDWCLRTYGDSAKTKTVTRSKYQRIAEVLQGGGGTGAGSGPAAGEKGKFQFWVRSKGFRLGSGREPKMGQVVYVPVKTGSGADGLSEPEGISLKRVAVVEDFFDIIYSMHVESSAEPGKAPKHAGQKKTYRAIAETYAFLPREAVTRFLMSCTECQKRMHFNSNGLEPKENEPPSPLVSGIIDYNMPLTSTYLKQMKLRVMNSQEQDETSVSSEDFDMSDSTWMSADPHLASSLSPSQDERMRSPQNLHSQEDDDSSSESGSGNGSSTLNPSTSSSTQGDPAFPEMNGNGAVAPMDFTTAAEDQPINLCDKLPPATALGTASYPSDGCGADGLRSRVKYGVKTTPESPPYSSGSYDSIKTEVSGCPEDLTVGRAPTADDDDDDHDDHEDNDKMNDSEGMDPERLKAFNMFVRLFVDENLDRMVPISKQPKEKIQAIIESCSRQFPEFQERARKRIRTYLKSCRRMKKNGMEMTRPTPPHLTSAMAENILAAACESETRKAAKRMRLEIYQSSQDEPIALDKQHSRDSAAITHSTYSLPASSYSQDPVYANGGLNYSYRGYGALSSNLQPPASLQTGNHSNGPTDLSMKGGASTTSTTPTPTPSSTSTSRPVPTAQLSPTEISAVRQLIAGYRESAAFLLRSADELENLILQQN

SEQ ID NO: 65806 - protein, 150 aa, Homo sapiens
  MOD_RES (1)..(1): Any amino acid
XSGALTWTKKFSLDYLALDFNSASPAPMQQARAFVFQVISSPGPRQEKQPPSEVCWPPGRGKREIAESQNTSFSLGLEHVTSFLLLLFCFLESRSHSVTQAGVQWHGHSSLQPRSPGLKLSSHLSLPSSWYYSCTSSPTAVFYFLIKNDL

SEQ ID NO: 65807 - protein, 81 aa, Homo sapiens
MRTYHYIPLFIWTYMFHTVDTILLQEKPNSYLSSKKIAGLTKDDGKMLRRTKRGWMWNQFFLLEEYTGTDTQYVGKLHTDQ

SEQ ID NO: 65808 - protein, 267 aa, Homo sapiens
MSSPSLSDLGKREPAAAADERGTQQRRACANATWNSIHNGVIAVFQRKGLPDQELFSLNEGVRQLLKTELGSFFTEYLQNQLLTKGMVILRDKIRFYEGQKLLDSLAETWDFFFSDVLPMLQAIFYPVQGKEPSVRQLALLHFRNAITLSVKLEDALARAHARVPPAIVQMLLVLQGVHESRGVTEDYLRLETLVQKVVSPYLGTYGLHSSEGPFTHSCILEKRLLRRSRSGDVLAKNPVVRSKSYNTPLLNPVQEHEAEGAAAGGT

SEQ ID NO: 65809 - protein, 128 aa, Homo sapiens
  MOD_RES (1)..(1): Any amino acid
XPPPQPPTQATPLMHTKPNSQGPPNPMALPSEHGLEQPSHTPPQTPTPPSTPPLGKQNPSLPAPQTLAGGNPETAQPHAGTLPRPRPVPKPRNRPSVPPPPQPPGVHSAGDSSLTNTAPTASKIVTDV

SEQ ID NO: 65810 - protein, 102 aa, Homo sapiens
MAYHSFLVEPISCHAWNKDRTQIAICPNNHEVHIYEKSGAKWTKVHELKEHNGQVTGIDWAPESNRIVTCGTDRNAYVWTLKGRTWKPTLVILRINRAARCV

SEQ ID NO: 65811 - protein, 59 aa, Homo sapiens; identical to SEQ ID NO: 55061

SEQ ID NO: 65812 - protein, 77 aa, Homo sapiens
MVVSAGPWSSEKAEMNILEINETLRPQLAEKKQQFRNLKEKCFLTQLAGFLANQQKKYKYEECKDLIKFMLRNERQF

SEQ ID NO: 65813 - protein, 115 aa, Homo sapiens
MMQLRQLDMKRITEEERRMASVLAKKEEEKKRESHKQSLLKEKKRLTINNVARQWDLQQQRVANIATNEDRKDSDSPQDPCQIDGSTLSAFPEETGPLDSGLNNALQGLSVIDTY

SEQ ID NO: 65814 - protein, 136 aa, Homo sapiens
MHLSICSSTHPSVHPPTQLSVYQEHLLKLMTMGDMKTPDFDDLLAAFDIPDMVDPKAAIESGHDDHESHMKQNAHGEDDSHAPSSSDVGVSVIVKNVRNIDSSEGGEKDGHNPTGNGLHNGFLTASSLDSYSKDGA

SEQ ID NO: 65815 - protein, 156 aa, Homo sapiens
LLHSPTWSWSCCWCVECCCLAPWMASFTISSLTGQSWGPLSPGQLQPLQQQLLQWDQLLCWLRGLLHPGLHGCRAGRAHLQGGRVREISVALCCALCFVIDLSMVTDGGMYVFQLFDYYSASGTTLLWQAFWECVVVAWVYGADRFMDDIACMIGY

SEQ ID NO: 65816 - protein, 73 aa, Homo sapiens
  MOD_RES (1)..(1): Any amino acid
XNNIMKRLKAIQNTGKGYEARNLHMMLSRLDDYGKKVMQVWTEKQKSLGQKRNQCLKKMIHATRGPDRGHLEC

SEQ ID NO: 65817 - protein, 218 aa, Homo sapiens
MASLQRNGSHLCGGVLVHPKWVLTAAHCLAQRMAQLRLVLGLHTLDSPGLTFHIKAAIQHPRYKPVPALENDLALLQLDGKVKPSRTIRPLALPSKRQVVAAGTRCSMAGWGLTHQGGRLSRVLRELDLQVLDTRMCNNSRFWNGSLSPSMVCLAADSKDQAPCKGDSGGPLVCGKGRVLARVLSFSSRVCTDIFKPPVATAVAPYVSWIRKVTGRSA

SEQ ID NO: 65818 - protein, 107 aa, Homo sapiens
MADPKYADLPGIARNEPDVYETSDLPEDDQAEFDAEELTSTSVEHIIVNPNAAYDKFKDKRVGTKGLDFSDRIGKTKRTGYESGEYEMVCWSGSEGDTPAKVPAPTA

SEQ ID NO: 65819 - protein, 310 aa, Homo sapiens
MLARAARGTGALLLRGLNILIPVLDRIRYVQSLKEIVINVPEQSAVTLDNVTLQIDGVLYLRIMDPYKASYGVEDPEYAVTQLAQTTMRSELGKLSLDKVFRERESLNASIVDAINQAADCWGIRCLRYEIKDIHVPPRVKESMQMQVEAERRKRATVLESEGTRESAINVAEGKKQAQILASEAEKAEQINQAAGEASAVLAKAKAKAEAIRILAAALTQHNGDAAASLTVAEQYVSAFSKLAKDSNTILLPSNPGDVTSMVAQAMGVYGALTKAPVPGTPDSLSSGSSRDVQGTDASLDEELDRVKMS

SEQ ID NO: 65820 - protein, 197 aa, Homo sapiens
LRATPWFLTSLGRAALDLAIIFLSCVMKSKMRQALGFAKEARESPDTQALLTCAEKEEENQENLDWVPLTTLSHCKSLRTMTAISRYMELTIEPVQQAGCSATRLPGDGQTSAGDASLQDPPSYPPVQVIRARVSSGSSSEVSSINSDLEQKYWEALNSEQWDPEDVNLEGSKENVELLGSQVHQDSVRTAHLSDDD

SEQ ID NO: 65821 - protein, 300 aa, Homo sapiens
MATFISVQLKKTSEVDLAKPLVKFIQQTYPSGGEEQAQYCRAAEELSKLRRAAVGRPLDKHEGALETLLRYYDQICSIEPKFPFSENQICLTFTWKDAFDKGSLFGGSVKLALASLGYEKSCVLFNCAALASQIAAEQNLDNDEGLKIAAKHYQFASGAFLHIKETVLSALSREPTVDISPDTVGTLSLIMLAQAQEVFFLKATRDKMKDAIIAKLANQAADYFGDAFKQCQYKDTLPKTSCSAAQCSVTSCWAISSVLSWREESHLQRLGSYLCSIPVFLFPGGVPCLGCKALYHAGQC

SEQ ID NO: 65822 - protein, 118 aa, Homo sapiens
MKCLDQQCELRVQLLQDLQDFFRKKAEIEMDYSRNLEKLAERFLAKTRSTKDQQFKKDQNVLSPVNCWNLLLNQSKEVGQQLQDDLMKVLNELYSVMKTYHMYNADSISAQSKLKEAE

SEQ ID NO: 65823 - protein, 962 aa, Homo sapiens
MPPRAPPAPGPRPPPRAAAATDTAAGAGGAGGAGGAGGPGFRPLAPRPWRWLLLLALPAACSAPPPRPVYTNHWAVQVLGGPAEADRVAAAHGYLNLGQIGNLEDYYHFYHSKTFKRSTLSSRGPHTFLRMDPQVKWLQQQEVKRRVKRQVRSDPQALYFNDPIWSNMWYLHCGDKNSRCRSEMNVQAAWKRGYTGKNVVVTILDDGIERNHPDLAPNYDSYASYDVNGNDYDPSPRYDASNENKHGTRCAGEVAASANNSYCIVGIAYNAKIGGIRMLDGDVTDVVEAKSLGIRPNYIDIYSASWGPDDDGKTVDGPGRLAKQAFEYGIKKGRQGLGSIFVWASGNGGREGDYCSCDGYTNSIYTISVSSATENGYKPWYLEECASTLATTYSSGAFYERKIVTTDLRQRCTDGHTGTSVSAPMVAGIIALALEANSQLTWRDVQHLLVKTSRPAHLKASDWKVNGAGHKVSHFYGFGLVDAEALVVEAKKWTAVPSQHMCVAASDKRPRSIPLVQVLRTTALTSACAEHSDQRVVYLEHVVVRTSISHPRRGDLQIYLVSPSGTKSQLLAKRLLDLSNEGFTNWEFMTVHCWGEKAEGQWTLEIQDLPSQVRNPEKQGKLKEWSLILYGTAEHPYHTFSAHQSRSRMLELSAPELEPPKAALSPSQVEVPEDEEDYTGVCHPECGDKGCDGPNADQCLNCVHFSLGSVKTSRKCVSVCPLGYFGDTAARRCRRCHKGCETCSSRAATQCLSCRRGFYHHQEMNTCVTLCPAGFYADESQKNCLKCHPSCKKCVDEPEKCTVCKEGFSLARGSCIPDCEPGTYFDSELIRCGECHHTCGTCVGPGREECIHCAKNFHFHDWKCVPACGEGFYPEEMPGLPHKVCRRYGPPGGERQAAVSSKGVPGGQSLAASSPGAGEGMLHHPTVDRSPFTELLRGLRPFVHWMHICWVPAVGRHRAAAG

SEQ ID NO: 65824 - protein, 236 aa, Homo sapiens
MDNRFATAFVIACVLSLISTIYMAASIGTDFWYEYRSPVQENSSDLNKSIWDEFISDEADEKTYNDALFRYNGTVGLWRRCITIPKNMHWYSPPERTESFDVVTKCVSFTLTEQFMEKFVDPGNHNSGIDLLRTYLWRCQFLLPFVSLGLMCFGALIGLCACICRSLYPTIATGILHLLAGLCTLGSVSCYVAGIELLHQKLELPDNVSGEFGWSFCLACVSAPLQFMASALFIWA

SEQ ID NO: 65825 - protein, 339 aa, Homo sapiens
MDEQPRLMHSHAGVGMAGHPGLSQHLQDGAGGTEGEGGRKQDIGDILQQIMTITDQSLDEAQARKHALNCHRMKPALFNVLCEIKEKTVLSIRGAQEEEPTDPQLMRLDNMLLAEGVAGPEKGGGSAAAAAAAAASGGAGSDNSVEHSDYRAKLSQIRQIYHTELEKYEQACNEFTTHVMNLLREQSRTRPISPKEIERMVSIIHRKFSSIQMQLKQSTCEAVMILRSRFLDARRKRRNFNKQATEILNEYFYSHLSNPYPSEEAKEELAKKCGITVSQVDTLRHVISQTGGYSDGLAASQMYSPQGISANGGWQDATTPSSVTSPTEGPGSVHSDTSN

SEQ ID NO: 65826 - protein, 119 aa, Homo sapiens
RPRRPHQIADLFRPKDQIAYSDTSPFLILSEASLADLNSRLEKKVKATNFRPNIVISGCDVYAEDSWDELLIGDVELKRVMACSRCILTTVDPDTGVMSRKEPLETLKRESDVHTDPHG

SEQ ID NO: 65827 - protein, 124 aa, Homo sapiens
MARNAEKAMTALARFRQAQLEEGKVKERRPFLASECTELPKAEKWRRQIIGEISKKVAQIQNAGLGEFRIRDLNDEINKLLREKGHWEVRIKELGGPDYGYMSCQSEPLPDLFSSCVVEILFFL

SEQ ID NO: 65828 - protein, 84 aa, Homo sapiens
MPLTPLFLTCQHSSVNSLRTELQTFPLSPVCKINLLTAEESANEYYMMWQLERCRSPLNPFLLTVPRIQEPHSQYSVTDLKKIF

SEQ ID NO: 65829 - protein, 299 aa, Homo sapiens
MDLVLKRCLLHLAVIGALLAVGATKVPRNQDWLGVSRQLRTKAWNRQLYPEWTEAQRLDCWRGSQVWGGQPVYPQETDDACIFPDGGPCPSGSWSQKRSFVYVWKTWGQYWQVLGGPVSGLSIGTGRAMLGTHTMEVTVYHRRGSRSYVPLAHSSSAFTITDQVPFSVSVSQLRALDGGNKHFLRNQPLTFALQLHDPSGYLAEADLSYTWDFGDSSGTLISRALVVTHTYLEPGPVTAQVVLQAAIPLTSCGSSPVPGTTDGHRPTAEAPNTTAGQVPTTEVVGTTPGQAPTAEPSGT

SEQ ID NO: 65830 - protein, 197 aa, Homo sapiens
MADDAGAAGGPGGPGGPGMGNRGGFRGGFGSGIRGRGRGRGRGRGRGRGARGGKAEDKEWMPVTKLGRLVKDMKIKSLEEIYLFSLPIKESEIIDFFLGASLKDEVLKIMPVQKQTRAGQRTRFKAFVAIGDYNGHVGLGVKCSKEVATAIRGAIILAKLSIVPVRRGYWGNKIGKPHTVPCKPRPPLMPFLRPTAT

SEQ ID NO: 65831 - protein, 79 aa, Homo sapiens
MTECTSLQFVSPFAFEAMQKVDVVCLASLSDPELRLLLPCLVRMALCAPADQSQSWAQDKKLILRLLSGVEAVNSIVAL

SEQ ID NO: 65832 - protein, 157 aa, Homo sapiens
SKNEVQDYVSVEYLPPHMGGTDPFKYSYPPLVDDDFQTPLCENGPITSEDETSSKEDIESDGKETLETISNEEQTPLLKKINPTESTSKAEENEKVDSKVKAFKKPLSVFKGPLLHISPAEELYFGSTESGEKKTLIVLTNVTKNIVAFKGDIPNAK

SEQ ID NO: 65833 - protein, 187 aa, Homo sapiens
  MOD_RES (1)..(1): Any amino acid
XVNQMPTQPQVQAKNQQNQQPGQSPQGMRPMSNMSASPMGVNGGVGVQTPSLLSDSMLHSAINSQNVQAIFPTPDPAALKDRRMENLVAYARKVEGDMYESANNRAEYYHLLAEKIYKIQKELEEKRRTRLQKQNMLPNAAGMVPVSMNPGPNMGQPQPGMTSNGPLPDPSMIRGSVPNQMMPRITP

SEQ ID NO: 65834 - protein, 1124 aa, Homo sapiens
MLKIMQDYDWHVFSLVTTIFPGYREFISFVKTTVDNSFVGWDMQNVITLDTSFEDAKTQVQLKKIHSSVILLYCSKDEAVLILSEARSLGLTGYDFFWIVPSLVSGNTELIPKEFPSGLISVSYDDWDYSLEARVRDGIGILTTAASSMLEKFSYIPEAKASCYGQMERPEVPMHTLHPFMVNVTWDGKDLSFTEEGYQVHPRLVVIVLNKDREWEKVGKWENHTLSLRHAVWPRYKSFSDCEPDDNHLSIVTLEEAPFVIVEDIDPLTETCVRNTVPCRKFVKINNSTNEGMNVKKCCKGFCIDILKKLSRTVKFTYDLYLVTNGKHGKKVNNVWNGMIGEVVYQRAVMAVGSLTINEERSEVVDFSVPFVETGISVMVSRSNGTVSPSAFLEPFSASVWVMMFVMLLIVSAIAVFVFEYFSPVGYNRNLAKGKAPHGPSFTIGKAIWLLWGLVFNNSVPVQNPKGTTSKIMVSVWAFFAVIFLASYTANLAAFMIQEEFVDQVTGLSDKKFQRPHDYSPPFRFGTVPNGSTERNIRNNYPYMHQYMTKFNQKGVEDALVSLKTGKLDAFIYDAAVLNYKAGRDEGCKLVTIGSGYIFATTGYGIALQKGSPWKRQIDLALLQFVGDGEMEELETLWLTGICHNEKNEVMSSQLDIDNMAGVFYMLAAAMALSLITFIWEHLFYWKLRFCFTGVCSDRPGLLFSISRGIYSCIHGVHIEEKKKSPDFNLTGSQSNMLKLLRSAKNISSMSNMNSSRMDSPKRAADFIQRGSLIMDMVSDKGNLMYSDNRSFQGKESIFGDNMNELQTFVANRQKDNLNNYVFQGQHPLTLNESNPNTVEVAVSTESKANSRPRQLWKKSVDSIRQDSLSQNPVSQRDEATAENRTHSLKSPRYLPEEMAHSDISETSNRATCHREPDNSKNHKTKDNFKRSVASKYPKDCSEVERTYLKTKSSSPRDKIYTIDGEKEPGFHLDPPQFVENVTLPENVDFPDPYQDPSENFRKGDSTLPMNRNPLHNEEGLSNNDQYKLYSKHFTLKDKGSPHSETSERYRQNSTHCRSCLSNMPTYSGHFTMRSPFKCDACLRMGNLYDIDEDQMLQETGMTNAWLLGDAPRTLTNTRCHPRR

SEQ ID NO: 65835 - protein, 291 aa, Homo sapiens
ERSLQSSAATSTSLLSEIEQSMEAEELEQEREQLRLQLWEAYCQVRYLCSHLRGNDSADSAVSTDSSMDESSETSSAKDVPAGSLRTALNELKRLIQSIVDGMEPTGSRRLDDDSLEEQIRQTSEDSRALRELMEGERGKLRQSLEELQRLHSQVTLLSVEMTALKEERDRLRVTSEDKEPKEQLQKAIRDRDEAIAKKNAVELELAKCRMDMMSLNSQLLDAIQQKLNLSQQLEAWQDDMHRVIDRQLMDTHLKERSQPAAALCRGHSAGRGDEPSIAEGKRLFSFFRKI

SEQ ID NO: 65836 - protein, 49 aa, Homo sapiens
MWRAPEAALRPEVSLERRGPEMKPAVDEMFPEGAGPYVDLDEAGGSTGL

SEQ ID NO: 65837 - protein, 7 aa, Homo sapiens
  MOD_RES (1)..(1): Any amino acid
XEKQSQC

SEQ ID NO: 65838 - protein, 92 aa, Homo sapiens
VYGAKDIELSPEAQAKIDRYTQQGFGNLPICMAKTHLSLSHQPDKKGVPRDFILPISDVRASIGAGFIYPLVGTRSSPLALVGESQPKQVHP

SEQ ID NO: 65839 - protein, 229 aa, Homo sapiens
MPRLKESRSHESLLSPSSAVEALDLSMEEEVVIKPVHSSILGQDYCFEVTTSSGSKCFSCRSAAERDKWMENLRRAVHPNKDNSRRVEHILKLWVIEAKDLPAKKKYLCELCLDDVLYARTTGKLKTDNVFWGEHFEFHNLPPLRTVTVHLYRETDKKKKKERNSYLGLVSLPAASVAGRQFVEKWYPVVTPNPKGGKGPGPMIRIKARYQTITILPMEMYKEFAEHIT

SEQ ID NO: 65840 - protein, 169 aa, Homo sapiens; identical to SEQ ID NO: 60738

SEQ ID NO: 65841 - protein, 320 aa, Homo sapiens
MRLGLLSVALLFVGSSHLYSDHYSPSGRHRLGPSPEPAASSQQAEAVRKRLRRRREGGAHAEDCGTAPLKDVLQGSRIIGGTEAQAGAWPWVVSLQIKYGRVLVHVCGGTLVRERWVLTAAHCTKDASDPLMWTAVIGTNNIHGRYPHTKKIKIKAIIIHPNFILESYVNDIALFHLKKAVRYNDYIQPICLPFDVFQILDGNTKCFISGWGRTKEEGNATNILQDAEVHYISREMCNSERSYGGIIPNTSFCAGDEDGAFDTCRVRPSNFPLKYFLKPEGNLSNKAFDNFLVVLIIRPKNNKSFFLLFNYFNNPNLLGS

SEQ ID NO: 65842 - protein, 434 aa, Homo sapiens
MSYGEIEGKFLGPREEVTSEPRCKKLKSTTESYVFHNHSNADFHRIQEKTGNDWVPVTIIDVRGHSYLQENKIKTTDLHRPLHDEMPGNRPDVIESIDSQVLQEARPPLVSADDEIYSTSKAFIGPIYKPPEKKKRNEGRNEAHVLNGINDRGGQKEKQKFNSEKSEIDNELFQFYKEIEELEKEKDGFENSCKESEPSQEQFVPFYEGHNNGLLKPDEEKKDLSNKAMPSHCDYQQNLGNEPDKYPCNGQVIPTFCDTSFTSFRPEWQSVYPFIVPYGPPLPSLNYHLNIQRFSGPPNPPSNIFQAQDDSQIQNGYYVNNCHVNWNCMTFDQNNEYTDCSENRSSVHPSGNGCSMQDRYVSNGFCEVRERCWKDHCMDKHNGTDRFVNQQFQEEKLNKLQKLLILLRGLPGSGKTTLSRKTSYRSGKISSYNR

SEQ ID NO: 65843 - protein, 105 aa, Homo sapiens
  MOD_RES (1)..(1): Any amino acid
XDSLMAEHSAAWYMPADKALVDSADDDKTLAPWEKAKPQNPNSKEAHDLPANKASASQPGSHLQCLSVHCTDDVGDAKARASVPTWRSLHSDISNRFGTFVAALT

SEQ ID NO: 65844 - protein, 190 aa, Homo sapiens
MKSKSKSLAECFPYDKPLIMKAPAVLAPGILVLLFTLVQRSNGECKEALAKSEMNVNMKYQLPNFTAETPIQNVILHEHHIFLGATNYIYVLNEEDLQKVAEYKTGPVLEHPDCFPCQDCSSKANLSGGVWKDNINMALVVDTYYDDQLISCGSVNRGTCQRHVFPHNHTADIQSEVHCIFSPQIEEPSQ

SEQ ID NO: 65845 - protein, 67 aa, Homo sapiens
LFYCLFSKYEELASAVLKRDVDIITLYQKVSVWLLRYDFVLEYPRPVMPNMVFIGGINCKKRKDLSQ

SEQ ID NO: 65846 - protein, 198 aa, Homo sapiens
  MOD_RES (1)..(1): Any amino acid
XSNTSAALSQSQRPRPTKKHKGGRMDQQPALPHRREGMTDDLPPPPDPPPGQGLRQQIGPSQQAGNVENSAERKGSSLERQHASSLEDTKSSLDCPARTSLEWQRQTQEWISSTERQEDIRKAPHKQGVGSEEALVPYSKPSFPSPGGHSSSGTASSKGSTGPRKTEVLRAGHQRNASDLLDIGYMGSNSQGQFTGEL

SEQ ID NO: 65847 - protein, 227 aa, Homo sapiens
MSTVHEILCKLSLEGDHSTPPSAYGSVKAYTNFDAERDALNIETAIKTKGVDEVTIVNILTNRSNAQRQDIAFAYQRRTKKELASALKSALSGHLETVILGLLKTPAQYDASELKASMKGLGTDEDSLIEIICSRTNQELQEINRVYKEMYKTDLEKDIISDTSGDFRKLMVALAKGRRAEDGSVIDYELIDQDARDLYDAGVKRKGTDVPKWISIMTERSVPHLQK

SEQ ID NO: 65848 - protein, 160 aa, Homo sapiens
MSDTLTADVIGRRVEVNGEHATVRFAGVVPPVAGPWLGVEWDNPERGKHDGSHEGTVYFKCRHPTGGSFIRPNKVNFGTDFLTAIKNRYVLEDGPEEDRKEQIVTIGNKPVETIGFDSIMKQQRCCGVSRGAQAWRNSTLSLTTFSFPKGQQMFSRQSSY

SEQ ID NO: 65849 - protein, 721 aa, Homo sapiens
MGDAESCLLRQQTREVRKKPLINYRFLRAAANAEPRGPQAQRTSCAKRECGAFTQRVRERAGRQPPAGGTRHSRAERGRRRSHPRSRTRTTALLRSSQTKEMATKEKLQCLKDFHKDILKPSPGKSPGTRPEDEAEGKPPQREKWSSKIDFVLSVAGGFVGLGNVWRFPYLCYKNGGGAFLIPYFIFLFGSGLPVFFLEIIIGQYTSEGGITCWEKICPLFSGIGYASVVIVSLLNVYYIVILAWATYYLFQSFQKELPWAHCNHSWNTPHCMEDTMRKNKSVWITISSTNFTSPVIEFWERNVLSLSPGIDHPGSLKWDLALCLLLVWLVCFFCIWKGVRSTGKVVYFTATFPFAMLLVLLVRGLTLPGAGAGIKFYLYPDITRLEDPQVWIDAGTQIFFSYAICLGAMTSLGSYNKYKYNSYRDCMLLGCLNSGTSFVSGFAIFSILGFMAQEQGVDIADVAESGPGLAFIAYPKAVTMMPLPTFWSILFFIMLLLLGLDSQFVEVEGQITSLVDLYPSFLRKGYRREIFIAFVCSISYLLGLTMVTEGGMYVFQLFDYYAASGVCLLWVAFFECFVIAWIYGGDNLYDGIEDMIGYRPGPWMKYSWAVITPVLCVGCFIFSLVKYVPLTYNKTYVYPNWAIGLGWSLALSSMLCVPLVIVIRLCQTEGPFLVRVKYLLTPREPNRWAVEREGATPYNSRTVMNGALVKPTHIIVETMM

SEQ ID NO: 65850 - protein, 123 aa, Homo sapiens
MESKDEVSDTDSGIILQSGPDSPVSPMKELTHAVHKQQRALEARLEACLEELRRLCLREAELTGTLPAEYPLKPGEKAPKVRRRIGAAYKLDDWALHREDPLSSLERQLALQLQITEAARRLC

SEQ ID NO: 65851 - protein, 422 aa, Homo sapiens
CFQSQEHKHHMVCGIQEAAENYRKLFQEILNTSREKLEAAKSILTDEQERMAMIQEEEQNFKKMIESEYSMRLRLLNEECEQNLQRQQECISDLNLRETLLNQAIKLATELEEMFQEMLQRLGRVGRENMEKLKESEARASEQVRSLLKLIVELEKKCGEGTLALLKCLDLEIRPPELREMNFCCAEATQSMNAKYSLERSKSLLLEHLEPAHITDLSLCHIRGLSSMFRVLQRHLTLDPETAHPCLALSEDLRTMRLRHGQQDGAGNPERLDFSAMVLAAESFTSGRHYWEVDVEKATRWQVGIYHGSADAKGSTARASGEKVLLTGSVMGTEWTLWVFPPLKRLFLEKKLDTVGVFLDCEHGQISFYNVTEMSLIYNFSHCAFQGALRPVFSLCIPNGDTSPDSLTILQHGPSCDATVSP

SEQ ID NO: 65852 - protein, 109 aa, Homo sapiens
  MOD_RES (1)..(1): Any amino acid
XVGVAKKLLQVDGLENNALHKEKVPQPPGPPPAKTCLELPPTLFLPHLPLHLPPLGPHVGTGSETLTMEGAVDTPSCFTGWQILRAETVSLIPPSSQVPAWRSCLIKIC

SEQ ID NO: 65853 - protein, 167 aa, Homo sapiens
MTKEERQAAQNECQVLKLLNHPNVIEYYENFLEDKALMIAMEYAPGGTLAEFIQKRCNSLLEEETILHFFVQILLALHHVHTHLILHRDLKTQNILLDKHRMVVKIGDFGISKILSSKSKAYTVVGTPCYISPELCEGKPYNQKSDIWALGCVLYELASLKRAFEAA

SEQ ID NO: 65854 - protein, 55 aa, Homo sapiens
PIAITCFTRGLDIRKEKADVLCPGGCPLEEFSVYGNIVYASVSSICGAAVHRRQK

SEQ ID NO: 65855 - protein, 975 aa, Homo sapiens
MVVAEDLSALRMAEDSCVDADLPDCNCDVTRVKKLKETLVAVQQLDKNMSSLRTWLAHIESELAKPIVYDSCNSEEIQRKLNEQQELQRDIEKHSTGVASVLNLCEVLLHDCDACATDAECDSIQQATRNLDRRWRNICAMSMERRLKIEETWRLWQKFLDDYSRFEDWLKSSERTAAFPSSSGVIYTVAKEELKKFEAFQRQVHECLTQLELINKQYRRLARENRTDSACSLKQMVHEGNQRWDNLQKRVTSILRRLKHFIGQREEFETARDSILVWLTEMDLQLTNIEHFSECDVQAKIKQLKAFQQEISLNHNKIEQIIAQGEQLIEKSEPLDAAIIEEELDELRRYCQEVFGRVERYHKKLIRLPLPDDEHDLSDRELELEDSAALSDLHWHDRSADSLLSPQPSSNLSLSLAQPLRSERSGRDTPASVDSIPLEWDHDYDLSRDLESAMSRALPSEDEEGQDDKDFYLRGAVGLSDVMIPESPEAYVKLTENAIKNTSGDHSALESQIRQLGKALDDSRFQIQQTENIIRSKTPTGPELDTSYKGYMKLLGECSSSIDSVKRLEHKLKEEEESLPGFVNLHSTETQTAGVIDRWELLQAQALSKELRMKQNLQKWQQFNSDLNSIWAWLGDTEEELEQLQRLELSTDIQTIELQIKKLKELQKAVDHRKAIILSINLCSPEFTQADSKESRDLQDRLSQMNGRWDRVCSLLEEWRGLLQDALMQCQGFHEMSHGLLLMLENIDRRKNEIVPIDSNLDAEILQDHHKQLMQIKHELLESQLRVASLQDMSCQLLVNAEGTDCLEAKEKVHVIGNRLKLLLKEVSRHIKELEKLLDVSSSQQDLSSWSSADELDTSGSVSPTSGRSTPNRQKTPRGKCSLSQPGPSVSSPHSRSTKGGSDSSLSEPGPGRSGRGFLFRVLRAALPLQLLLLLLIGLACLVPMSEEDYSCALSNNFARSFHPMLRYTNGPPPL

SEQ ID NO: 65856 - protein, 214 aa, Homo sapiens
MSDEGSRGSRLPLALPPASQGCSSGGGGGGSSAGGSGNSRPPRNLQGLLQMAITAGSEEPDPPPEPMSEERRQWLQEAMSAAFRGQREEVEQMKSCLRVLSQPMPPTAGEAEQAADQQEREGALELLADLCENMDNAADFCQLSGMHLLVGRYLEAGAAGLRWRAAQLIGTCSQNVAAIQEQVLGLGALRKLLRLLDRDACDTVRVKALFAISC

SEQ ID NO: 65857 - protein, 402 aa, Homo sapiens
MSQDTEVDMKEVELNELEPEKQPMNAASGAAMSLAGAEKNGLVKIKVAEDEAEAAAAAKFTGLSKEELLKVAGSPGWVRTRWALLLLFWLGWLGMLAGAVVIIVRAPRCRELPAQKWWHTGALYRIGDLQAFQGHGAGNLAGLKGRLDYLSSLKVKGLVLGPIHKNQKDDVAQTDLLQIDPNFGSKEDFDSLLQSAKKKSIRVILDLTPNYRGENSWFSTQVDTVATKVKDALEFWLQAGVDGFQVRDIENLKDASSFLAEWQNITKGFSEDRLLIAGTNSSDLQQILSLLESNKDLLLTSSYLSDSGSTGEHTKSLVTQYLNATGNRWCSWSLSQARLLTSFLPAQLLRLYQLMLFTLPGTPVFSYGDEIGLDAAALPGQAFLKSYFLCFSAYGGSSHAVG

SEQ ID NO: 65858 - protein, 520 aa, Homo sapiens [sequence omitted]

SEQ ID NO: 65859 - protein, 324 aa, Homo sapiens
MTTVLGSEVILAENLTMVTEFLLLGFSSLGEIQLALFVVFLFLYLVILSGNVTIISVIHLDKSLHTPMYFFLGILSTSETFYTFVILPKMLINLLSVARTISFNCCALQMFFFLGFAITNCLLLGVMGYDRYAAICHPLHYPTLMSWQVCGKLAAACAIGGFLASLTVVNLVFSLPFCSANKVNHYFCDISAVILLACTNTDVNEFVIFICGVLVLVVPFLFICVSYLCILRTILKIPSAEGRRKAFSTCASHLSVVIVHYGCASFIYLRPTANYVSNKDRLVTVTYTIVTPLLNPMVYSLRNKDVQLAIRKVLGKKGSLKLYN

SEQ ID NO: 65860 - protein, 266 aa, Homo sapiens
  MOD_RES (1)..(1): Any amino acid
XGRCEDIDECLNPSTCPDEQCVNSPGSYQCVPCTEGFRGWNGQCLDIDECQQGNLCVNGQCKNTEGSFRCTCGQGYQLSAAKDQCEDIDECQHRHLCAHGQCRNTEGSFQCVCDQGYRASGLGDHCEDINECLEDKSVCQRGDCINTAGSYDCTCPDGFQLDDNKTCQDINECEHPGLCGPQGECLNTEGSFHCVCQQGFSISADGRTCEDIDECVNNTVCDSHGFCDNTAGSFRCLCYQGFQAPQDGQGCVDVNECELLSGVCGE

SEQ ID NO: 65861 - protein, 123 aa, Homo sapiens
MPFGCVTLGDKKNYNQPSEVFDWILDQGYYSERDTSNVVRQVLEAVAYLHSLKIVHRNLKLENLVYYNRLKNSKIVISDFHLAKLENGLIKEPCGTPDPRGGRPAAVWTPCGLLGHWSHHVHP

SEQ ID NO: 65862 - protein, 147 aa, Homo sapiens
MHDVIKKVKKKGEWKVLVVDQLSMRMLSSCCKMTDIMTEGITIVEDINKRREPLPSLEAVYLITPSEKSVHSLISDFKDPPTAKYRAAHVFFTDSCPDALFNELVKSRAAKVIKTLTEINIAFLPYESQVYSLDSADSFQSFYSPHK

SEQ ID NO: 65863 - protein, 80 aa, Homo sapiens
MATTVSTQRGPVYIGELPQDFLRITPTQQQRQVQLDAQAAQQLQYGGAVGTVGRLNITVVQGCPLSVAPAWCPWPCPRPP

SEQ ID NO: 65864 - protein, 130 aa, Homo sapiens
MRSSKSKEVPLPNPRNSQSKDTVQDITTSWDALSQTKAALRHIENKLEVAPTSTAVCDSVMDTKKSSTSATRKISRKDGRYLDDSWVNAPISKSTKSRKEKSRSPLRATTLESNVKKNNRVEFREPLVSY

SEQ ID NO: 65865 - protein, 495 aa, Homo sapiens
MKAFGPPHEGPLQGLVASRIETYGGRHRASAQSTAGRLYPRGYPVLDPSRRRLQQYVPFARGSGQARGLSPMRLRDPEPEKRHGGHVGAGLLHSPKLKELTKAHELEVRLHTFSMFGMPRLPPEDRRHWEIGEGGDSGLTIEKSWRELVPGHKEMSQELCHQQEALWELLTTELIYVRKLKIMTDLLAAGLLNLQRVGLLMEVSAETLFGNVPSLIRTHRSFWDEVLGPTLEETRASGQPLDPIGLQSGFLTFGQRFHPYVQYCLRVKQTMAYAREQQETNPLFHAFVQWCEKHKRSGRQMLCDLLIKPHQRITKYPLLLHAVLKRSPEARAQEALNAMIEAVESFLRHINGQVRQGEEQESLAAAAQRIGPYEVLEPPSDEVEKNLRPFSTLDLTSPMLGVASEHTRQLLLEGPVRVKEGREGKLDVYLFLFSDVLLVTKPQRKADKAKVIRPPLMLEKLVCQPLRDPSTSFLQGVFSSPSSQRGEGGAGTEIK

SEQ ID NO: 65866 - protein, 151 aa, Homo sapiens
MGSVGSQRLEEPSVAGTPDPGVVMSFTFDSHQLEEAAEAAQGQGLRARGVPAFTDTTLDEPVPDDRYHAIYFAMLLAGVGFLLPYNSFITDVDYLHHKYPGTSIVFDMSLTYILVALAAVLLNNVLVERLTLHTRITAASATCGCSSSLGT

SEQ ID NO: 65867 - protein, 1242 aa, Homo sapiens
MANGGGGGGGSSGGGGGGGGSSLRMSSNIHANHLSLDASSSSSSSSSSSSSSSSSSSSSSVHEPKMDALIIPVTMEVPCDSRGQRMWWAFLASSMVTFFGGLFIILLWRTLKYLWTVCCHCGGKTKEAQKINNGSSQADGTLKPVDEKEEAVAAEVGWMTSVKDWAGVMISAQTLTGRVLVVLVFALSIGALVIYFIDSSNPIESCQNFYKDFTLQIDMAFNVFFLLYFGLRFIAANDKLWFWLEVNSVVDFFTVPPVFVSVYLNRSWLGLRFLRALRLIQFSEILQFLNILKTSNSIKLVNLLSIFISTWLTAAGFIHLVENSGDPWENFQNNQALTYWECVYLLMVTMSTVGYGDVYAKTTLGRLFMVFFILGGLAMFASYVPEIIELIGNRKKYGGSYSAVSGRKHIVVCGHITLESVSNFLKDFLHKDRDDVNVEIVFLHNISPNLELEALFKRHFTQVEFYQGSVLNPHDLARVKIESADACLILANKYCADPDAEDASNIMRVISIKNYHPKIRIITQMLQYHNKAHLLNIPSWNWKEGDDAICLAELKLGFIAQSCLAQGLSTMLANLFSMRSFIKIEEDTWQKYYLEGVSNEMYTEYLSSAFVGLSFPTVCELCFVKLKLLMIAIEYKSANRESRSRKRILINPGNHLKIQEGTLGFFIASDAKEVKRAFFYCKACHDDITDPKRIKKCGCKRLIYSKMSIYKRMRRACCFDCGRSERDCSCMSGRVRGNVDTLERAFPLSSVSVNDCSTSFRAFEDEQPSTLSPKKKQRNGGMRNSPNTSPKLMRHDPLLIPGNDQIDNMDSNVKKYDSTGMFHWCAPKEIEKVILTRSEAAMTVLSGHVVVCIFGDVSSALIGLRNLVMPLRASNFHYHELKHIVFVGSIEYLKREWETLHNFPKVSILPGTPLSRADLRAVNINLCDMCVILSANQNNIDDTSLQDKECILASLNIKSMQFDDSIGVLQANSQGFTPPGMDRSSPDNSPVHGMLRQPSITTGVNIPIITELVNDTNVQFLDQDDDDDPDTELYLTQPFACGTAFAVSVLDSLMSATYFNDNILTLIRTLVTGGATPELEALIAEENALRGGYSTPQTLANRDRCRVAQLALLDGPFADLGDGGCYGDLFCKALKTYNMLCFGIYRLRDAHLSTPSQCTKRYVITNPPYEFELVPTDLIFCLMQFDHNAGQSRASLSHSSHSSQSSSKKSSSVHSIPSTANRQNRPKSRESRDKQKKEMVYR

SEQ ID NO: 65868 - protein, 222 aa, Homo sapiens
MADDQGCIEEQGVEDSANEDSVDAKPDRSSFVPSLFSKKKKNVTMRSIKTTRDRVPTYQYNMNFEKLGKCIIINNKNFDKVTGMGVRNGTDKDAEALFKCFRSLGFDVIVYNDCSCAKMQDLLKKASEEDHTNAACFACILLSHGEENVIYGKDGVTPIKDLTAHFRGDRCKTLLEKPKLFFIQACRGTELDDGIQADSGPINDTDANPRYKIPVEADFLFA

SEQ ID NO: 65869 - protein, 431 aa, Homo sapiens
MLGYDISWAAFNIIEVMSASKFTFKRIGYLAASQSFHEGTDVIMLTTNQIRKDLSSPSQYDTGVALTGLSCFVTPDLARDLANDIMTLMSHTKPYIRKKAVLIMYKVFLKYPESLRPAFPRLKEKLEDPDPGVQSAAVNVICELARRNPKNYLSLAPLFFKLMTSSTNNWVLIKIIKLFGALTPLEPRLGKKLIEPLTNLIHSTSAMSLLYECVNTVIAVLISLSSGMPNHSASIQLCVQKLRILIEDSDQNLKYLGLLAMSKILKTHPKSVQSHKDLILQCLDDKDESIRLRALDLLYGMVSKKNLMEIVKKLMTHVDKAEGTTYRDELLTKIIDICSQSNYQYITNFEWYISILVELTRLEGTRHGHLIAAQMLDVAIRVKAIRKFAVSQMSALLDSAHLLASSTQRNGICEVLYAAAWICGEFSEHLQ

SEQ ID NO: 65870 - protein, 179 aa, Homo sapiens
MEVLQGVTHAAIWAACISYLSAAVPPELRTSAQGILQGLHLGLGRGCGAMIGGVLVNYFGAAATFRGIGMACLVILLLFALIQWLAVPDEEEDKTMLAERIPVPSSPVPIATIDLVQQQTEDVMPRIEPRLPPKKTKHQEEQEDVNKPAWGVSSSPWVTFVYALYQIKEMMQLTRDNRA

SEQ ID NO: 65871 - protein, 212 aa, Homo sapiens
VTDLVRGTLCPALKALFEHGLKKPSLLGGACHPWLFIEEAAGREVERDFASVYSRLVLCKTFRLDEDGKVLTPEELLYRAVQSVNVTHDAVHAQMDVKLRSLICVGLNEQVLHLWLEVLCSSLPTVEKWYQPWSFLRSPGWVQIKCELRVLCCFAFSLSQDWELPAKREVGGVGLVGPALMELPKPFAGWLRWEPEVLVSAVRNYPSHAQGL

SEQ ID NO: 65872 - protein, 44 aa, Homo sapiens
MIQAILVFNNHGKPRLVRFYQRFVTRRNSTADCSRDFPSSPQAG

SEQ ID NO: 65873 - protein, 98 aa, Homo sapiens
MSIAYLDPGNIESDLQSGAVAGFKLLWILLLATLVGLLLQRLAARLGVVTGLHLAEVCHRQYPKVPRVILWLMVELAIIGSDMQEVIGSAIAINLLSV

SEQ ID NO: 65874 - protein, 1209 aa, Homo sapiens
MANGGGGGGGSSGGGGGGGGSSLRMSSNIHANHLSLDASSSSSSSSSSSSSSSSSSSSSSVHEPKMDALIIPVTMEVPCDSRGQRMWWAFLASSMVTFFGGLFIILLWRTLKYLWTVCCHCGGKTKEAQKINNGSSQADGTLKPVDEKEEAVAAEVGWMTSVKDWAGVMISAQTLTGRVLVVLVFALSIGALVIYFIDSSNPIESCQNFYKDFTLQIDMAFNVFFLLYFGLRFIAANDKLWFWLEVNSVVDFFTVPPVFVSVYLNRSWLGLRFLRALRLIQFSEILQFLNILKTSNSIKLVNLLSIFISTWLTAAGFIHLVENSGDPWENFQNNQALTYWECVYLLMVTMSTVGYGDVYAKTTLGRLFMVFFILGGLAMFASYVPEIIELIGNRKKYGGSYSAVSGRKHIVVCGHITLESVSNFLKDFLHKDRDDVNVEIVFLHNISPNLELEALFKRHFTQVEFYQGSVLNPHDLARVKIESADACLILANKYCADPDAEDASNIMRVISIKNYHPKIRIITQMLQYHNKAHLLNIPSWNWKEGDDAICLAELKLGFIAQSCLAQGLSTMLANLFSMRSFIKIEEDTWQKYYLEGVSNEMYTEYLSSAFVGLSFPTVCELCFVKLKLLMIAIEYKSANRESRSRKRILINPGNHLKIQEGTLGFFIASDAKEVKRAFFYCKACHDDITDPKRIKKCGCKRLEDEQPSTLSPKKKQRNGGMRNSPNTSPKLMRHDPLLIPGNDQIDNMDSNVKKYDSTGMFHWCAPKEIEKVILTRSEAAMTVLSGHVVVCIFGDVSSALIGLRNLVMPLRASNFHYHELKHIVFVGSIEYLKREWETLHNFPKVSILPGTPLSRADLRAVNINLCDMCVILSANQNNIDDTSLQDKECILASLNIKSMQFDDSIGVLQANSQGFTPPGMDRSSPDNSPVHGMLRQPSITTGVNIPIITELAKPGKLPLVSVNQEKNSGTHILMITELVNDTNVQFLDQDDDDDPDTELYLTQPFACGTAFAVSVLDSLMSATYFNDNILTLIRTLVTGGATPELEALIAEENALRGGYSTPQTLANRDRCRVAQLALLDGPFADLGDGGCYGDLFCKALKTYNMLCFGIYRLRDAHLSTPSQCTKRYVITNPPYEFELVPTDLIFCLMQFDHNAGQSRASLSHSSHSSQSSSKKSSSVHSIPSTANRQNRPKSRESRDKQNRKEMVYR

SEQ ID NO: 65875 - protein, 86 aa, Homo sapiens
MAGASVNRVVSPGPLHCLKVILEKEGPRSLFRGLGPNLVGVAPSRAIYFAAYSNCKEKLNDVFDPDSTQVHMISAAMAEHKKLNTK

SEQ ID NO: 65876 - protein, 84 aa, Homo sapiens
MVARVSGLIVTLLSSSFPGGPLQNGQPSAEIQEEVALTSLGSGPAATNKRHSTSDKMHFPRSSLQPITTLGRPQAVPEDFQEQG

SEQ ID NO: 65877 - protein, 157 aa, Homo sapiens
MRRGAADRETERLPGAQGPCSAVSAASSTLAAAAAPRARATAAASTLSATAMREIVHLQAGQCGNQIGAKFWEVISDEHGIDPTGTYHGDSDLQLERINVYYNEATGGNYVPRAVLVDLEPGTMDSVRSGPFGQIFRPDNFVFGQSGAGNNWAKGHY

SEQ ID NO: 65878 - protein, 1726 aa, Homo sapiens
MDPRNTAMLGLGSDSEGFSRKSPSAISTGTLVSKREVELEKNTKEEEDLRKRNRERNIEAGKDDGLTDAQQQFSVKETNFSEGNLKLKIGLQAKRTKKPPKNLENYVCRPAIKTTIKHPRKALKSGKMTDEKNEHCPSKRDPSKLYKKADDVAAIECQSEEVIRLHSQGENNPLSKKLSPVHSEMADYINATPSTLLGSRDPDLKDRALLNGGTSVTEKLAQLIATCPPSKSSKTKPKKLGTGTTAGLVSKDLIRKAGVGSVAGIIHKDLIKKPTISTAVGLVTKDPGKKPVFNAAVGLVNKDSVKKLGTGTTAVFINKNLGKKPGTITTVGLLSKDSGKKLGIGIVPGLVHKESGKKLGLGTVVGLVNKDLGKKLGSTVGLVAKDCAKKIVASSAMGLVNKDIGKKLMSCPLAGLISKDAINLKAEALLPTQEPLKASCSTNINNQESQELSESLKDSATSKTFEKNVVRQNKESILEKFSVRKEIINLEKEMFNEGTCIQQDSFSSSEKGSYETSKHEKQPPVYCTSPDFKMGGASDVSTAKSPFSAVGESNLPSPSPTVSVNPLTRSPPETSSQLAPNPLLLSSTTELIEEISESVGKNQFTSESTHLNVGHRSVGHSISIECKGIDKEVNDSKTTHIDIPRISSSLGKKPSLTSESSIHTITPSVVNFTSLFSNKPFLKLGAVSASDKHCQVAESLSTSLQSKPLKKRKGRKPRWTKVVARSTCRSPKGLELERSELFKNVSCSSLSNSNSEPAKFMKNIGPPSFVDHDFLKRRLPKLSKSTAPSLALLADSEKPSHKSFATHKLSSSMCVSSDLLSDIYKPKRGRPKSKEMPQLEGPPKRTLKIPASKVFSLQSKEEQEPPILQPEIEIPSFKQGLSVSPFPKKRGRPKRQMRSPVKMKPPVLSVAPFVATESPSKLESESDNHRSSSDFFESEDQLQDPDDLDDSHRPSVCSMSDLEMEPDKKITKRNNGQLMKTIIRKINKMKTLKRKKLLNQILSSSVESSNKGKVQSKLHNTVSSLAATFGSKLGQQINVSKKGTIYIGKRRGRKPKTVLNGILSGSPTSLAVLEQTAQQAAGSALGQILPPLLPSSASSSEILPSPICSQSSGTSGGQSPVSSDAGFVEPSSVPYLHLHSRQGSMIQTLAMKKASKGRRRLSPPTLLPNSPSHLSELTSLKEATPSPISESHSDETIPSDSGIGTDNNSTSDRAEKFCGQKKRRHSFEHVSLIPPETSTVLSSLKEKHKHKCKRRNHDYLSYDKMKRQKRKRKKKYPQLRNRQDPDFIAELEELISRLSEIRITHRSHHFIPRDLLPTIFRINFNSFYTHPSFPLDPLHYIRKPDLKKKRGRPPKMREAMAEMPFMHSLSFPLSSTGFYPSYGMPYSPSPLTAAPIGLGYYGRYPPTLYPPPPSPSFTTPLPPPSYMHAGHLLLNPAKYHKKKHKLLRQEAFLTTSRTPLLSMSTYPSVPPEMAYGWMVEHKHRHRHKHREHRSSEQPQVSMDTGSSRSVLESLKRYRFGKDAVGERYKHKEKHRCHMSCPHLSPSKSLINREEQWVHREPSESSPLALGLQTPLQIDCSESSPSLSLGGFTPNSEPASSDEHTNLFTSAIGSCRVSNPNSSGRKKLTDSPGLFSAQDTSLNRLHRKESLPSNERAVQTLAGSQPTSDKPSQRPSESTNCSPTRKRSSSESTSSTDKTEDWYEYLEVTYILMIIETMRINMFPVGK

SEQ ID NO: 65879 - protein, 82 aa, Homo sapiens
CASINRIYGFYDECKRRFNIKLWKTFTDCFNCLPIAAIVDEKIFCCHGGRLVNLPYRFFFSSIIRKIPIIIKRLWENKAVLV

SEQ ID NO: 65880 - protein, 80 aa, Homo sapiens
  MOD_RES (1)..(1): Any amino acid
XYAFSYYYDRAVDTDMIDYEKGGILKVEDFERKAREVCDNLENFTSGSPFLCMDLSYITALLKDGFGFADSTVLQAAVLR

SEQ ID NO: 65881 - protein, 137 aa, Homo sapiens
MIPVAEFKQFTEQQPAFKVLKPWWDVLAEYLTVAMLMIGVFGCTLQVTQDKIICLPNHELQENLSEAPCQQLLPRGIPEQIGALQEVKGLKNNLDLQQYSFINQLCYETALHWYAKYFPYLVVIHTLIFMVCTSFWF

SEQ ID NO: 65882 - protein, 450 aa, Homo sapiens
MATNWGSLLQDKQQLEELARQAVDRALAEGVLLRTSQEPTSSEVVSYAPFTLFPSLVPSALLEQAYAVQMDFNLLVDAVSQNAAFLEQTLSSTIKQDDFTARLFDIHKQVLKEGIAQTVFLGLNRSDYMFQRSADGSPALKQIEINTISASFGGLASRTPAVHRHVLSVLSKTKEAGKILSNNPSKGLALGIAKAWELYGSPNALVLLIAQEKERNIFDQRAIENELLARNIHVIRRTFEDISEKGSLDQDRRLFVDGQEIAVVYFRDGYMPRQYSLQNWEARLLLERSHAAKCPDIATQLAGTKKVQQELSRPGMLEMLLPGQPEAVARLRATFAGLYSLDVGEEGDQAIAEALAAPSRFVLKPQREGGGNNLYGEEMVQALKQLKDSEERASYILMEKIEPEPFENCLLRPGSPARVVQCISELGIFGVYVRPRTQDLPTLPGYQMKP

SEQ ID NO: 65883 - protein, 46 aa, Homo sapiens
MKWMTWTRQIPSGAGFTWQNVGSGTCFSRIPTVSVQLAVKISKKAS

SEQ ID NO: 65884 - protein, 61 aa, Homo sapiens
MNKLNFHNNRVMQDRRSVCIFLPNDESLNIIINVKILCHQLLVQVCDLLRLKDCHLFGLSV

SEQ ID NO: 65885 - protein, 146 aa, Homo sapiens
KGHKRKSPFGSTERKTPVKKLAPEFSKVKTKTPKHSPIKEEPCGSLSETVCKRELRSQETPEKPRSSVDTPPRLSTPQKGPSTHPKEKAFSSEIEDLPYLSTTEMYLCRWHQPPPSPLPLRESSPKKEETVARSTFTHLPCSEFKV

SEQ ID NO: 65886 - protein, 167 aa, Homo sapiens
MMLADLSLYNEFRLWKDEPTMDRTCPFLDKIYQEDIFPCLTFSKSELASAVLEAVENNTLSIEPVGLQPIRFVKASAVECGGPKKCALTGQSKSCKHRIKLGDSSNYYYISPFCRYRITSVCNFFTYIRYIQQGLVKQQDVDQMFWEVMQLRKEMSLAKLGYFKEEL

SEQ ID NO: 65887 - protein, 210 aa, Homo sapiens
MTVMSLSRDLKDDFHSDTVLSILNEQRIRGILCDVTIIVEDTKFKAHSNVLAASSLYFKNIFWSHTICISSHVLELDDLKAEVFTEILNYIYSSTVVVKRQETVTDLAAAGKKLGISFLEDLTDRNFSNSPGPYVFCITEKGVVKEEKNEKRHEEPAITNGPRITNAFSIIETENSNNMFSPLDLRASFKKVSDSMRTASLCLERTDVCH

SEQ ID NO: 65888 - protein, 37 aa, Homo sapiens
MRPTLLWSLLLLLGVFAAAAAAPPAPTVNGSRPTSCP

SEQ ID NO: 65889 - protein, 487 aa, Homo sapiens
MPGLSCGGGRRLAGFSAFSGGGRFEALQRTGPREEENSTGAGEKGTGKSTQKPLHYKSCLFHRVVKDFMVQGGDFSEGNGRGGESIYGGFFEDESFAVKHNKEFLLSMANRGKDTNGSQFFITTKPTPHLDGHHVVFGQVISGQEVVREIENQKTDAASKPFAEVRILSCGELIPKSKVKKEEKKRHKSSSSSSSSSSDSDSSSDSQSSSDSSDSESATEEKSKKRKKKHRKNSRKHKKEKKKRKKSKKSESEAENLEAQPQSTVRPEEIPPIPENRFLMRKSPPKADEKERKNRERERERECNPPNSQPASYQRRLLVTRSGRKIKGRGPRRYRTPSRSRSRDRFRRSETPPHWRQEMQRAQRMRVSSGERWIKGDKSELNEIKENQRSPVRVKERKITDHRNVSESPNRKNEKEKKVKDHKSNSKERDIRRNSEKDDKYKNKVKKRAKSKSRSKSKEKSKSKERDSKHNRNEEKRMRSRSKGRDH

SEQ ID NO: 65890 - protein, 115 aa, Homo sapiens
MQPFLLLLAFLLTPGAGTEEIIGGHEAKPHSRPYMAFVQFLQEKSRKRCGGILVRKDFVLTAAHCQGRGDSGGPLVCKDVAQGILSYGNKKGTPPGVYIKVSHFLPWIKRTMKRL

SEQ ID NO: 65891 - protein, 581 aa, Homo sapiens
MSGQTLTDRIAAAQYSVTGSAVARAVCKATTHEVMGPKKKHLDYLIQATNETNVNIPQMADTLFERATNSSWVVVFKALVTTHHLMVHGNERFIQYLASRNTLFNLSNFLDKSGSHGYDMSTFIRRYSRYLNEKAFSYRQMAFDFARVKKGADGVMRTMAPEKLLKSMPILQGQIDALLEFDVHPNELTNGVINAAFMLLFKDLIKLFACYNDGVINLLEKFFEMKKGQCKDALEIYKRFLTRMTRVSEFLKVAEQVGIDKGDIPDLTQAPSSLMETLEQHLNTLEGKKPGNKSGAPSPLSKSSPATTVTSPNSTPAKTIDTSPPVDLFATASAAVPVSTSKPSSDLLDLQPDFSSGGAAAAAAPAPPPPAGGATAWGDLFESTPEVAAAPKPDAAPSIDLFSTDAFSSPPQGASPVPESSLTADLLSVDAFAAPSPATTASPAKVDSSGVIDLFGDAFGSSASEPQPASQAASSSSASADLLAGFGGSFMAPSPSPVTPAQNNLLQPNFEAAFGTTPSTSSSSSFDPSVFDGLGDLLMPTMAPAGQPAPVSMVPPSPAMAASKALGSDLDSSLASLVGNL

SEQ ID NO: 65892 - protein, 668 aa, Homo sapiens
MHRGLIHPQSRAVGGDAMTPILTVLICLGLSLGPRTHVQAGHLPKPTLWAEPGSVITQGSPVTLRCQGGQETQEYRLYREKKTALWITRIPQELVKKGQFPIPSITWEHAGRYRCYYGSDTAGRSESSDPLELVVTGAYIKPTLSAQPSPVVNSGGNVILQCDSQVAFDGFSLCKEGEDEHPQCLNSQPHARGSSRAIFSVGPVSPSRRWWYRCYAYDSNSPYEWSLPSDLLELLVLGVSKKPSLSVQPGPIVAPEETLTLQCGSDAGYNRFVLYKDGERDFLQLAGAQPQAGLSQANFTLGPVSRSYGGQYRCYGAHNLSSEWSAPSDPLDILIAGQFYDRVSLSVQPGPTVASGENVTLLCQSQGWMQTFLLTKEGAADDPWRLRSTYQSQKYQAEFPMGPVTSAHAGTYRCYGSQSSKPYLLTHPSDPLELVVSGPSGGPSSPTTGPTSTSAGPEDQPLTPTGSDPQSGLGRHLGVVIGILVAVILLLLLLLLLFLILRHRRQGKHWTSTQRKADFQHPAGAVGPEPTDRGLQWRSSPAADAQEENLYAAVKHTQPEDGVEMDTRSPHDEDPQAVTYAEVKHSRPRREMASPPSPLSGEFLDTKDRQAEEDRQMDTEAAASEAPQDVTYAQLHSLTLRREATEPPPSQEGPSPAVPSIYATLAIH

SEQ ID NO: 65893 - protein, 611 aa, Homo sapiens
MFRCGGLAAGALKQKLVPLVRTVCVRSPRQRNRLPGNLFQRWHVPLELQMTRQMASSGASGGKIDNSVLVLIVGLSTVGAGAYAYKTMKEDEKRYNERISGLGLTPEQKQKKAALSASEGEEVPQDKAPSHVPFLLIGGGTAAFAAARSIRARDPGARVLIVSEDPELPYMRPPLSKELWFSDDPNVTKTLRFKQWNGKERSIYFQPPSFYVSAQDLPHIENGGVAVLTGKKVVQLDVRDNMVKLNDGSQITYEKCLIATGTPRSLSAIDRAGAEVKSRTTLFRKIGDFRSLEKISREVKSITIIGGGFLGSELACALGRKARALGTEVIQLFPEKGNMGKILPEYLSNWTMEKVRREGVKVMPNAIVQSVGVSSGKLLIKLKDGRKVETDHIVAAVGLEPNVELAKTGGLEIDSDFGGFRVNAELQARSNIWVAGDAACFYDIKLGRRRVEHHDHAVVSGRLAGENMTGAAKPYWHQSMFCDLGPDVGYEAIGLVDSSLPTVGVFAKATAQDNPKSATEQSGTGIRSESETESEASEITIPPSTPAVPQAPVQGEDYGKGVIFYLRDKVVVGIVLWNIFNRMPIARKIIKDGEQHEDLNEVAKLFNIHED

SEQ ID NO: 65894 - protein, 1433 aa, Homo sapiens
MTGSHLSHDSWQYVLLIPSVLQEGSLDKACAQLFNLTESVVLTVSLNYGEVQTKIFEENVTGENFFKCISFEVPQARSDPLAFITFSAKGATLNLEERRSVAIRSRENVVFVQTDKPTYKPGQKDVNGIAQFFLDTYTFTYPNITLKDPQNNRIFQWQNVTSFRNITQLSFQLISEPMFGDYWIVVKRNSRKTVTHQFAVKRYVLPKFEVTVNAPQTVTISDDEFQVDVCAKYTFGQPVQGKTQIRVCREYFSSSNCEKNDNEICEQFIAQLENGCVSQIVNTKVFQLYRSGLFMTFHVAVIVTEFGTGNYCMQISEKTSVFITQLLGTVNFENMDTFYRRGISYFGTLKFSDPNNVPMVNKLLQLELNDEFIGNYTTDENGEAQFSIDTSDIFDPEFNLKATYVRPKSCYLPSWLTPQYLDAHFLVSRFYSRTNSFLKIVPEPKQLECNHQKVVTVHYSLNSEAYEDDSNVKFFYLVSLSHDSGNFQHRISSSPIYTAWNGNFSFPLSISADLAPAAVLFVYTLHPSGEIVADSVRFQVDKCFKHKVNIKFSNEQGLPGSNASLYLQAAPVLFCALGAVDGNVLLLKSEQQLSAESVYNMVPSIEPYGYFYHGLNLDDGKEDPCIPQRDMFYNGLYYTPVSNYGDGDIYNIVRNMGLKVFTNLHYRKPEVCVMERRLPLPKPLYLETENYGPMHSVPSRIACRGENADYVEQAIIQTVRTNFPETWMWDLVSVDSSGSANLSFLIPDTITQWEASGFCVNGDVGFGISSTTTLEVSQPFFIEIASPFSVVQNEQFDLIVNAFSYLNTCVEISVQVEESQNYEANINTWKINGSEVIQAGGRKTNIWTIIPKKLGKVNITVVAESKQSSACPNEGMEQQKLNWKDTVVKSFLVEPEGIEKERTQSFLICTEGAKASKQGVLDLPNDVVEGSARGFFTVVGDILGLAMQNLVVLQMPYGGGEQNAALLASDTYVLDYLKSTEQLTEEVQSKAFFLLSNGYQRQLSFKNSDGSYSVFWQQNQKGSIWLSALTFKTLERMKKFVFIDENVQKQTLIWLSSQQKTSGCFKNDGQLFNHAWEGGDEEDISLTAYVVGMFFEAGLNSTFPALRNALFCLEAALDSGVTNGYNHAILAYAFALAGKEKQVESLLQTLDQSATKLNNVIYWERERKPKTEEFPSFIPWAPSAQTEKSCYVLLAVISRKIPDLTYASKIVQWLAQQMNSHGGFSSNQVINVGLILIAILGEEGLFSKNQNTVTFSSEGSSEIFQVNGHNRLLVQRSEVTQAPGQYTVDVEGRGCTFIQATLKYNVLLPKKASGFSLSLEIVKNYSLTVFDLTVNLKYTGIRNKSSMVVIDVKMLSGFTPTMSSIEELENKGQVMKTEVKNDHVLFYLENVFGRADSFTFSVEQSNLVFNIQPAPGMVYDYYEKDGEAFLLTN

SEQ ID NO: 65895 - protein, 54 aa, Homo sapiens
MASKKREVQLQAEADNIVTLQPFRDKCEPVFLFSVMMFCVLLKMKTSKYWSKDK

SEQ ID NO: 65896 - protein, 306 aa, Homo sapiens
MFEEPEWAEAAPVAAGLGPVISRPPPAASSQNKGSKRRQLLATLRALEAASLSQHPPSLCISDSEEEEEERKKKCPKKASFASASAEVGKKGKKKCQKQGPPCSDSEEEVERKKKCHKQALVGSDSAEDEKRKRKCQKHAPINSAQHLDNVDQTGPKAWKGSTTNDPPKQSPGSTSPKPPHTLSRKQWRNRQKNKRRCKNKFQPPQVPDQAPAEAPTEKTEVSPVPRTDSHEARAGALRARMAQRLDGARFRYLNEQLYSGPSSAAQRLFQEDPEAFLLYHRGFQSQVKKWPLQPVDRIARDLRQR

SEQ ID NO: 65897 - protein, 16 aa, Homo sapiens
  MOD_RES (1)..(1): Any amino acid
XHVFPEFKESPRLGGR

SEQ ID NO: 65898 - protein, 56 aa, Homo sapiens
MSAEVKVTGQNQEQFLLLAKSAKGAALATLIHQVLEAPGVYVFGELLDMPNVREWN

SEQ ID NO: 65899 - protein, 156 aa, Homo sapiens
MPTRPVSFHERGGVGSRADYDTLSLRSLRLGPGGLDDRYSLVSEQLEPAATSTYRAFAYERQASSSSSRAGGLDWPEATEVSPSRTIRAPAVRTLQRFQSSHRSRGVGGAVPGAVLEPVARAPSVRSLSLSLADSGHLPDVHGFNSYGSHRTLQRL

SEQ ID NO: 65900 - protein, 130 aa, Homo sapiens
MKLVLIGHSIGSYFTLQMLKRVPELPVIRAFLLFPTIERMSESPNGRIATPLLCWFRYVLYVTGYLLLKPCPETIKSLLIRRGLQVMNLENEFSPLNILEPFCLANAAYLGGQEMMEVVKRDDETIKEHL

SEQ ID NO: 65901 - protein, 158 aa, Homo sapiens
MATLPLKPETAISVPEGGLPVAPSPALPEAHALGTLSAQQPPPAAATTSSTSLPFSPDSPGLLPNFPAPPPEGLMLSPAAVPVWSAGLELSAGTEGLLEAEKGLGTQAPHTVLRLPDPDPEGLLLGATAGGEVDEGLEAEAKVLTQLQSVPVEEPLEL

SEQ ID NO: 65902 - protein, 68 aa, Homo sapiens
MVLVHVGYLVLPVFGSVRNRGIAFSFRGLLRSVDRRRHRGGGGRRGRPGAQGTPARTQGERWLPPTPF

SEQ ID NO: 65903 - protein, 152 aa, Homo sapiens
MAMAYLAWRLARRSCPSSLQVTSFPVVQLHMNRTAMRASQKDFENSMNQVKLLKKDPGNEVKLKLYALYKQATEGPCNMPKPGVFDLINKAKWDAWNALGSLPKVLVISIVTFSKCLFIDHGLRLFVIVRSGSCQAELCGFGVQFESFIGIL

SEQ ID NO: 65904 - protein, 30 aa, Homo sapiens
MVLPQVFFLNVRSRNYHQKRRVIQEKYSRQ

SEQ ID NO: 65905 - protein, 236 aa, Homo sapiens
MEQVNELKEKGNKALSVGNIDDALQCYSEAIKLDPHNHVLYSNRSAAYAKKGDYQKAYEDGCKTVDLKPDWGKGYSRKAAALEFLNRFEEAKRTYEEGLKHEANNPQLKEGLQNMEARLAERKFMNPFNMPNLYQKLESDPRTRTLLSDPTYRELIEQLRNKPSDLGTKLQDPRIMTTLSVLLGVDLGSMDEEEEIATPPPPPPPKKETKPEPMEEDLPENKKQVLFFSLLTVTYL

SEQ ID NO: 65906 - protein, 96 aa, Homo sapiens
MADLDSPPKLSGVQQPSEGVGGGRCSEISAELIRSLTELQELEAVYERLCGEEKVVERELDALLEQQNTIESKMVTLHRMGTASIRPFRELMTSWT

SEQ ID NO: 65907 - protein, 161 aa, Homo sapiens
MGQPSLTWMLMVVVASWFITTAATDTSEARTKYNCPARWSWRTPQRGGDTEQGPDEDFTSQGSRKHKMCKEREGQQVHRKSYQRWCSECHSNATCTEDEAVTTCTCQEGFTGDGLTCVDLDECAIPGAHNCSANSSCVNTPGSFSCVCPEGFRLSPGLGCT

SEQ ID NO: 65908 - protein, 453 aa, Homo sapiens
MAQQANVGELLAMLDSPMLGVRDDVTAVFKENLNSDRGPMLVNTLVDYYLETSSQPALHILTTLQEPHDKHLLDRINEYVGKAATRLSILSLLGHVIRLQPSWKHKLSQAPLLPSLLKCLKMDTDVVVLTTGVLVLITMLPMIPQSGKQHLLDFFDIFGRLSSWCLKKPGHVAEVYLVHLHASVYALFHRLYGMYPCNFVSFLRSHYSMKENLETFEEVVKPMMEHVRIHPELVTGSKDHELDPRRWKRLETHDVVIECAKISLDPTEASYEDGYSVSHQISARFPHRSADVTTSPYADTQNSYGCATSTPYSTSRLMLLNMPGQLPQTLSSPSTRLITEPPQATLWSPSMVCGMTTPPTSPGNVPPDLSHPYSKVFGTTGGKGTPLGTPATSPPPAPLCHSDDYVHISLPQATVTPPRKVRSSSSAIPLPRHSDSLASLTLRSLIMPDRILT

SEQ ID NO: 65909 - protein, 137 aa, Homo sapiens
MAIQFRSLFPLALPGMLALLGWWWFFSRKKGHVSSHDEQQVEAGAVQLRADPAIKEPLPVEDVCPKVVSTPPSVTEPPEKELSTVSKLPAEPPALLQTHPPCRRSESSGILPNTTDMRLRPGTRRDDSTKLELALTG

SEQ ID NO: 65910 - protein, 101 aa, Homo sapiens
MEFAELIKTPRVDNVVLHRPFYPAVEGTLCLTGHHLILSSRQDNTEELWLLHSNIDAIDKRFVGSLGTIIIKCKDFRIIQLDIPGMEECLNIASSIENPSC

SEQ ID NO: 65911 - protein, 480 aa, Homo sapiens
MNMKASRVTLGEAGARARWPLGTPRAAATRREAAALPPVTLALLCLDGVFLSSAENDFVHRIQEELDRFLLQKQLSKVLLFPPLSSRLRYLIHRTAENFDLLSSFSVGEGWKRRTVICHQDIRVPSSDGLSGPCRAPASCPSRYHGPRPISNQGAAAVPRGARAGRWYRGRKPDQPLYVPRVLRRQEEWGLTSTSVLKREAPAGRDPEEPGDVGAGDPNSDQGLPVLMTQGTEDLKGPGQRCENEPLLDPVGPEPLGPESQSGKGDMVEMATRFGSTLQLDLEKGKESLLEKRLVAEEEEDEEEVEEDGPSSCSEDDYSELLQEITDNLTKKEIQIEKIHLDTSSFVEELPGEKDLAHVVEIYDFEPALKTEDLLATFSEFQEKGFRIQWVDDTHALGIFPCLASAAEALTREFSVLKIRPLTQGTKQSKLKALQRPKLLRLVKERPQTNATVARRLVARALGLQHKKKERPAVRGPLPP

SEQ ID NO: 65912 - protein, 116 aa, Homo sapiens
  MOD_RES (1)..(1): Any amino acid
XRLPHSSSSENIKSLSHSPGVVKERAKEIESRVVFQAGLTKPSQMRRSASLAKLGYLDLCKDCLPEREPASCESPHLKLLQPFLRTDSGMHAMEDQESLENPGVICKEHALYWLIL

SEQ ID NO: 65913 - protein, 157 aa, Homo sapiens
MERRAWSLQCTAFVLFCAWCALNSAKAKRQFVNEWAAEIPGGPEAASAIAEELGYDLLGQIGSLENHYLFKHKNHPRRSRRSAFHITKRLSDDDRVIWAEQQYEKERSKRSALRDSALNLFNDPMWNQQWYLQDTRMTAALPKLDLHVIPVWQKGIT

SEQ ID NO: 65914 - protein, 276 aa, Homo sapiens
MDTSSVGGLELTDQTPVLLGSTAMATSLTNVGNSFSGPANPLVSRSNKFQNSSVEDDDDVVFIEPVQPPPPSVPVVADQRTITFTSSKNEELQGNDSKITPSSKELASQKGSVSETIVIDDEEDMETNQGQEKNSSNFIERRPPETKNRTNDVDFSTSSFSRSKTKTGVGPFNPGRMNVAGDVFQNGESATHHNPDSWISQSASFPRNQKQPGVDSLSPVASLPKQIFQPSVQQQPTKPVKVTCANCKKPLQKGQTAYQRKGSAHLFCSTTCLSSF

SEQ ID NO: 65915 - protein, 89 aa, Homo sapiens
MEGAPTVRQVMNEGDSSLATDLQEDVEENPSPTVEENNVVVKKQGPNLHNWSGDWSFWISSSTYKDRNEEYRRQFTHLPDTERLIAEPD

SEQ ID NO: 65916 - protein, 75 aa, Homo sapiens
MAPSTPLLTVRGSEGLYMVNGPPHFTESTVFPRDRVSPCCPAGLELPTSGDPPASASQTAGITGGIWEELQSLYL

SEQ ID NO: 65917 - protein, 200 aa, Homo sapiens
  MOD_RES (1)..(1): Any amino acid
XPLPPGREGGPSAAERRLEALTRELERALEARTARDYFGICIKCGLGIYGAQQACQAMGSLYHTDCFTCDSCGRRLRGKAFYNVGEKVYCQEDFLYSGFQQTADKCSVCGHLIMEMILQALGKSYHPGCFRCSVCNECLDGVPFTVDVENNIYCVRDYHTVFAPKCASCARPILPAQGCETTIRVVSMDRDYHVACYHCE

SEQ ID NO: 65918 - protein, 123 aa, Homo sapiens
MEPTEPMEPTEPMEPTEPMEPTEPMEPTEPMEPARSAHRGGEALLRELEVLVQDVVRTSSWWERHGVDCAILALSLFALPAGVHSLHCRARHAWARQDAPCLHQRGGPGGLQHVEAALPQPLC

SEQ ID NO: 65919 - protein, 64 aa, Homo sapiens
EEEDEEARALLAGGPDEADRGAPAAPGALPALCDPSRLAHRLLAAIFAMIILLPFRLKLNEICK

SEQ ID NO: 65920 - protein, 68 aa, Homo sapiens
MAAVVAVCGGLGRKKLTHLVTAAVSLTHPGTHTVLWRRGCSQQVSSNEDLVFVGRNRKKSQKQLRELK

SEQ ID NO: 65921 - protein, 162 aa, Homo sapiens
WVQDFRLKAYASPAKLESIDGARYHALLIPSCPGALTDLASSGSLARILQHFHSESKPICAVGHGVAALCCATNEDRSWVFDSYSLTGPSVCELVRAPGFARLPLVVEDFVKDSGACFSGQGLGQHQAGAEEESKRTDLQKSSGGRVRISPYTSVCSSTHEE

SEQ ID NO: 65922 - protein, 59 aa, Homo sapiens
  MOD_RES (1)..(1): Any amino acid
XLYAQAQKLRKHSSHLFTGAQGHHSRAADAAHLDGGRSAGWLLGGQPRPPSPRPGRQLR

SEQ ID NO: 65923 - protein, 75 aa, Homo sapiens
MRLRRLALFPGVALLLAAARLAAASDVLELTDDNFESRISDTGSAGLMLVEFFAPWLQNSPSQRDPSATLWLLKR

SEQ ID NO: 65924 - protein, 67 aa, Homo sapiens
MARIPKTLKFVVVIVAVLLPDLIDQNILEPVTRAQRVWITPTLPTMNLLASHVQFVNQIKNIKVPAP

SEQ ID NO: 65925 - protein, 421 aa, Homo sapiens
MSDHGDVSLPPEDRVRALSQLGSAVEVNEDIPPRRYFRSGVEIIRMASIYSEEGNIEHAFILYNKLFIEKLPKHRDYKSAVIPEKKDTVKKLKEIAFPKAEELKAELLKRYTKEYTEYNEEKKKEAEELARNMAIQQELEKEKQRVAQQKQQQLEQEQFHAFEEMIRNQELEKERLKIVQEFGKVDPGLGGPLVPDLEKPSLDVFPTLTVSSIQPSDCHTTVRPAKPPVVDRSLKPGALSNSESIPTIDGLRHVVVPGRLCPQFLQLASANTARGVETCGILCGKLMRNEFTITHVLIPKQSAGSDYCNTENEEELFLIQDQQGLITLGWIHTHPTQTAFLSSVDLHTHCSYQMMLPESVAIVCSPKFQETGFFKLTDHGLEEISSCRQKGFHPHSKDPPLFCSCSHVTVVDRAVTITDLR

SEQ ID NO: 65926 - protein, 76 aa, Homo sapiens
MLIHKTEDVNTLDSEKRTPLHVAAFLGDAEIIELLILSGARVNAKDNMWLTPLHRAVASRSEEAVQVLIKHSADVN

SEQ ID NO: 65927 - protein, 569 aa, Homo sapiens
MSTSWSDRLQNAADMPANMDKHALKKYRREAYHRVFVNRSLAMEKIKCFGFDMDYTLAVYKSPEYESLGFELTVERLVSIGYPQELLSFAYDSTFPTRGLVFDTLYGNLLKVDAYGNLLVCAHGFNFIRGSQVAVQKRPETREQYPNKFIQRDDTERFYILNTLFNLPETYLLACLVDFFTNCPRYTSCETGFKDGDLFMSYRSMFQDVRDAVDWVHYKGSLKEKTVENLEKYVVKDGKLPLLLSRMKEVGKVFLATNSDYKYTDKIMTYLFDFPHGPKPGSSHRPWQSYFDLILVDARKPLFFGEGTVLRQVDTKTGKLKIGTYTGPLQHGIVYSGGSSDTICDLLGAKGKDILYIGDHIFGDILKSKKRQGWRTFLVIPELAQELHVWTDKSSLFEELQSLDIFLAELYKHLDSSSNERPDISSIQRRIKKVTHDMDMCYGMMGSLFRSGSRQTLFASQVMRYADLYAASFINLLYYPFSYLFRAAHVLMPHESTVEHTHVDINEMESPLATRNRTSVDFKDTDYKRHQLTRSISEIKPPNLFPLAPQEITHCHDEDDDEEEEEEEE

SEQ ID NO: 65928 - protein, 139 aa, Homo sapiens
MLERSGVITAQCNLKHWGSSHSPASASEELGLLEPLATTNLLSIYGFAYSGHFMVEKYRPQTLNDLISHQDILSTIQKFINEDRLPHLLLYGPPGTGKTSTILACAKQLYKDKEFGSMVLELNASDDRGIDIIRGPILS

SEQ ID NO: 65929 - protein, 249 aa, Homo sapiens
  MOD_RES (1)..(1): Any amino acid
XEKALKVESEHPSSGEKLKYNQQGEVQQLHQNLHRLQILCNSAENELRYERGQNLDLKQHNSLLQEENIKIKIELKHAQQKLLDSTKMCSSLTAEYKHCQQKIKELELEVLKHTQSIKSQNNLQEKLVQEKSKVADAEEKILDLQRKLEHAHKVCLTDTCISEKQQLEEKIKEATQNEAKVKQQYQEEQQKRKLLYQNVDELHRQVRTLQDKENLLEMTCSQQQSRIQQQEALLKQLENEKRKYDEVRK

SEQ ID NO: 65930 - protein, 44 aa, Homo sapiens
MSLSITNNGHSVQVDFNDSDDRTAASGSLECQEVQHFWGGGLST

SEQ ID NO: 65931 - protein, 178 aa, Homo sapiens
MQWNVPRTVSRLARRTCLEPHNAGLFGHCQNVKGPLLLYNAESKVVLVQGPQKQWLHLSAAQCVAKERRPLDAHPPQPGVLRHKQGKQHVSFRRVFSSSATAQGTPEKKEEPDPLQDKSISLYQRFKKTFRQYGKVLIPVHLITSGVWFGTFYYAALKGVNVVPFLELIGLPDSVVSI

SEQ ID NO: 65932 - protein, 386 aa, Homo sapiens
MAALRALCGFRGVAAQVLRPGAGVRLPIQPSRGVRQWQPDVEWAQQFGGAVMYPSKETAHWKPPPWNDVDPPKDTIVKNITLNFGPQHPAAHGVLRLVMELSGEMVRKCDPHIGLLHRGTEKLIEYKTYLQALPYFDRLDYVSMMCNEQAYSLAVEKLLNIRPPPRAQWIRVLFGEITRLLNHIMAVTTHALDLGAMTPFFWLFEEREKMFEFYERVSGARMHAAYIRPGGVHQDLPLGLMDDIYQFSKNFSLRLDELEELLTNNRIWRNRTIDIGVVTAEEALNYGFSGVMLRGSGIQWDLRKTQPYDVYDQVEFDVPVGSRGDCYDRYLCRVEEMRQSLRIIAQCLNKMPPGEIKVDDAKVSPPKRAEMKRRGFTLLARLVLNT

SEQ ID NO: 65933 - protein, 311 aa, Homo sapiens
MARLGSTGGVSGRVVTQHRDSAPFLGAPRLGLRELGPIRGTAPEWHGRWNAAERSDKMYQVPLPLDRDGTLVRLRFTMVALVTVCCPLVAFLFCILWSLLFHFKETTATHCGVPNYLPSVSSAIGGEVPQRYVWRFCIGLHSAPRFLVAFAYWNHYLSCTSPCSCYRPLCRLNFGLNVVENLALLVLTYVSSSEDFTIHENAFIVFIASSLGHMLLTCILWRLTKKHTVSQEDRKSYSWKQRLFIINFISFFSALAVYFRHNMYCEAGVYTIFAILEYTVVLTNMAFHMTAWWDFGNKELLITSQPEEKRF

SEQ ID NO: 65934 - protein, 133 aa, Homo sapiens
MWSLTASEGESTTAHFFLGAGDEGLGTRGIGMRPEESDSELLEDEEDEVPPEPQIIVGICAMTKKSKSKPMTQILERLCRFDYLTVVILGEDVILNEPVENWPSCHCLISFHSKGFPLDKAVAYSKLRNPFLI

SEQ ID NO: 65935 - protein, 94 aa, Homo sapiens
  MOD_RES (1)..(1): Any amino acid
XTAKFAVRLPRVWEARAPSLSGAPAPTPPAPPPSRSSRLGLWPRCFLIFPQLRILLLGPQESNNSTGTMWKVSALLFVLGSASLWVLAEGGEGV

SEQ ID NO: 65936 - protein, 608 aa, Homo sapiens
MEESHFNSNPYFWPSIPTVSGQIENTMFINKMKDQLLPEKGCGLAPPHYPTLLTVPASVSLPSGISMDTESKSDQLTPHSQASVTQNITVVPVPSTGLMTAGVSCSQRWRREGSQSRGPGLVITSPSGSLVTTASSAQTFPISAPMIVSALPPGSQALQVVPDLSKKVASTLTEEGGGGGGGGGSVAPKPPRGRKKKRMLESGLPEMNDPYVLSPEDDDDHQKDGKTYRSEGNCGTGNGQSLGLMDSVPGSTTNLLCDPGCRMCSLTFYSKSEMQIHSKSHTETKPHKCPHCSKTFANSSYLAQHIRIHSGAKPYSCNFCEKSFRQLSHLQQHTRIHSKMHTETIKPHKCPHCSKTFANTSYLAQHLRIHSGAKPYNCSYCQKAFRQLSHLQQHTRIHTGDRPYKCAHPGCEKAFTQLSNLQSHRRQHNKDKPFKCHNCHRAYTDAASLEVHLSTHTVKHAKVYTCTICSRAYTSETYLMKHMRKHNPPDLQQQVQAAAAAAAVAQAQAQAQAQAQAQAQAQAQAQASQASQQQQQQQQQQQQQQQQPPPHFQSPGAAPQGGGGGDSNPNPPPQCSFDLTPYKTAEHHKDICLTVTTSTIQVEHLASS

SEQ ID NO: 65937 - protein, 987 aa, Homo sapiens
MDSLDHMLTDPLELGPCGDGHGTRIMEDCLLGGTRVSLPEDLLEDPEIFFDVVSLSTWQEVLSDSQREHLQQFLPQFPEDSAEQQNELILALFSGENFRFGNPLHIAQKLFRDGHFNPEVVKYRQLCFKSQYKRYLNSQQQYFHRLLKQILASRSDLLEMARRSGPALPFRQKRPSPSRTPEEREWRTQQRYLKVLREVKEECGDTALSSDEEATLDLQEQFSFEDLSSWLPSSPARSPSPAVPLRVVPTLSTTDMKTADKVELGDSDLKIMLKKHHEKRKHQPDHPDLLTGDLTLNDIMTRVNAGRKGSLAALYDLAVLKKKVKEKEEKKKKKIKTIKSEAEDLAEPLSSTEGVAPLSQAPSPLAIPAIKEEPLEDLKPCLGINEISSSFFSLLLEILLLESQASLPMLEERVLDWQSSPASSLNSWFSAAPNWAELVLPALQYLAGESRAVPSSFSPFVEFKEKTQQWKLLGQSQDNEKELAALFQLWLETKDQAFCKKMKTAQMPQHLSLGRTDYVVRPSTGEEKRVFQEQERYRYSQPHKAFTFRMHGFESVVGPVKGVFDKETSLNKAREHSLLRSDRPAYVTILSLVRDAAARLPNGEGTRAEICELLKDSQFLAPDVTSTQVNTVVSGALDRLHYEKDPCVKYDIGRKLWIYLHRDRSEEEFERIHQAQAAAAKARKALQQKPKPPSKVKSSSKESSIKVLSSGPSEQSQMSLSDSSMPPTPVTPVTPTTPALPAIPISPPPVSAVNKSGPSTVSEPAKSSSGVLLVSSPTMPHLGTMLSPASSQTAPSSQAAARVVSHSGSAGLSQVRVVAQPSLPAVPQQSGGPAQTLPQMPAGPQIRVPATATQTKVVPQTVMATVPVKAQTTAATVQRPGPGQTGLTVTSLPATASPVSKPATSSPGTSAPSASTAAVIQNVTGQNIIKQVAITGQLGVKPQTGNSIPLTATNFRIQGKDVLRLPPSSITTDAKGQTVLRITPDMM

SEQ ID NO: 65938 - protein, 81 aa, Homo sapiens
  MOD_RES (1)..(1): Any amino acid
XVAAVDLLVPGVGELFGGGLREERYHFLEERLARYLDLRRFGSVPHGGFGMGFERYLQCILGVDNIKDVIPFPRFPHSCLL

SEQ ID NO: 65939 - protein, 256 aa, Homo sapiens
  MOD_RES (1)..(1): Any amino acid
XENCGISFSGDGTQRQRLKTLCKDCRAQRIAFNREQRMFKRVGCGECAACQVTEDCGACSTCLLQLPHDVASGLFCKCERRRCLRIVERSRGCGVCRGCQTQEDCGHCPICLRPPRPGLRRQWKCVQRRCLRGKHARRKGGCDSKMAARRRPGAQPLPPPPPSQSPEPTEPKRLLPSVWSESEDGAGSPPPYRRRKRPSSARRHHLGPTLKPTLATRTAQPDHTQAPTKQEAGGGFVLPPPGTDLVFLREGASSPV

SEQ ID NO: 65940 - protein, 54 aa, Homo sapiens
  MOD_RES (1)..(1): Any amino acid
XATAETQHIADQVHVGDEDFVHLRVFQSLPHENKPLTLSNYQTNKAKHDELTYF

SEQ ID NO: 65941 - protein, 83 aa, Homo sapiens
  MOD_RES (1)..(1): Any amino acid
XKLFLIDFGLAKKYRDNRTRQHIPYREDKNLTGTARYASINAHLGIEQRLQQRNKNMKRLVKRRCPRLLKFYVRGFLQNLRCT

SEQ ID NO: 65942 - protein, 245 aa, Homo sapiens
TGNFFYNYMMGIEFNPRIGKWFDFKLFFNGRPGIVAWTLINLSFAAKQRELHSHVTNAMVLVNVLQAIYVIDFFWNETWYLKTIDICHDHFGWYLGWGDCVWLPYLYTLQKRTRRQGVCQRQSWGLTPGRWAPEPTLLSSPWAKHRLTPSPSPPRVCTWCTTPCSCPPRTPWASCCWAWWATTSSGWPTTRRTCSAARMGAASSGAGSPRSSSAPTHPPMGRGTTASCWCRASGAWPATSTTSAT

SEQ ID NO: 65943 - protein, 215 aa, Homo sapiens
MDKSGIDSLDHVTSDAVELANRSDNSSDSSLFKTQCIPYSPKGEKRNPIRKFVRTPESVHASDSSSDSSFEPIPLTIKAIFERFKNRKKRYKKKKKRRYQPTGRPRGRPEGRRNPIYSLIDKKKQFRSRGSGFPFLESENEKNAPWRKILTFEQAVARGFFNYIEKLKYEHHLKESLKQMNVGEDLENEDFDSRRYKFLDDDGSISPIEESTLLS

SEQ ID NO: 65944 - protein, 153 aa, Homo sapiens
MNRHLCVWLFRHPSLNGYLQCHIQLHSHQFRQIHLDTRLQVFRQNRNCILHLLSKNWSRRYCHQDTKMLWKHKALQKYMENLSKEYQTLEQCLQHIPVNEENRRSLNRRHAELAPLAAIYQEIQETEQAIEELESMCKRDRVLLCGPGWNAVV

SEQ ID NO: 65945 - protein, 56 aa, Homo sapiens
MARDLVMFRDVAVDFSQEEWECLNSYQRNLYRDVILENYSNLVSLAGCSISKPDVI

SEQ ID NO: 65946 - protein, 515 aa, Homo sapiens
MQSNKTFNLEKQNHTPRKHHQHHHQQQHHQQQQQQPPPPPIPANGQQASSQNEGLTIDLKNFRKPGEKTFTQRSRLFVGNLPPDITEEEMRKLFEKYGKAGEVFIHKDKGFGFIRLETRTLAEIAKVELDNMPLRGKQLRVRFACHSASLTVRNLPQYVSNELLEEAFSVFGQVERAVVIVDDRGRPSGKGIVEFSGKPAARKALDRCSEGSFLLTTFPRPVTVEPMDQLDDEEGLPEKLVIKNQQFHKEREQPPRFAQPGSFEYEYAMRWKALIEMEKQQQDQVDRNIKEAREKLEMEMEAARHEHQVMLMRQDLMRRQEELRRMEELHNQEVQKRKQLELRQEEERRRREEEMRRQQEEMMRRQQEGFKGTFPDAREQEIRMGQMAMGGAMGINNRGAMPPAPVPAGTPAPPGPATMMPDGTLGLAGVQWCNLGSLQPPPPRFKRFSCLSLLSSWDYRPHQQLNALVRLLQWKELGQLVELLLHSTVQLLELNLPQTNVADTNKLQCLVSQNP

SEQ ID NO: 65947 - protein, 365 aa, Homo sapiens
  MOD_RES (1)..(1): Any amino acid
XEHAGVRLPTHGRVYQKGHELVLANIAESDAGVYTCHAANLAGQRRQDVNITVATVPSWLKKPQDSQLEEGKPGYLDCLTQATPKPTVVWYRNQMLISEDSRFEVFLAKAQGLEEGVAETLVLVKSLQSKDEQQQLDFRRELEMFGKLNHANVVRLLGLCREAEPHYMVLEYVDLGDLKQFLRISKSKDEKLKSQPLSTKQKVALCTQVALGMEHLSNNRFVHKDLAARNCLVSAQRQVKVSALGLSKDVYNSEYYHFRQAWVPLRWMSPEAILEGDFSTKSDVWAFGVLMWEVFTHGEMPHGGQADDEVLADLQAGKARLPQPEGCPSKLYRLMQRCWALSPKDRPSFSEIASALGDSTVDSKP

SEQ ID NO: 65948 - protein, 737 aa, Homo sapiens
MPHKIGFVVVSSSGHEDGFSARELMIHAPTVSGWRSPRFCQFPQEIVLQMVERCRIRKLQLLAHQYMISSKIEFYISESLPEYFAPYQAERFRRLGYVSLCDNEKTGCKARELKSVYVDAVGQFLKLIFHQNHVNKYNIYNQVALVAINIIGDPADFSDESNTASREKLIDHYLGHNSEDPALEGTYARKSDYISPLDDLAFDMYQDPEVAQIIRKLDERKREAVQKERYDYAKKLKQAIADLQKVGERLGRYEVEKRCAVEKEDYDLAKEKKQQMEQYRAEVYEQLELHSLLDAELMRRPFDLPLQPLARSGSPCHQKPMPSLPQLEERGTENQFAEPFLQEKPSSYSLTISPQHSAVDPLLPATDPHPKINAESLPYDERPLPAIRKHYGEAVVEPEMSNADISDARRGGMLGEPEPLTEKALREASSAIDVLGETLVAEAYCKTWSYREDALLALSKKLMEMPVGTPKEDLKNTLRASVFLVRRAIKDIVTSVFQASLKLLKMIITQYIPKHKLSKLETAHCVERTIPVLLTRTGDSSARLRVTAANFIQEMALFKEVKSLQIIPSYLVQPLKANSSVHLAMSQMGLLARLLKDLGTGSSGFTIDNVMKFSVSALEHRVYEVRETAVRIILDMYRQHQASILEYLPPDDSNTRRNILYKTIFEGFAKIDGRATDAEMRARRKAATEEAEKQKKEEIKALQGQLAALKEIQAEVQTFKEGKQPLLKLWESRMSTI

SEQ ID NO: 65949 - protein, 62 aa, Homo sapiens
  MOD_RES (1)..(1): Any amino acid
XLHGSVMRHSLLKGISAQIVSAAVESNSYLLEWEPPVEDYISMTFSEFNPYDKVDAGLPTAI

SEQ ID NO: 65950 - protein, 294 aa, Homo sapiens
MRPEGSLTYRVPERLRQGSCGVGRAAQALVCASAKEGTAFRMEAVQEGAAGVESEQAALGEEAVLLLDDIMAEVEVVAEEEGLVERREEAQRAQQAVPGPGPMTPESALEELLAVQVELEPVNAQARKAFSRQREKMERRRKPHLDRRGAVIQSVPGFWANVIANHPQMSALITDEDEDMLSYMVSLEVEEEKHRVHLCKIMLFFRSNPYFQNKVITKEYLVNITEYRASHSTPIEWYPDYEVEAYRRRHHNSSLNFFNWFSDHNFAGSNKIAESPDRSYVRTCGAIPCNTTRG

SEQ ID NO: 65951 - protein, 407 aa, Homo sapiens
  MOD_RES (1)..(1): Any amino acid
XDGKRKTMLCLACGQSMRTEKGLKQLLPGVPFLCISGTKTQKPFLQGPFKVISVAEVDLSCDKAEKTLSYYQARLLSLRMKTCTQAASHSGMAATHQKAVKIIAYKNGDGYRNGKLIVAGTFPMLLTECTEQLGLARAASKVYTKDGTPIFTLRDLVLWALDESFLQRDSEKQKQDAAPVGKEQIIVESMEENPRMKVKNRLFAKSVTSDSLDGIDKSLLTLILRNPIAIWVSCGEPFLPPNALQKAEKLEKQNWLKKDRILADLDTMRHKMRQLKGRRVAACQPATMVPTKSPVQPVVVEGGWTEQTQQEIKLMELIRHTEAHLSEIQEMESKINFPIATKRIAVKPSNLYKQPNTKRVWIYLNGGRPEDGTYAWGKTISEVSLLYLKTWIFIWSRKVFFYFLITA

SEQ ID NO: 65952 - protein, 440 aa, Homo sapiens
MASGLNKRKMIQHAVFKELVKLVDPGVKAWTPTKGKQNVIMFVGLQGSGKTTTCSKLAYYYQRKGWKTCLICADTFRAGAFDQLKQNATKARIPFYGSYTEMDPVIIASEGVEKFKNENFEIIIVDTSGRHKQEDSLFEEMLQVANAIQPDNIVYVMDASIGQACEAQAKAFKDKVDVASVIVTKLDGHAKGGGALSAVAATKSPIIFIGTGEHIDDFEPFKTQPFISKLLGMGDIEGLIDKVNELKLDDNEALIEKLKHGQFTLRDMYEQFQNIMKMGPFSQILGMIPGFGTDFMSKGNEQESMARLKKLMTIMDSMNDQELDSTDGAKVFSKQPGRIQRVARGSGVSTRDVQELLTQYTKFAQMVKKMGGIKGLFKGGDMSKNVSQSQMAKLNQQMAKMMDPRVLHHMGGMAGLQSMMRQFQQGAAGNMKGMMGFNNM

SEQ ID NO: 65953 - protein, 554 aa, Homo sapiens
MWRVCARRAQNVAPWAGLEARWTALQEVPGTPRVTSRSGPAPARRNSVTTGYGGVRALCGWTPSSGATPRNRLLLQLLGSPGRRYYSLPPHQKVPLPSLSPTMQAGTIARWEKKEGDKINEGDLIAEVLLPALSPTMTMGTVQRWEKKVGEKLSEGDLLAEIETDKATIGFEVQEEGYLAKILVPEGTRDVPLGTPLCIIVEKEADISAFADYRPTEVTDLKPQVPPPTPPPVAAVPPTPQPLAPTPSAPCPATPAGPKGRVFVSPLAKKLAVEKGIDLTQVKGTGPDGRITKKDIDSFVPSKVAPAPAAVVPPTGPGMAPVPTGVFTDIPISNIRRVIAQRLMQSKQTIPHYYLSIDVNMGEVLLVRKELNKILEGRSKISVNDFIIKASALACLKVPEANSSWMDTVIRQNHVVDVSVAVSTPAGLITPIVFNAHIKGVETIANDVVSLATKAREGKLQPHEFQGGTFTISNLGMFGIKNFSAIINPPQACILAIGASEDKLVPADNEKGFDVASMMSVTLSCDHRVVDGAVGAQWLAEFRKYLEKPITMLL

SEQ ID NO: 65954 - protein, 650 aa, Homo sapiens
MMYHLDGNSHFRHLNVPRPYACRECGRTFRDRNSLLKHMIIHQERRQKLMEEIRELKELQDEGRSARLQCPQCVFGTNCPKTFVQHAKTHEKDKRYYCCEECNFMAVTENELECHRGIAHGAVVKCPMVTSDIAQRKTQKKTFMKDSVVGSSKKSATYICKMCPFTTSAKSVLKKHTEYLHSSSCVDSFGSPLGLDKRKNDILEEPVDSDSTKTLTKQQSTTFPKNSALKQDVKRTFGSTSQSSSFSKIHKRPHRIQKARKSIAQSGVNMCNQNSSPHKNVTIKSSVDQKPKYFHQAAKEKSNAKANSHYLYRHKYENYRMIKKSGESYPVHFKKEEASSLNSLHLFSSSSNSHNNFISDPHKPDAKRPESFKDHRRVAVKRVIKESKKESSVGGEDLDSYPDFLHKMTVVVLQKLNSAEKKDSYETEDESSWDNVELGDYTTQAIEDETYSDINQEHVNLFPLFKSKVEGQEPGENATLSYDQNDGFYFEYYEDTGSNNFLHEIHDPQHLETADASLSKHSSVFHWTDLSLEKKSCPYCPATFETGVGLSNHVRGHLHRAGLSYEARHVVSPEQIATSDKMQHFKRTGTGTPVKRVRKAIEKSETTSEHTCQLCGGWFDTKIGLSNHVRGHLKRLGKTKWDAHKSPICV

SEQ ID NO: 65955 - protein, 339 aa, Homo sapiens
MVLMAPRTLLLLLSGALALTQTWARSHSMRYFSTAVSRPGRGEPRFIAVGYVDDTQFVRFDSDAASQRMEPRAPWIEQEGPEYWDGETRKVKAHSQTHRVDLGTLRGYYNQSEAGSHTVQRMYGCDVGSDWRFLRGYHQYAYDGKDYIALKEDLRSWTAADMAAQTTKHKWEAAHVAEQLRAYLEGTCVEWLRRYLENGKETLQRTDAPKTHMTHHAVSDHEATLRCWALSFYPAEITLTWQRDGEDQTQDTELVETRPAGDGTFQKWAAVVVPSGQEQRYTCHVQHEGLPKPLTLRWEPSSQPTIPIVGIIAGLVLFGAVITGAVVAAVMWRRKSSDR

SEQ ID NO: 65956 - protein, 2372 aa, Homo sapiens
MAARAAAAAAAAAARARARAGSGERRAPPGPRPAPGARDLEAGARGAAAAAAAPGPMLGGGGDGGGGLNSVHHHPLLPRHELNMAHNAGAAAAAGTHSAKSGGSEAALKEGGSAAALSSSSSSSAAAAAASSSSSSGPGSAMETGLLPNHKLKTVGEAPAAPPHQQHHHHHHAHHHHHHAHHLHHHHALQQQLNQFQQQQQQQQQQQQQQQQQQHPISNNNSLGGAGGGAPQPGPDMEQPQHGGAKDSAAGGQADPPGPPLLSKPGDEDDAPPKMGEPAGGRYEHPGLGALGTQQPPVAVPGGGGGPAAVPEFNNYYGSAAPASGGPGGRAGPCFDQHGGQQSPGMGMMHSASAAAAGAPGSMDPLQNSHEGYPNSQCNHYPGYSRPGAGGGGGGGGGGGGGSGGGGGGGGAGAGGAGAGAVAAAAAAAAAAAGGGGGGGYGGSSAGYGVLSSPRQQGGGMMMGPGGGGAASLSKAAAGSAAGGFQRFAGQNQHPSGATPTLNQLLTSPSPMMRSYGGSYPEYSSPSAPPPPPSQPQSQAAAAGAAAGGQQAAAGMGLGKDMGAQYAAASPAWAAAQQRSHPAMSPGTPGPTMGRSQGSPMDPMVMKRPQLYGMGSNPHSQPQQSSPYPGGSYGPPGPQRYPIGIQGRTPGAMAGMQYPQQQMPPQYGQQGVSGYCQQGQQPYYSQQPQPPHLPPQAQYLPSQSQQRYQPQQDMSQEGYGTRSQPPLAPGKPNHEDLNLIQQERPSSLPDLSGSIDDLPTGTEATLSSAVSASGSTSSQGDQSNPAQSPFSPHASPHLSSIPGGPSPSPVGSPVGSNQSRSGPISPASIPGSQMPPQPPGSQSESSSHPALSQSPMPQERGFMAGTQRNPQMAQYGPQQTGPSMSPHPSPGGQMHAGISSFQQSNSSGTYGPQMSQYGPQGNYSRPPAYSGVPSASYSGPGPGMGISANNQMHGQGPSQPCGAVPLGRMPSAGMQNRPFPGNMSSMTPSSPGMSQQGGPGMGPPMPTVNRKAQEAAAAVMQAAANSAQSRQGSFPGMNQSGLMASSSPYSQPMNNSSSLMNTQAPPYSMAPAMVNSSAASVGLADMMSPGESKLPLPLKADGKEEGTPQPESKSKDSYSSQGISQPPTPGNLPVPSPMSPSSASISSFHGDESDSISSPGWPKTPSSPKSSSSTTTGEKITKVYELGNEPERKLWVDRYLTFMEERGSPVSSLPAVGKKPLDLFRLYVCVKEIGGLAQVNKNKKWRELATNLNVGTSSSAASSLKKQYIQYLFAFECKIERGEEPPPEVFSTGDTKKQPKLQPPSPANSGSLQGPQTPQSTGSNSMAEVPGDLKPPTPASTPHGQMTPMQGGRSSTISVHDPFSDVSDSSFPKRNSMTPNAPYQQGMSMPDVMGRMPYEPNKDPFGGMRKVPGSSEPFMTQGQMPNSSMQDMYNQSPSGAMSNLGMGQRQQFPYGASYDRRHEPYGQQYPGQGPPSGQPPYGGHQPGLYPQQPNYKRHMDGMYGPPAKRHEGDMYNMQYSSQQQEMYNQYGGSYSGPDRRPIQGQYPYPYSRERMQGPGQIQTHGIPPQMMGGPLQSSSSEGPQQNMWAARNDMPYPYQNRQGPGGPTQAPPYPGMNRTDDMMVPDQRINHESQWPSHVSQRQPYMSSSASMQPITRPPQPSYQTPPSLPNHISRAPSPASFQRSLENRMSPSKSPFLPSMKMQKVMPTVPTSQVTGPPPQPPPIRREITFPPGSVEASQPVLKQRRKITSKDIVTPEAWRVMMSLKSGLLAESTWALDTINILLYDDSTVATFNLSQLSGFLELLVEYFRKCLIDIFGILMEYEVGDPSQKALDHNAARKDDSQSLADDSGKEEEDAECIDDDEEDEEDEEEDSEKTESDEKSSIALTAPDAAADPKEKPKQASKFDKLPIKIVKKNNLFVVDRSDKLGRVQEFNSGLLHWQLGGGDTTEHIQTHFESKMEIPPRRRPPPPLSSAGRKKEQEGKGDSEEQQEKSIIATIDDVLSARPGALPEDANPGPQTESSKFPFGIQQAKSHRNIKLLEDEPRSRDETPLCTIAHWQDSLAKRCICVSNIVRSLSFVPGNDAEMSKHPGLVLILGKLILLHHEHPERKRAPQTYEKEEDEDKGVACSKDEWWWDCLEVLRDNTLVTLANISGQLDLSAYTESICLPILDGLLHWMVCPSAEAQDPFPTVGPNSVLSPQRLVLETLCKLSIQDNNVDLILATPPFSRQEKFYATLVRYVGDRKNPVCREMSMALLSNLAQGDALAARAIAVQKGSIGNLISFLEDGVTMAQYQQSQHNLMHMQPPPLEPPSVDMMCRAAKALLAMARVDENRSEFLLHEGRLLDISISAVLNSLVASVICDVLFQIGQL

SEQ ID NO: 65957 - protein, 103 aa, Homo sapiens
MAAHLLPICALFLTLLDMAQGFRGPLLPNRPFTTVWNANTQWCLERHGVDVDVSVFDVVANPGQTFRGPDMTIFYSSQLGTYPYYTPTGEPVFGGLPQNASLI

SEQ ID NO: 65958 - protein, 410 aa, Homo sapiens
MTRNSSTIIAFAVGGQYVPGNGFSLIGAHTDSPCLRVKRRSRRSQVGFQQVGVETYGGGIWSTWFDRDLTLAGRVIVKCPTSGRLEQQLVHVERPILRIPHLAIHLQRNINENFGPNTEMHLVPILATAIQEELEKGTPEPGPLNAVDERHHSVLMSLLCAHLGLSPKDIVEMELCLADTQPAVLGGAYDEFIFAPRLDNLHSCFCALQALIDSCAGPGSLATEPHVRMVTLYDNEEVGSESAQGAQSLLTELVLRRISASCQHPTAFEEAIPKSFMISADMAHAVHPNYLDKHEENHRPLFHKGPVIKVNSKQRYASNAVSEALIREVANKVKVPLQDLMVRNDTPCGTTIGPILASRLGLRVLDLGSPQLAMHSIREMACTTGVLQTLTLFKGFFELFPSLSHNLLVD

SEQ ID NO: 65959 - protein, 317 aa, Homo sapiens
MSSAWKTPRGSDAMPEIMVKIIGSKHFQYLVEKPKIKENDSLKTETQTMHQKPMTDNARQMSRDTPVPINFTDQQTTDNPDDVKEKKHPENNQKSENNQKLLTGANSSRFLDGNVRAICGKHGLYLTLSLLETLLNHQDLGYQNEIKWQNFVEMLTRASSDLLSDLPTGKNEKKAPAPPMEPEVPEMSQSKTEHMKTPEEELQPESSPAETSACKDPLKPLKIRPVSQPFVNPAVKNKAEECETWIDRFRKLENALYLCDLSNTGVLEKERARRLIHNYNLIYNLSLSPQKIDQALRRFRSGENMLLEPALRYLKEL

SEQ ID NO: 65960 - protein, 187 aa, Homo sapiens
MSKGPAVGIDLGTTYSCVGVFQHGKVEIIANDQGNRTTPSYVAFTDTERLIGDAAKNQVAMNPTNTVFDAKRLIGRRFDDAVVQSDMKHWPFMVVNDAGRPKVQVEYKGETKSFYPEEVSSMVLTKMKEIAEAYLGKTVTNAVVTVPAYFNDSQRQATKDAGTIAGLNVLRIINEPTAAAIAYGLDK

SEQ ID NO: 65961 - protein, 40 aa, Homo sapiens
  MOD_RES (1)..(1): Any amino acid
XYEKLMKINLEAAELGEISDIHTKLLRVWLFNHGWWPSQR

SEQ ID NO: 65962 - protein, 217 aa, Homo sapiens
MEEGGRDKAPVQPQQSPAAAPGGTDEKPSGKERRDAGDKDKEQELSEEDKQLQDELEMLVERLGEKDTSLYRPALEELRRQIRSSTTSMTSVPKPLKFLRPHYGKLKEIYENMAPGENKRFAADIISVLAMTMSGERECLKYRLVGSQEELASWGHEYVSCVNYVPEPENSALLRCALGVFRKFSRFPEALRLALMLNDMELVEDIFTSCKDVVVQK

SEQ ID NO: 65963 - protein, 565 aa, Homo sapiens
  MOD_RES (1)..(1): Any amino acid
XGGDEKKVNLVLGDGRSLGLTIRGGAEYGLGIYITGVDPGSEAEGSGLKVGDQILEVNGRSFLNILHDEAVRLLKSSRHLILTVKDVGRLPHARTTVDETKWIASSRIRETMANSAGFLGDLTTEGINKPGFYKGPAGSQVTLSSLGNQTRVLLEEQARHLLNEQEHATMAYYLDEYRGGSVSVEALVMALFKLLNTHAKNTLDLEETGEAVQGNINALPDVSVDDVRSTSQGLSSFKPLPRPPPLAQGNDLPLGQPRKLGREDLQPPSSMPSCSGTVFSAPQNRSPPAGTAPTPGTSSAQDLPSSPIYASVSPANPSSKRPLDAHLALVNQHPIGPFPRVQSPPHLKSPSAEATVAGGCLLPPSPSGHPDQTGTNQHFVMVEVHRPDSEPDVNEVRALPQTRTASTLSQLSDSGQTLSEDSGVDAGEAEASAPGRGRQSVSTKSRSSKELPRNERPTDGANKPPGLLEPTSTLVRVKKSAATLGIAIEGGANTRQPLPRIVTIQRGGSAHNCGQLKVGHVILEVNGLTLRGKEHREAARIIAEAFKTKDRDYIDFLVTEFNVML

SEQ ID NO: 65964 - protein, 40 aa, Homo sapiens
  MOD_RES (1)..(1): Any amino acid
XRRKSNCVKEVEKLQEKREKRRLQQQELREKRAQSASQLT

SEQ ID NO: 65965 - protein, 105 aa, Homo sapiens
  MOD_RES (1)..(1): Any amino acid
XDGHWPRTVAPNSLVNSGAVGNSEPGFRGLTPPIPWEHAPRPHFPLVPASWPYGLHQNFMHQGNARFQPNKPFYTQAGLPMHSNQPILLSQGYPYLNVSYIQQKK

SEQ ID NO: 65966 - protein, 57 aa, Homo sapiens
MRVPVCLCVCITNLLLGLTVRLKLALCLYVAGDSRDMSREMQDVDLAEVKPLVEKGE

SEQ ID NO: 65967 - protein, 264 aa, Homo sapiens
MNGQLDLSGKLIIKAQLGEDIRRIPIHNEDITYDELVLMMQRVFRGKLLSNDEVTIKYKDEDGDLITIFDSSDLSFAIQCSRILKLTLFVNGQPRPLESSQVKYLRRELIELRNKVNRLLDSLEPPGEPGPSTNIPENDTVDGREEKSASDSSGKQSTQVMAASMSAFDPLKNQDEINKNVMSAFGLTDDQVSGPPSAPAEDRSGTPDSIASSSSAAHPPGVQPQQPPYTGAQTQAGQIEVKRINKILSIIKKKPKGIMLLFFI

SEQ ID NO: 65968 - protein, 115 aa, Homo sapiens
MKKRKELNALIGLAGDSRRKKPKKGPSSHRLLRTEPPDSDSESSSEEEEEFGVVGNRSRFAKGDYLRCCKICYPLCGFVILAACVVACVGLVWMQVALKEDLDALKEKFRTSNGI

SEQ ID NO: 65969 - protein, 34 aa, Homo sapiens; identical to SEQ ID NO: 22425

SEQ ID NO: 65970 - protein, 261 aa, Homo sapiens
  MOD_RES (1)..(1): Any amino acid
XRVMAPRTLILLLSGALALTETWAGSHSMRYFYTAVSRPGRGEPHFIAVGYVDDTQFVRFDSDAASPRGEPRAPWVEQEGPEYWDRETQKYKRQAQTDRVSLRNLRGYYNQSEAGSHIIQRMYGCDVGPDGRLLRGYDQYAYDGKDYIALNEDLRSWTAADTAAQITQRKWEAAREAEQLRAYLEGLCVEWLRRYLKNGKETLQRAEHPKTHVTHHPVSDHEASRRWNLPEVGSCGGAFWRRAEIHVPCAARGAAGAPHPE

SEQ ID NO: 65971 - protein, 44 aa, Homo sapiens
RQKSTYTSYPKAEPMPSASSAPPASSLYSSPNSSAPLAEDIDPE

SEQ ID NO: 65972 - protein, 52 aa, Homo sapiens
VLTEPVSKWRNVRGHNPLMESQSVPRLECSGAISAHCNLCLPGSSDSPASLS

SEQ ID NO: 65973 - protein, 24 aa, Homo sapiens
MAYQIVLELHFSHCAAMGAALLML

SEQ ID NO: 65974 - protein, 115 aa, Homo sapiens
IAQEFSDDLHHIASLIGKVVDFEGSLAENRFTVLPNIDPEIDEKKRRLMGLPSFLTEVARKELENLDSRIPSCSVIYIPLIGFLLSIPRLPSMVEASDFEINGLDFMVRPSTSVR

SEQ ID NO: 65975 - protein, 121 aa, Homo sapiens
MEGIYTHTHPSPSPQLWNKHSKSSILVGEMGRSKEDGLWTRNSPGSSQHPESPRLPNPLWDRGKIGKVEGHQHIQDFSQKSHLPSIVVESSEVNEESGDLHLPHEELLLLTDGEEEDAEAF

SEQ ID NO: 65976 - protein, 154 aa, Homo sapiens
MAVKWTGGHSSPVLCLNASKEGLLASGAEGGDLTAWGEDGTPLGHTRFQGADDVTSVLFSPSCPTKLYASHGETISVLDVRSLKDSLDHFHVNEEEINCLSLNQTENLLASADDSGAIKILDLENKKVIRSLKRHSNICSSVAFRPQRPQSLVS

SEQ ID NO: 65977 - protein, 40 aa, Homo sapiens
MLSSYPACLFSGICVALLAVALAYYFYWTAVLSEGPCTRS

SEQ ID NO: 65978 - protein, 125 aa, Homo sapiens
MNAFFNNTISSAVKQSILAKLQEAVEANLGTAMTYTLFEYAKDNKEQFMENHNPINSATSISNIISIETPNTAPSSKKKDKKEQLSKAQKRKLADKTDHKGELPRGWNWVDVVKHLSKTGSKDDE

SEQ ID NO: 65979 - protein, 48 aa, Homo sapiens
DPSMEEHLSVMYERLRQELPKLFLQSHDYSLYSLDVEFINEILNIRTK

SEQ ID NO: 65980 - protein, 59 aa, Homo sapiens
VSEGHLKRNIVVKTVEMRDGEGTKQLRTSTSGVWSLALVRSFLGTALEPQDTTSGTALR

SEQ ID NO: 65981 - protein, 150 aa, Homo sapiens
MAIVEAASCGLQVVSTRVGGIPEVLPENLIILCEPSVKSLCEGLEKAIFQLKSGTLPAPENIHNIVKTFYTWRNVAERTEKVYDRVSVEAVLPMDKRLDRLISHCGPVTGYIFALLAVFNFLFLIFLRWMTPDSIIDVAIDATGPRGAWT

SEQ ID NO: 65982 - protein, 1349 aa, Homo sapiens
MPRRKQEQPKRLPSHVSRQEEAEGELSEGEHWYGNSSETPSEASYGEVQENYKLSLEDRIQEQSTSPDTSLGSTTPSSHTLELVALDSEVLRDSLQCQDHLSPGVSSLCDDDPGSNKPLSSNLRRLLEAGSLKLDAAATANGRVESPVNVGSNLSFSPPSHHAQQLSVLARKLAEKQEQNDQYTPSNRFIWNQGKWLPNSTTTCSLSPDSAILKLKAAANAVLQDKSLTRTEETMRFESFSSPFSSQSASSTLAALSKKVSERSLTPGQEHPPPASSFLSLASMTSSAALLKEVAARAAGSLLAEKSSLLPEDPLPPPPSEKKPEKVTPPPPPPPPPPPPPPPQSLELLLLPVPKGRVSKPSNSASEEESGKPFQCPICGLVIKRKSYWKRHMVIHTGLKSHQCPLCPFRCARKDNLKSHMKVHQHQDRGETFQCQLCPFTSSRHFSLKLHMRCHQHFLRTEAKVKEEIPDPDVKGSPHLSDSACLGQQREGGGTELVGTMMTSNTPERTSQGGAGVSPLLVKEEPKEDNGLPTSFTLNAADRPANHTKLKDPSEYVANSASALFSQDISVKMASDFLMKLSAANQKEPMNLNFKVKEEPKEGESLSTTLPRSSYVFSPESEVSAPGVSEDALKPQEGKGSVLRRDVSVKAASELLMKLSAESYKETQMVKIKEEPMEVDIQDSHVSISPSRNVGYSTLIGREKTEPLQKMPEGRVPPERNLFSQDISVKMASELLFQLSEKVSKEHNHTKENTIRTTTSPFFSEDTFRQSPFTSNSKELLPSDSVLHGRISAPETEKIVLEAGNGLPSWKFNDQLFPCDVCGKVFGRQQTLSRHLSLHTEERKYKCHLCPYAAKCRANLNQHLTVHSVKLVSTDTEDIVSAVTSEGSDGKKHPYYYSCHVCGFETELNVQFVSHMSLHVDKEQWMFSICCTACDFVTMEEAEIKTHIGTKHTGEDRKTPSESNSPSSSSLSALSDSANSKDDSDGSQKNKGGNNLLVISVMPGSQPSLNSEEKPEKGFECVFCNFVCKTKNMFERHLQIHLITRMFECDVCHKFMKTPEQLLEHKKCHTVPTGGLKCPFCIYSTNRPAAMECHLKTHYKMEYKCRICQTVKANQLELETHTREHRLGNHYKCDQCGYLSKTANKLIEHVRVHTGERPFHCDQCSYSCKRKDNLNLHKKLKHAPRQTFSCEECLFKTTHPFVFSRHVKKHQSGDCPEEDKKGLCPAPKEPAGPGAPLLVVGSSRNLLSPLSVMSASQALQTVALSAAHGSSSEPNLALKALAFNGSPLRFDKYRNSDFAHLIPLTMLYPKNHLDLTFHPPRPQTAPPSIPSPKHSFLAYLGLRERAETV

SEQ ID NO: 65983 - protein, 1165 aa, Homo sapiens
MRPSGTAGAALLALLAALCPASRALEEKKVCQGTSNKLTQLGTFEDHFLSLQRMFNNCEVVLGNLEITYVQRNYDLSFLKTIQEVAGYVLIALNTVERIPLENLQIIRGNMYYENSYALAVLSNYDANKTGLKELPMRNLQGQKCDPSCPNGSCWGAGEENCQKLTKIICAQQCSGRCRGKSPSDCCHNQCAAGCTGPRESDCLVCRKFRDEATCKDTCPPLMLYNPTTYQMDVNPEGKYSFGATCVKKCPRNYVVTDHGSCVRACGADSYEMEEDGVRKCKKCEGPCRKVCNGIGIGEFKDSLSINATNIKHFKNCTSISGDLHILPVAFRGDSFTHTPPLDPQELDILKTVKEITGFLLIQAWPENRTDLHAFENLEIIRGRTKQHGQFSLAVVSLNITSLGLRSLKEISDGDVIISGNKNLCYANTINWKKLFGTSGQKTKIISNRGENSCKATGQVCHALCSPEGCWGPEPRDCVSCRNVSRGRECVDKCNLLEGEPREFVENSECIQCHPECLPQAMNITCTGRGPDNCIQCAHYIDGPHCVKTCPAGVMGENNTLVWKYADAGHVCHLCHPNCTYGCTGPGLEGCPTNGPKIPSIATGMVGALLLLLVVALGIGLFMRRRHIVRKRTLRRLLQERELVEPLTPSGEAPNQALLRILKETEFKKIKVLGSGAFGTVYKGLWIPEGEKVKIPVAIKELREATSPKANKEILDEAYVMASVDNPHVCRLLGICLTSTVQLITQLMPFGCLLDYVREHKDNIGSQYLLNWCVQIAKGMNYLEDRRLVHRDLAARNVLVKTPQHVKITDFGLAKLLGAEEKEYHAEGGKVPIKWMALESILHRIYTHQSDVWSYGVTVWELMTFGSKPYDGIPASEISSILEKGERLPQPPICTIDVYMIMVKCWMIDADSRPKFRELIIEFSKMARDPQRYLVIQGDERMHLPSPTDSNFYRALMDEEDMDDVVDADEYLIPQQGFFSSPSTSRTPLLSSLSATSNNSTVACIDRNGLQSCPIKEDSFLQRYSSDPTGALTEDSIDDTFLPVPEYINQSVPKRPAGSVQNPVYHNQPLNPAPSRDPHYQDPHSTAVGNPEYLNTVQPTCVNSTFDSPAHWAQKGSHQISLDNPDYQQDFFPKEAKPNGIFKGSTAENAEYLRVAPQSSEFIGA

SEQ ID NO: 65984 - protein, 220 aa, Homo sapiens
  MOD_RES (1)..(1): Any amino acid
XPGFPVNKDVTLTSPLLVNLLQSDISAGHFGVNNKQNNTNANKPKKKKPPRKKKNSQQDLNTPDTRPAGLEEADQPPLPGEQGINLDNSGPKLPEFSNRPPAPSQNLVSKETSTTALQASVARPELEVNAAIVSGQSSEPKEIVEKSKIPGRRNSRTEEPTVASESVENGHRKRSSRPASASSSTKAGAPMKDQMLCVERATRGGPKRDLYKLRVESGPL

SEQ ID NO: 65985 - protein, 194 aa, Homo sapiens
MTEDSQRNFRSVYYEKVGFRGVEEKKSLEILLKDDRLGILPPHHESHAKVMMYRKEQYLDVLHALKVVRFVSDATPQAEVYLRMYQLESGKLPRSPSFPLEPDDEVFLAIAKAMEEMVEDSVDCYWITRRFVNQLNTKYRDSLPQLPKAFEQYLNLEDGRLLTHLRMCSAAPKLPYDLWFKRCFAGCLPESSLQ

SEQ ID NO: 65986 - protein, 273 aa, Homo sapiens
MLELQYHNEDLEKDKTSQNCLGRGMEQVAKKLGVAHEEIQRLTDELQVKEKEQCKLDSALKKAQLEIDKLKENLVKLKENDAADLQKAKEQNQRLDEEILALRNRVRSLDSEKKVLGEMVERLKGEVCESQENKQLGNHSPGKTVGGEQREQHPSSGEKLKYNQQGEVQQLHQNLHRLQILCNSAENELRYERGQNLDLKQHNSLLQEENIKVTLVGKCFMEGFQLALGINESKFLYLIIHDRIHKYVDNVSYLVTSSFNFSLLSKNVCIINL

SEQ ID NO: 65987 - protein, 69 aa, Homo sapiens
MDPNCSCTTGVSCACTGSCTCKECKCTSCKKSECGAISRNLGLWLRLGGNPRLALSASFWGTGLSLPSL

SEQ ID NO: 65988 - protein, 50 aa, Homo sapiens
  MOD_RES (1)..(1): Any amino acid
XICRAETRKTFLRENFEHIQHIVIDEAQNFRTEDGDWYGKAKSITRRAKE

SEQ ID NO: 65989 - protein, 79 aa, Homo sapiens
MASQNRDPAATSVAAARKGAEPSGGAARGPVGKRLQQELMTLMMSGDKGISAFPESDNLFKWVGTIHGAAGTNPTLIVP

SEQ ID NO: 65990 - protein, 146 aa, Homo sapiens
MSVNVNRSVSDQFYRYKMPRLIAKVEGKGNGIKTVIVNMVDVAKALNRPPTYPTKYFGCELGAQTQFDVKNDRYIVNGSHEANKLQDMLDGFIKKFVLCPECENPETDLHVNPKKQTIGNSCKACGYRGMLDTHHKLCTFILKNPP

SEQ ID NO: 65991 - protein, 127 aa, Homo sapiens
MAALGPSSQNVTEYVVRVPKNTTKKYNIMAFNAADKVNFATWNQARLERDLSNKKIYQEEEMPESGAGSEFNRKLREEARRKKYGIVLKEFRPEDQPWLLRVNGKSGRKFKGIKKGGVTENTSYYIF

SEQ ID NO: 65992 - protein, 139 aa, Homo sapiens
MKLVSVALMYLGSLAFLGADTARLDVASEFRKKWNKWALSRGKRELRMSSSYPTGLADVKAGPAQTLIRPQDMKGASRSPEDSCLSSPSPRPQQSGCRPHPSQALPPEHEQLPGPPELWLPLRDVHGAEAGTPDLPVHR

SEQ ID NO: 65993 - protein, 99 aa, Homo sapiens
MWYGVFLWALVSSLFFHVPAGLLALFTLRHHKYGRFMSVSILLMGIVGPITAGILTSAAIAGVYRAAGKEMIPFEALTLGTGQTFCVLVVSFLRILATL

SEQ ID NO: 65994 - protein, 332 aa, Homo sapiens
  MOD_RES (1)..(1): Any amino acid
XAKICLEIMQRTGAHLELSLAKDQGLSIMVSGKLDAVMKARKDIVARLQTQASATVAIPKEHHRFVIGKNGEKLQDLELKTATKIQIPRPDDPSNQIKITGTKEGIEKARHEVLLISAEQDKRAVERLEVEKAFHPFIAGPYNRLVGEIMQETGTRINIPPPSVNRTEIVFTGEKEQLAQAVARIKKIYEEKGNSLQEILERTGVSVEIPPSDSISETVILRGEPEKLGQALTEVYAKANSFTVSSVAAPSWLHRFIIGKKGQNLAKITQQMPKVHIEFTEGEDKITLEGPTEDVNVAQEQIEGMVKDLINRMDYVEINIDHKFHRHLIGKS

SEQ ID NO: 65995 - protein, 690 aa, Homo sapiens
MGWGSRCCCPGRLDLLCVLALLGGCLLPVCRTRVYTNHWAVKIAGGFPEANRIASKYGFINIGQIGALKDYYHFYHSRTIKRSVISSRGTHSFISMEPKVEWIQQQVVKKRTKRDYDFSRAQSTYFNDPKWPSMWYMHCSDNTHPCQSDMNIEGAWKRGYTGKNIVVTILDDGIERTHPDLMQNYDALASCDVNGNDLDPMPRYDASNENKHGTRCAGEVAAAANNSHCTVGIAFNAKIGGVRMLDGDVTDMVEAKSVSFNPQHVHIYSASWGPDDDGKTVDGPAPLTRQAFENGVRMGRRGLGSVFVWASGNGGRSKDHCSCDGYTNSIYTISISSTAESGKKPWYLEECSSTLATTYSSGESYDKKIITTDLRQRCTDNHTGTSASAPMAAGIIALALEANPFLTWRDVQHVIVRTSRAGHLNANDWKTNAAGFKVSHLYGFGLMDAEAMVMEAEKWTTVPRQHVCVESTDRQIKTIRPNSAVRSIYKASGCSDNPNRHVNYLEHVVVRITITHPRRGDLAIYLTSPSGTRSQLLANRLFDHSMEGFKNWEFMTIHCWGERAAGDWVLEVYDTPSQLRNFKTPGKLKEWSLVLYGTSVQPYSPTNEFPKVERFRYSRVEDPTDDYGTEDYAGELASSGTQAKKRQLMHHPTTWENRMEWNGMKWNGMKWNGMEWNGMEWNRIESNRIE

SEQ ID NO: 65996 - protein, 296 aa, Homo sapiens
MSAWAAASLSRAAARCLLARGPGVRAAPPRDPRPSHPEPRGCGAAPGRTLHFTAAVPAGHNKWSKVRHIKGPKDVERSRIFSKLCLNIRLAVKGGPNPEHNSNLANILEVCRSKHMPKSTIETALKMEKSKDTYLLYEGRGPGGSSLLIEALSNSSHKCQADIRHILNKNGGVMAVGARHSFDKKGVIVVEVEDREKKAVNLERALEMAIEAGAEDVKETEDEEERNVFKFICDASSLHQVRKKLDSLGLCSVSCALEFIPNSKVQLAEPDLEQAAHLIQALSNHEDVIHVYDNIE

SEQ ID NO: 65997 - protein, 162 aa, Homo sapiens
QMIRHPNITQLLDILETENSYYLVMELCPGGNLMHKIYEKKRLEESEARRYIRQLISAVEHLHRAGVVHRDLKIENLLLDEDNNIKLIDFGLSNCAGILGYSDPFSTQCGSPAYAAPELLARKKYGPKIDVWSMCHQFPALSPGTGSCEEAKYSAGTGESLA

SEQ ID NO: 65998 - protein, 243 aa, Homo sapiens
  MOD_RES (1)..(1): Any amino acid
XPKVQTRDISPKGYDDAKRYCKDPSPSSSSTSSYAPSSSSNLSCGGGSSASSTCSKSSFDYTHDMEAAHMAATAILNLSTRCREMPQNLSTKPQDLCATRNPDMEVDENGTLDLSMNKQRPRDSCCPILTPLEPMSPQQQAVMNNRCFQLGEGDCWDLPVDYTKMKPRRIDEDESKDITPEDLDPFQEALEERRYPGEVTIPSPKPKYPQCKESKKDLITLSGCPLADKSIRSMLATSSQELK

SEQ ID NO: 65999 - protein, 61 aa, Homo sapiens
MWVEETVARFQSPNIRMCFITYSTDGQTVLPLTSDKNRIKNGLDQLQKIVPDGHTFMQAGF

SEQ ID NO: 66000 - protein, 143 aa, Homo sapiens
  MOD_RES (1)..(1): Any amino acid
XGERLCNLEEGSPGSGTYTRHGYIFSSLAGCLMKSSENGALPVVSVVRETESQLLPDVGAIVTCKVSSINSRFAKVHILYVGSMPLKNSFRGTIRKEDVRATEKDKVVGIQMVPISWCEMQCPKTHTKEFRKVARVQPEFLQT

SEQ ID NO: 66001 - protein, 36 aa, Homo sapiens
  MOD_RES (1)..(1): Any amino acid
XAEDCGGAHWLDRPEVDDGTSEEENESDSSSCSSPD

SEQ ID NO: 66002 - protein, 586 aa, Homo sapiens
MVHSSMGAPEIRMSKPLEAEKQGLDSPSEHTDTERNGPDTNHQNPQNKTSPFSVSPTGPSTKIKAEDPSGDSAPAAPLPPQPAQPHLPQAQLMLTGSQLAGDIQQLLQLQQLVLVPGHHLQPPAQFLLPQAQQSQPGLLPTPNLFQLPQQTQGALLTSQPRAGLPTQPPKCLEPPSHPEEPSDLEELEQFARTFKQRRIKLGFTQGDVGLAMGKLYGNDFSQTTISRFEALNLSFKNMCKLKPLLEKWLNDAETMSVDSSLPSPNQLSSPSLGFDGLPGRRRKKRTSIETNVRFALEKSFLANQKPTSEEILLIAEQLHMEKEVIRVWFCNRRQKEKRINPCSAAPMLPSPGKPASYSPHMVTPQGGAGTLPLSQASSSLSTTVTTLSSAVGTLHPSRTAGGGGGGGGAAPPLNSIPSVTPPPPATTNSTNPSPQGSHSAIGLSGLNPSTGSTMVGLSSGLSPALMSNNPLATIQALASGGTLPLTSLDGSGNLVLGAAGAAPGSPGLVTSPLFLNHAGLPLLSTPPGVGLVSAAAAAVAASISSKSPGLSSSSSSSSSSSSSTCSETAAQTPGGPGGPEAGSKPE

SEQ ID NO: 66003 - protein, 546 aa, Homo sapiens
MLSRLRVVSTTCTLACRHLHIKEKGKPLMLNPRTNKGMAFTLQERQMLGLQGLLPPKIETQDIQALRFHRNLKKMTSPLEKYIYIMGIQERNEKLFYRILQDDIESLMPIVYTPTVGLACSQYGHIFRRPKGLFISISDRGHVRSIVDNWPENHVKAVVVTDGERILGLGDLGVYGMGIPVGKLCLYTACAGIRPDRCLPVCIDVGTDNIALLKDPFYMGLYQKRDRTQQYDDLIDEFMKAITDRYGRNTLIQFEDFGNHNAFRFLRKYREKYCTFNDDIQGTAAVALAGLLAAQKVISKPISEHKILFLGAGEGRKAKIDSYQEPFTHSAPESIPDTFEDAVNILKPSTIIGVAGAGRLFTPDVIRAMASINERPVIFALSNPTAQAECTAEEAYTLTEGRCLFASGSPFGPVKLTDGRVFTPGQGNNVYIFPGVALAVILCNTRHISDSVFLEAAKALTSQLTDEELAQGRLYPPLANIQEVSINIAIKVTEYLYANKMAFRYPEPEDKAKYVKERTWRSEYDSLLPDVYEWPESASSPPVITE

SEQ ID NO: 66004 - protein, 136 aa, Homo sapiens
MATGRGRILQQHWLGLQTLRGPSRGGGAARGRARAFGCRMPSEILLKIFSYLDAVSLLCTGCVSRRFYHLANDNFIWIGIYSTAFSPARSNWKFNSVEKIAMSMSFLSVQDKEAGYWKKEYITKQIASVKAALADI

SEQ ID NO: 66005 - protein, 205 aa, Homo sapiens
MAEKFDCHYCRDPLQGKKYVQKDGHHCCLKCFDKFCANTCVECRKPIGADSKEVHYKNRFWHDTCFRCAKCLHPLANETFVAKDNKILCNKCTTREDSPKCKGCFKAIVAGDQNVEYKGTVWHKDCFTCSNCKQVIGTGSFFPKGEDFYCVTCHETKFAKHCVKCNKAITSGGITYQDQPWHADCFVCVTCSKKLAGQRFTAVED

SEQ ID NO: 66006 - protein, 114 aa, Homo sapiens
MEMKKKINLELRNRSPEELELSDNIISGGLEVLAEKCPNLTYLNLSGNKIKDLSTVEALQNLKNLKSLDLFNCEITNLEDYRESIFELLQQITYLDGFDQEDNEAPDSEEEDDE

SEQ ID NO: 66007 - protein, 204 aa, Homo sapiens
MGRKSLYLLIVGILIAYYIYTPLPDNVEEPWRMMWINAHLKTIQNLATFVELLGLHHFMDSFKVVGSFDEVPPTSDENVTVTETKFNNILVRVYVPKRKSEALRRGLFYIHGGGWCVGSAALSGYDLLSRWTADRLDAVVVSTNYRLAPKYHFPIQFEDVYNALRWFLRKKVLAKYGVNPERIGISGDSAGGNLAAAVTQQVCS

SEQ ID NO: 66008 - protein, 1115 aa, Homo sapiens
MSTRAPMPAAHSREDPPAVTAERESLLAAANRPAEQPPPPECEGKEAAREERAAAATSAGARGEPSPALVLGRSVPQAAVPVRPLALHLAHKARGPGGPFGGEPPPPPPPPSPLPPLLRDPPAEDAREEVAAGPAEKRQPPLLPPKGNPWTKKPPQHLSPDTTGPPPPPLETLEAEFGSLKIIKAGKLKTKKSNKASDFSDMENWPTPSELVNTGFQSVLSQGNKKPQNRKEKEEKVEKRSNSDSKENRETKLNGPGENVSEDEAQSSNQRKRANKHKWVPLHLDVVRSESQERPGSRNSSRCQPEANKPTHNNRRNDTRSWKRDREKRDDQDDVSSVRSEGGNIRGSFRGRGRGRGRGRGRGRGNPRLNFDYSYGYQEHGERTDQPFQTELNTSMMYYYDDGTGVQVYPVEEALLKEYIKRQIEYYFSVENLERDFFLRGKMDEQGFLPISLIAGFQRVQALTTNLNLILEALKDSTEVEIVDEKMRKKIEPEKWPIPGPPPRSVPPTDFSQLIDCPEFVPGQAFCSHTESAPNSPRIGSPLSPKKNSETSILQAMSRGLSTSLPDLDSEPWIEVKKRHQPAPVKLRESVSVPEGSLNQLCSSEEPEQEELDFLFDEEIEQIGRKNTFTDWSDNDSDYEIDDQDLNKILIVTQTPPYVKKHPGGDRTGTHMSRAKITSELAKVINDGLYYYEQDLWMEEDENKHTAIKQEVENFKKLNLISKEQFENLTPELPFEPNQEVPVAPSQSRQGGVQGVLHIPKKDLTDELAQKLFDVSEITSAAMVHSLPTAVPESPRIHPTRTPKTPRTPRLQDPNKTPRFYPVVKEPKAIDVKSPRKRKTRHSTNPPLECHVGWVMDSRDRGPGTSSVSTSNASPSEGAPLAGSYGCTPHSFPKFQHPSHELLKENGFTQQVYHKYRRRCLSERKRLGIGQSQEMNTLFRFWSFFLRDHFNKKMYEEFRQLAWEDAKENYRYGLECLFRFYSYGLEKKFRREIFQDFQEETKKDYESGQLYGLEKFWAYLKYSQSKTQSIDPKLQEYLCSFKRLEDFRVDPPISDEFGRKRHSSTSGEESNRHRLPPNSSTKPPNAAKPTSTSELQVPINSPRRNISPESSDNSH

SEQ ID NO: 66009 - protein, 113 aa, Homo sapiens
METLSSEESCDSFDSLESGKQDVRFHSKYFTEELRRIFIEDTDSETEDFAGFTQSDLNGKTNPEVMVVESDLSDDGKASLVSEEEEDEEEDKATPRRSRSRRSSIGLRVAFQF

SEQ ID NO: 66010 - protein, 289 aa, Homo sapiens
MAAAAAATAAAAASIRERQTVALKRMLNFNVPHIKNSTGEPVWKVLIYDRFGQDIISPLLSVKELRDMGITLHLLLHSDRDPIPDVPAVYFVMPTEENIDRMCQDLRNQLYESYYLNFISAISRSKLEDIANAALAASAVTQVAKVFDQYLNFITLEDDMFVLCNQNKELVSYRAINRPDITDTEMETVMDTIVDSLFCFFVTLGAVPIIRCSRGTAAEMVAVKLDKKLRENLRDARNSLFTGDTLGAGQFSFQRPLLVLVDRNIDLATPLHHTWTYQALVHDVLERWI

SEQ ID NO: 66011 - protein, 64 aa, Homo sapiens
  MOD_RES (1)..(1): Any amino acid
XATLQQLEPVTGQVSVLVMCHTRELAFQISKEYERFSKYMPNVKVAVFFGGLSIKKDEEVLKKN

SEQ ID NO: 66012 - protein, 95 aa, Homo sapiens
MEAADASRSNGSSPEARDARSPSGPSGSLENGTKADGKDAKTTNGHGGEAAEGKSLGSALKPGEGRSALFAGNEWRRPIIQFVESGDDKNSNYFS

SEQ ID NO: 66013 - protein, 61 aa, Homo sapiens
MSLRGAGPHCVLMCFFWECSAHAVRMQITGGAGFVGSHLTDKLMMDGHEVTVVDNFFTGRK

SEQ ID NO: 66014 - protein, 162 aa, Homo sapiens
  MOD_RES (1)..(1): Any amino acid
XRETFSNFTASTEAQVKGLSTQGGNVGRKMKSLESQLEKQQKDLSEDHSSLLLHVKQFVSDLRSLSCQMAALQGNGSERTCCPVNWVEHERSCYWFSRSGKAWADADNYCRLEDAHLVVVTSWEEQKFVQHHIGPVNTWMGLHDQNGPWKWVDGTDYETGFK

SEQ ID NO: 66015 - protein, 382 aa, Homo sapiens
MDSGAGGRRCPEAALLILGPPRMEHLRHSPGPGGQRLLLPSMLLALLLLLAPSPGHATRVVYKVPEEQPPNTLIGSLAADYGFPDVGHLYKLEVGAPYLRVDGKTGDIFTTETSIDREGLRECQNQLPGDPCILEFEVSITDLVQNGSPRLLEGQIEVQDINDNTPNFASPVITLAIPENTNIGSLFPIPLASDRDAGPNGVASYELQAGPEAQELFGLQVAEDQEEKQPQLIVMGNLDRERWDSYDLTIKVQDGGSPPRASSALLRVTVLDTNDNAPKFERPSYEAELSENSPIGHSVIQLPHRRVTFSATSQAQELQDPSQHSYYDSGLEESETPSSKSSSGPRLGPLALPEDHYERTTPDGSIGEMEHPENEPAGRSRP

SEQ ID NO: 66016 - protein, 326 aa, Homo sapiens
MGDMGDPPKKKRLISLCVGCGNQIHDQYILRVSPDLEWHAACLKCAECNQYLDESCTCFVRDGKTYCKRDYIRLYGIKCAKCSIGFSKNDFVMRARSKVYHIECFRCVACSRQLIPGDEFALREDGLFCRADHDVVERASLGAGDPLSPLHPARPLQMAAEPISARQPALRPHVHKQPEKTTRVRTVLNEKQLHTLRTCYAANPRPDALMKEQLVEMTGLSPRVIRVWFQNKRCKDKKRSIMMKQLQQQQPNDKTANPVEVQSYQPPWKVLSDFALQSDIDQPAFQQLVNFSEGGPGSNSTGSEVASMSSQLPDTPNSMVASPIEA

SEQ ID NO: 66017 - protein, 106 aa, Homo sapiens
MSVDMNSQGSDSNEEDYDPNCEEEEEEEEDDPGDIEDYYVGVASDVEQQGADAFDPEEYQFTCLTYKESEGALNEHMTSLASVLKAVDAHCHQLHPPYGTGISFSC

SEQ ID NO: 66018 - protein, 1204 aa, Homo sapiens
MLTKFETKSARVKGLSFHPKRPWILTSLHNGVIQLWDYRMCTLIDKFDEHDGPVRGIDFHKQQPLFVSGGDDYKIKVWNYKLRRCLFTLLGHLDYIRTTFFHHEYPWILSASDDQTIRVWNWQSRTCVCVLTGHNHYVMCAQFHPTEDLVVSASLDQTVRVWDISGLRKKNLSPGAVESDVRGITGVDLFGTTDAVVKHVLEGHDRGVNWAAFHPTMPLIVSGADDRQVKIWRMNESKAWEVDTCRGHYNNVSCAVFHPRQELILSNSEDKSIRVWDMSKRTGVQTFRRDHDRFWVLAAHPNLNLFAAGHDGGMIVFKLERERPAYAVHGNMLHYVKDRFLRQLDFNSSKDVAVMQLRSGSKFPVFNMSYNPAENAVLLCTRASNLENSTYDLYTIPKDADSQNPDAPEGKRSSGLTAVWVARNRFAVLDRMHSLLIKNLKNEITKKVQVPNCDEIFYAGTGNLLLRDADSITLFDVQQKRTLASVKISKVKYVIWSADMSHVALLAKHAIVICNRKLDALCNIHENIRVKSGAWDESGVFIYTTSNHIKYAVTTGDHGIIRTLDLPIYVTRVKGNNVYCLDRECRPRVLTIDPTEFKFKLALINRKYDEKKGYPEVALHFVKDEKTRFSLALECGNIEIALEAAKALDDKNCWEKLGEVALLQGNHQIVEMCYQRTKNFDKLSFLYLITGNLEKLRKMMKIAEIRKDMSGHYQNALYLGDVSERVRILKNCGQKSLAYLTAATHGLDEEAESLKETFDPEKETIPDIDPNAKLLQPPAPIMPLDTNWPLLTVSKGFFEGTIASKGKGGALAADIDIDTVGTEGWGEDAELQLDEDGFVEATEGLGDDALGKGQEEGGGWDVEEDLELPPELDISPGAAGGAEDGFFVPPTKGTSPTQIWCNNSQLPVDHILAGSFETAMRLLHDQVGVIQFGPYKQLFLQTYARGRTTYQALPCLPSMYGYPNRNWKDAGLKNGVPAVGLKLNDLIQRLQLCYQLTTVGKFEEAVEKFRSILLSVPLLVVDNKQEIAEAQQLITICREYIVGLSVETERKKLPKETLEQQKRICEMAAYFTHSNLQPVHMILVLRTALNLFFKLKNFKTAATFARRLLELGPKPEVAQQTRKILSACEKNPTDAYQLNYDMHNPFDICAASYRPIYRGKPVEKCPLSGACYSPEFKGQICRVTTVTEIGKDVIGLRISPLQFR

SEQ ID NO: 66019 - protein, 175 aa, Homo sapiens
MSHRSDTLPVPSGQRRGRVPRDHSIYTQLLEITLHLQQAMTEHFVQLTSRQGLSLEERRHTEAICEHEALLSRLICRMINLLQSGAASGLELQVPLPSEDSRGDVRYGQRAQLSGQPDPVPQLSDCEAAFVNRDLSIRGIDISVFYQSSFQDYNAYQKDKYHKDKNTLGGARGLT

SEQ ID NO: 66020 - protein, 425 aa, Homo sapiens
MGFCYVAGAGLKLLGSSRLVSQSARITETQPPVTNLSVSVENLCTVIWTWNPPEGASSNCSLWYFSHFGDKQDKKIAPETRRSIEVPLNERICLQVGSQCSTNESEKPSILVEKCISPPEGDPESAVTELQCIWHNLSYMKCSWLPGRNTSPDTNYTLYYWHRSLEKIHQCENIFREGQYFGCSFDLTKVKDSSFEQHSVQIMVKDNAGKIKPSFNIVPLTSRVKPDPPHIKNLSFHNDDLYVQWENPQNFISRCLFYEVEVNNSQTETHNVFYVQEAKCENPEFERNVENTSCFMVPGVLPDTLNTVRIRVKTNKLCYEDDKLWSNWSQEMSIGKKRNSTLYITMLLIVPVIVAGAIIVLLLYLKRLKIIIFPPIPDPGKIFKEMFGDQNDDTLHWKKYDIYEKQTKEETDSVVLIENLKKASQ

SEQ ID NO: 66021 - protein, 1255 aa, Homo sapiens
MANGTADVRKLFIFTTTQNYFGLMSELWDQPLLCNCLEINNFLDDGNQMLLRVQRSDAGISFSNTIEFGDTKDKVLVFFKLRPEVITDENLHDNILVSSMLESPISSLYQAVRQVFAPMLLKDQEWSRNFDPKLQNLLSELEAGLGIVLRRSDTNLTKLKFKEDDTRGILTPSDEFQFWIEQAHRGNKQISKERANYFKELFETIAREFYNLDSLSLLEVVDLVETTQDVVDDVWRQTEHDHYPESRMLHLLDIIGGSFGRFVQKKLGTLNLWEDPYYLVKESLKAGISICEQWVIVCNHLTGQVWQRYVPHPWKNEKYFPETLDKLGKRLEEVLAIRTIHEKFLYFLPASEEKIICLTRVFEPFTGLNPVQYNPYTEPLWKAAVSQYEKIIAPAEQKIAGKLKNYISEIQDSPQQLLQAFLKYKELVKRPTISKELMLERETLLARLVDSIKDFRLDFENRCRGIPGDASGPLSGKNLSEVVNSIVWVRQLELKVDDTIKIAEALLSDLPGFRCFHQSAKDLLDQLKLYEQEQFDDWSRDIQSGLSDSRSGLCIEASSRIMELDSNDGLLKVHYSDRLVILLREVRQLSALGFVIPAKIQQVANIAQKFCKQAIILKQVAHFYNSIDQQMIQSQRPMMLQSALAFEQIIKNSKAGSGGKSQITWDNPKELEGYIQKLQNAAERLATENRKLRKWHTTFCEKVVVLMNIDLLRQQQRWKDGLQELRTGLATVEAQGFQASDMHAWKQHWNHQLYKALEHQYQMGLEALNENLPEINIDLTYNYLFTFRQGRLQFRPPFEEIRAKYYREMKRFIGIPNQFKGVGEAGDESIFSIMIDRNASGFLTIFSKAEDLFRRLSAVLHQHKEWIVIGQVDMEALVEKHLFTVHDWEKNFKALKIKGKEVERLPSAVKVDCLNINCNPVKTVIDDLIQKLFDLLVLSLKKSIQAHLHEIDTFVTEAMEVLTIMPQSVEEIGDANLQYSKLQERKPEILPLFQEAEDKNRLLRTVAGGGLETISNLKAKWDKFELMMESHQLMIKDQIEVMKGNVKSRLQIYYQELEKFKARWDQLKPGDDVIETGQHNTLDKSAKLIKEKKIEFDDLEVTRKKLVDDCHHFRLEEPNFSLASSISKDIESCAQIWAFYEEFQQGFQEMANEDWITFRTKTYLFEEFLMNWHDRLRKVEEHSVMTVKLQSEVDKYKIVIPILKYVRGEHLSPDHWLDLFRLLGLPRGTSLEKLLFGDLLRVADTIVAKAADLKV

SEQ ID NO: 66022 - protein, 641 aa, Homo sapiens
MATGLLRAKKEAFVAFRDVAVYFTQEEWRLLSPAQRTLHREVMLETYNHLVSLEIPSSKPKLIAQLERGEAPWREERKCPLDLCPAESKPEIQLSPSCPLIFSSQQALSQHVWLSHLSQLFSSLWAGNPLHLGKHYPEDQKQQQDPFCFSGKAEWIQEGEDSRLLFGRVSKNGTSKALSSPPEEQQPAQSKEDNTVVDIGSSPERRADLEETDKVLHGLEVSGFGEIKYEEFGPGFIKESNLLSLQKTQTGETPYMYTEWGDSFGSMSVLIKNPRTHSGGKPYVCRECGRGFTWKSNLITHQRTHSGEKPYVCKDCGRGFTWKSNLFTHQRTHSGLKPYVCKECGQSFSLKSNLITHQRAHTGEKPYVCRECGRGFRQHSHLVRHKRTHSGEKPYICRECEQGFSQKSHLIRHLRTHTGEKPYVCTECGRHFSWKSNLKTHQRTHSGVKPYVCLECGQCFSLKSNLNKHQRSHTGEKPFVCTECGRGFTRKSTLSTHQRTHSGEKPFVCAECGRGFNDKSTLISHQRTHSGEKPFMCRECGRRFRQKPNLFRHKRAHSGAFVCRECGQGFCAKLTLIKHQRAHAGGKPHVCRECGQGFSRQSHLIRHQRTHSGEKPYICRKCGRGFSRKSNLIRHQRTHSG

SEQ ID NO: 66023 - protein, 105 aa, Homo sapiens
MYRWLVRILGTIFRFCDRSVPPARALLKRRRSDSTLFSTVDTDEIPAKRPRLDCFIHQVKNSLYNAASLFGFPFQLTTKPMVTSACNGTRNVAPSGEVLDPGTTC

SEQ ID NO: 66024 - protein, 153 aa, Homo sapiens
MSNGYEDHMAEDCRGDIGRTNLIVNYLPQNMTQDELRSLFSSIGEVESAKLIRDKVAGHSLGYGFVNYVTAKDAERAINTLNGLRLQSKTIKVSYARPSSEVIKDANLYISGLPRTMTQKDVEDMFSRFGRIINSRVLVDQTTVIPQTRTAPK

SEQ ID NO: 66025 - protein, 142 aa, Homo sapiens
IHCFEDVTAIIFCVALSGYDQVLHEDETTNRMHESLMLFDSICNNKFFIDTSIILFLNKKDLFGEKIKKSPLTICFPEYTGPNTYEDAAAYIQAQFESKNRSPNKEIYCHMTCATDTNNIQVVFDAVTDIIIANNLRGCGLY

SEQ ID NO: 66026 - protein, 89 aa, Homo sapiens
MAVPFYIPTSNVWSDPVSQHPRQHLVLSVFFILAILNMVSSFRVSELQVLLGFAGRNKSGRKHDLLMRALHLLKSGCSPAVQIKIRELY

SEQ ID NO: 66027 - protein, 338 aa, Homo sapiens
MREIVHIQAGQCGNQIGTKFWEVISDEHGIDPAGGYVGDSALQLERINVYYNESSCQTGAGNNWAKGHYTEGAELVDAVLDVVRKECEHCDCLQGFQLTHSLGGGTGSGMGTLLISKIREEFPDRIMNTFSVMPSPKVSDTVVEPYNATLSVHQLVENTDETYCIDNEALYDICFRTLKLTTPTYGDLNHLVSATMSGVTTSLRFPGQLNADLRKLAVNMVPFPRLHFFMPGFAPLTSRGSQQYRALTVPELTQQMFDARNMMAACDPRHGRYLTVATVFRGPMSMKEVDEQMLAIQSKNSSYFVEWIPNNVKVAVCDIPPRGLKMASTFIGNSTAIQ

SEQ ID NO: 66028 - protein, 46 aa, Homo sapiens
MVRSPLWRGRQKHQSGEWGPLWPRIGAKWRSLAWLMNQQRTCFIST

SEQ ID NO: 66029 - protein, 214 aa, Homo sapiens
MSSTRSQNPHGLKQIGLDQIWDDLRAGIQQVYTRQSMAKSRYMELYTHVYNYCTSVHQSNQARGAGVPPSKSKKGQTPGGAQFVGLELYKRLKEFLKNYLTNLLKDGEDLMDESVLKFYTQQWEDYRFSSKVLNGICAYLNRHWVRRECDEGRKGIYEIYSLALVTWRDCLFRPLNKQVTNAVLKLIEKERNGETINTRLISGVVQSYGRGSSA

SEQ ID NO: 66030 - protein, 26 aa, Homo sapiens
MEPYEAQKMMAEIRGSKETATQPLPL

SEQ ID NO: 66031 - protein, 3860 aa, Homo sapiens
MEDEERQKKLEAGKAKLAQFRQRKAQSDGQSPSKKQKKKRKTSSSKHDVSAHHDLNIDQSQCNEMYINSSQRVESTVIPESTIMRTLHSGEITSHEQGFSVELESEISTTADDCSSEVNGCSFVMRTGKPTNLLREEEFGVDDSYSEQGAQDSPTHLEMMESELAGKQHEIEELNRELEEMRVTYGTEGLQQLQEFEAAIKQRDGIITQLTANLQQARREKDETMREFLELTEQSQKLQIQFQQLQASETLRNSTHSSTAADLLQAKQQILTHQQQLEEQDHLLEDYQKKKEDFTMQISFLQEKIKVYEMEQDKKVENSNKEEIQEKETIIEELNTKIIEEEKKTLELKDKLTTADKLLGELQEQIVQKNQEIKNMKLELTNSKQKERQSSEEIKQLMGTVEELQKRNHKDSQFETDIVQRMEQETQRKLEQLRAELDEMYGQQIVQMKQELIRQHMAQMEEMKTRHKGEMENALRSYSNITVNEDQIKLMNVAINELNIKLQDTNSQKEKLKEELGLILEEKCALQRQLEDLVEELSFSREQIQRARQTIAEQESKLNEAHKSLSTVEDLKAEIVSASESRKELELKHEAEVTNYKIKLEMLEKEKNAVLDRMAESQEAELERLRTQLLFSHEEELSKLKEDLEIEHRINIEKLKDNLGIHYKQQIDGLQNEMSQKIETMQFEKDNLITKQNQLILEISKLKDLQQSLVNSKSEEMTLQINELQKEIEILRQEEKEKGTLEQEVQELQLKTELLEKQMKEKENDLQEKFAQLEAENSILKDEKKTLEDMLKIHTPVSQEERLIFLDSIKSKSKDSVWEKEIEILIEENEDLKQQCIQLNEEIEKQRNTFSFAEKNFEVNYQELQEEYACLLKVKDDLEDSKNKQELEYKSKLKALNEELHLQRINPTTVKMKSSVFDEDKTFVAETLEMGEVVEKDTTELMEKLEVTKREKLELSQRLSDLSEQLKQKHGEISFLNEEVKSLKQEKEQVSLRCRELEIIINHNRAENVQSCDTQVSSLLDGVVTMTSRGAEGSVSKVNKSFGEESKIMVEDKVSFENMTVGEESKQEQLILDHLPSVTKESSLRATQPSENDKLQKELNVLKSEQNDLRLQMEAQRICLSLVYSTHVDQVREYMENEKDKALCSLKEELIFAQEEKIKELQKIHQLELQTMKTQETGDEGKPLHLLIGKLQKAVSEECSYFLQTLCSVLGEYYTPALKCEVNAEDKENSGDYISENEDPELQDYRYEVQDFQENMHTLLNKVTEEYNKLLVLQTRLSKIWGQQTDGMKLEFGEENLPKEETEFLSIHSQMTNLEDIDVNHKSKLSSLQDLEKTKLEEQVQELESLISSLQQQLKETEQNYEAEIHCLQKRLQAVSESTVPPSLPVDSVVITESDAQRTMYPGSCVKKNIDGTIEFSGEFGVKEETNIVKLLEKQYQEQLEEEVAKVIVSMSIAFAQQTELSRISGGKENTASSKQAHAVCQQEQHYFNEMKLSQDQIGFQTFETVDVKFKEEFKPLSKELGEHGKEILLSNSDPHDIPESKDCVLTISEEMFSKDKTFIVRQSIHDEISVSSMDASRQLMLNEEQLEDMRQELVRQYQEHQQATELLRQAHMRQMERQREDQEQLQEEIKRLNRQLAQNGNENQGEVEEQTFKEKELDRKPEDVPPEILSNERYALQKANNRLLKILLEVVKTTAAVEETIGRHVLGILDRSSKSQSSASLIWRSEAEASVKSCVHEEHTRVTDESIPSYSGSDMPRNDINMWSKVTEEGTELSQRLVRSGFAGTEIDPENEELMLNISSRLQAAVEKLLEAISETSSQLEHAKVTQTELMRESFRQKQEATESLKCQEELRERLHEESRAREQLAVELSKAEGVIDGYADEKTLFERQIQEKTDIIDRLEQELLCASNRLQELEAEQQQIQEERELLSRQKEAMKAEAGPVEQQLLQETEKLMKEKLEVQCQAEKVRDDLQKQVKALEIDVEEQVSRFIELEQEKNTELMDLRQQNQALEKQLEKMRKFLDEQAIDREHERDVFQQEIQKLEQQLKVVPRFQPISEHQTREVEQLANHLKEKTDKCSELLLSKEQLQRDIQERNEEIEKLEFRVRELEQALLVSADTFQKVEDRKHFGAVEAKPELSLEVQLQAERDAIDRKEKEITNLEEQLEQFREELENKNEEVQQLHMQLEIQKKESTTRLQELEQENKLFKDDMEKLGLAIKESDAMSTQDQHVLFGKFAQIIQEKEVEIDQLNEQVTKLQQQLKITTDNKVIEEKNELIRDLETQIECLMSDQECVKRNREEEIEQLNEVIEKLQQELANIGQKTSMNAHSLSEEADSLKHQLDVVIAEKLALEQQVETANEEMTFMKNVLKETNFKMNQLTQELFSLKRERESVEKIQSIPENSVNVAIDHLSKDKPELEVVLTEDALKSLENQTYFKSFEENGKGSIINLETRLLQLESTVSAKDLELTQCYKQIKDMQEQGQFETEMLQKKIVNLQKIVEEKVAAALVSQIQLEAVQEYAKFCQDNQTISSEPERTNIQNLNQLREDELGSDISALTLRISELESQVVEMHTSLILEKEQVEIAEKNVLEKEKKLLELQKLLEGNEKKQREKEKKRSPQDVEVLKTTTELFHSNEESGFFNELEALRAESVATKAELASYKEKAEKLQEELLVKETNMTSLQKDLSQVRDHLAEAKEKLSILEKEDETEVQESKKACMFEPLPIKLSKSIASQTDGTLKISSSNQTPQILVKNAGIQINLQSECSSEEVTEIISQFTEKIEKMQELHAAEILDMESRHISETETLKREHYVAVQLLKEECGTLKAVIQCLRSKEGSSIPELAHSDAYQTREICSSDSGSDWGQGIYLTHSQGFDIASEGRGEESESATDSFPKKIKGLLRAVHNEGMQVLSLTESPYSDGEDHSIQQVSEPWLEERKAYINTISSLKDLITKMQLQREAEVYDSSQSHESFSDWRGELLLALQQVFLEERSVLLAAFRTELTALGTTDAVGLLNCLEQRIQEQGVEYQAAMECLQKADRRSLLSEIQALHAQMNGRKITLKREQESEKPSQELLEYNIQQKQSQMLEMQVELSSMKDRATELQEQLSSEKMVVAELKSELAQTKLELETTLKAQHKHLKELEAFRLEVKDKTDEVHLLNDTLASEQKKSRELQWALEKEKAKLGRSEERDKEELEDLKFSLESQKQRNLQLNLLLEQQKQLLNESQQKIESQRMLYDAQLSEEQGRNLELQVLLESEKVRIREMSSTLDRERELHAQLQSSDGTGQSRPPLPSEDLLKELQKQLEEKHSRIVELLNETEKYKLDSLQTRQQMEKDRQVHRKTLQTEQEANTEGQKKMHELQSKVEDLQRQLEEKRQQVYKLDLEGQRLQGIMQEFQKQELEREEKRESRRILYQNLNEPTTWSLTSDRTRNWVLQQKIEGETKESNYAKLIEMNGGGTGCNHELEMIRQKLQCVASKLQVLPQKASERLQFETADDEDFIWVQENIDEIILQLQKLTGQQGEEPSLVSPSTSCGSLTERLLRQNAELTGHISQLTEEKNDLRNMVMKLEEQIRWYRQTGAGRDNSSRFSLNGGANIEAIIASEKEVWNREKLTLQKSLKRAEAEVYKLKAELRNDSLLQTLSPDSEHVTLKRIYGKYLRAESFRKALIYQKKYLLLLLGGFQECEDATLALLARMGGQPAFTDLEVITNRPKGFTRFRSAVRVSIAISRMKFLVRRWHRVTGSVSININRDGFGLNQGAEKTDSFYHSSGGLELYGEPRHTTYRSRSDLDYIRSPLPFQNRYPGTPADFNPGSLACSQLQNYDPDRALTDYITRLEALQRRLGTIQSGSTTQFHAGMRR

SEQ ID NO: 66032 - protein, 158 aa, Homo sapiens
MPSARGKSKSKAPITFGDLAIYFSQEEWEWLSPIQKDLYEDVMLENYRNLVSLGLSFRRPNVITLLEKGKAPWMVEPVRRRRAPDSGSKCETKKLPPNQCNKSGQSICQKLVSAQQKAPTRKSGCNKNSVLVKPKKGHSGKKPLKCNDCGKTFSRSFS

SEQ ID NO: 66033 - protein, 110 aa, Homo sapiens
MLRSCAARLRTLGALCLPPVGRRLPGSEPRPELRSFSSEEVILKDCSVPNPSWNKDLRLLFDQFMKKCEDGSWKRLPSYKRTPTEWIQDFKTHFLGRNSHFPINISEHQI

SEQ ID NO: 66034 - protein, 145 aa, Homo sapiens
MPHLMERMVGSGLLWLALVSCILTQASAVQRDPSTVEDKCEKACRPEEECLALNSTWGCFCRQDLNSSDVHSLQPQLDCGPREIKVKVDKCLLGGLGLGEEVIAYLRDPNCSSILQTEERNWVSVTSPVQASACRNILERNQTHA

SEQ ID NO: 66035 - protein, 205 aa, Homo sapiens
MQNNGCQQQEGGGENTNSISSNGEDSDEAQMRLQLKRKLQRNRTSFTQEQIEALEKEFERTHYPDVFARERLAAKIDLPEARIQVWFSNRRAKWRREEKLRNQRRQASNTPSHIPISSSFSTSVYQPIPQPTTPVSSFTSGSMLGRTDTALTNTYSALPPMPSFTMANNLPMQPPVPSQTSSYSCMLPTSPSVNGRSYDTYTPPH

SEQ ID NO: 66036 - protein, 190 aa, Homo sapiens
MGYDVTRFQGDVDEDLICPICSGVLEEPVQAPHCEHAFCNACITQWFSQQQTCPVDRSVVTVAHLRPVPRIMRNMLSKLQIACDNAVFGCSAVVRLDNLMSHLSDCEHNPKRPVTCEQGCGLEMPKDELPNHNCIKHLRSVVQQQQTRIAELEKTSAEHKHQLAEQKRDIQLLKAYMRAIRSVNPNLQNL

SEQ ID NO: 66037 - protein, 87 aa, Homo sapiens
PTPKVELEFWKSRYEDLKYIYNQLRTITVRGMAKLLDKLQSSYFPAFKAMYRDVVADGTAISWPFEHQTRSTLIKIAKPAKSMIRSR

SEQ ID NO: 66038 - protein, 217 aa, Homo sapiens
MDLGIPDLLDAWLEPPEDIFSTGSVLELGLHCPPPEVPVTRLQEQGLQGWKSGGDRGCGLQESEPEDFLKLFIDPNEVYCSEASPGSDSGISEDPCHPDSPPAPRATSSPMLYEVVYEAGALERMQGETGPNVGLISIQLDQWSPAFMVPDSCMVSELPFDAHAHILPRAGTVAPVPCTTLLPCQTLFLTDEEKRLLGQEGVSLPSHLPLTKVTCFP

SEQ ID NO: 66039 - protein, 841 aa, Homo sapiens
MVFQTRYPSWIILCYIWLLRFAHTGEAQAAKEVLLLDSKAQQTELEWISSPPNGWEEISGLDENYTPIRTYQVCQVMEPNQNNWLRTNWISKGNAQRIFVELKFTLRDCNSLPGVLGTCKETFNLYYYETDYDTGRNIRENLYVKIDTIAADESFTQGDLGERKMKLNTEVREIGPLSKKGFYLAFQDVGACIALVSVKVYYKKCWSIIENLAIFPDTVTGSEFSSLVEVRGTCVSSAEEEAENAPRMHCSAEGEWLVPIGKCICKAGYQQKGDTCEPCGRGFYKSSSQDLQCSRCPTHSFSDKEGSSRCECEDGYYRAPSDPPYVACTRPPSAPQNLIFNINQTTVSLEWSPPADNGGRNDVTYRILCKRCSWEQGECVPCGSNIGYMPQQTGLEDNYVTVMDLLAHANYTFEVEAVNGVSDLSRSQRLFAAVSITTGQAAPSQVSGVMKERVLQRSVELSWQEPEHPNGVITEYEIKYYEKDQRERTYSTVKTKSTSASINNLKPGTVYVFQIRAFTAAGYGNYSPRLDVATLEEATATAVSSEQNPVIIIAVVAVAGTIILVFMVFGFIIGRRHCGYSKADQEGDEELYFHCTKTYIDPETYEDPNRAVHQFAKELDASCIKIERVIGAGEFGEVCSGRLKLPGKRDVAVAIKTLKVGYTEKQRRDFLCEASIMGQFDHPNVVHLEGVVTRGKPVMIVIEFMENGALDAFLRKHDGQFTVIQLVGMLRGIAAGMRYLADMGYVHRDLAARNILVNSNLVCKVSDFGLSRVIEDDPEAVYTTTGGKIPVRWTAPEAIQYRKFTSASDVWSYGIVMWEVMSYGERPYWDMSNQDVGVTFI

SEQ ID NO: 66040 - protein, 602 aa, Homo sapiens
MAGVKVPLVAMHHAYVVTERIEGIQNMPNVRDHDASVYLRLQGDALSVGGYEANPIFWEEVSDKFAFGLFDLDWEVFTQHIEGAINRVPVLEKTGIKSTVCGPESFTPDHKPLMGEAPELRGFFLGCGFNSAGMMLGGGCGQELAHWIIHGRPEKDMHGYDIRRFHHSLTDHPRWIRERSHESYAKNYSVVFPHDEPLAGRNMRRDPLHEELLGQGCVFQERHGWERPGWFHPRGPAPVLEYDYYGAYGSRAHEDYAYRRLLADEYTFAFPPHHDTIKKECLACRGAAAVFDMSYFGKFYLVGLDARKAADWLFSADVSRPPGSTVYTCMLNHRGGTESDLTVSRLAPSHQASPLAPAFEGDGYYLAMGGAVAQHNWSHITTVLQDQKSQCQLIDSSEDLGMISIQGPASRAILQEVLDADLSNEAFPFSTHKLLRAAGHLVRAMRLSFVGELGWELHIPKASCVPVYRAVMAAGAKHGLINAGYRAIDSLSIEKGYRHWHADLRPDDSPLEAGLAFTCKLKSPVPFLGREALEQQRAAGLRRRLVCFTMEDKVPMFGLEAIWRNGQVVGHVRRADFGFAIDKTIATVTSMTPAVGRSRWTL

SEQ ID NO: 66041 - protein, 52 aa, Homo sapiens
MALVPYEETTEFGLQKFHKPLATFSFANHTIQIRQDWRHLGVAAVVWDAVLM

SEQ ID NO: 66042 - protein, 114 aa, Homo sapiens
MRLTRCQAALAAAITLNLLVLFYVSWLQHQPRNSRARGPRRASAAGPRVTVLVREFEAFDNAVPELVDSFLQQDPAQPVVVAADTLPYPPLALPRIPNVRLALLQPALDRPAAA

SEQ ID NO: 66043 - protein, 93 aa, Homo sapiens
MREYKLVVLGSGGVGKSALTVQFVQGIFVEKYDPTIEDSYRKQVEVDAQQCMLEILDTAGTEQFTAMRDLYMKNGQGFALVYSITAQSTFNDL

SEQ ID NO: 66044 - protein, 248 aa, Homo sapiens
  MOD_RES (1)..(1): Any amino acid
XLEGPEPSQLKPLVIQAMPTLIELMKDPSVVVRDTAAWTVGRICELLPEAAINDVYLAPLLQCLIEGLSAEPRVASNVCWAFSSLAEAAYEAADVADDQEEPATYCLSSSFELIVQKLLETTDSRDRVSPCWTGWSRSPDPRDPPAFAPQSARITGMSHHARPTTIFLYRMKNLGPDGHQNNLRSSAYESLMEIVKNSAKDCYPAVQKTTLVIMERLQQVLQMESHIQSTSDRIQFNDLQSLLCATLQ

SEQ ID NO: 66045 - protein, 157 aa, Homo sapiens
MKIAVIGQSLFGQEVYCHLRKEGHEVVGVFTVPDKDGKADPLGLEAEKDGVPVFKYSRWRAKGQALPDVVAKYQALGAELNVLPFCSQFIPMEIISAPRHGSIIYHPSLLPRHRGASAINWTLIHGDKKGGFSIFWADDGLDTGDLLLQKECEVLPD

SEQ ID NO: 66046 - protein, 681 aa, Homo sapiens
MALIMEPVSKWSPSQVVDWMKGLDDCLQQYIKNFEREKISGDQLLRITHQELEDLGVSRIGHQELILEAVDLLCALNYGLETENLKTLSHKLNASAKNLQNFITGRRRSGHYDGRTSRKLPNDFLTSVVDLIGAAKSLLAWLDRSPFAAVTDYSVTRNNVIQLCLELTTIVQQDCTVYETENKILHVCKTLSGVCDHIISLSSDPLVSQSAHLEVIQLANIKPSEGLGMYIKSTYDGLHVITGTTENSPADRCKKIHAGDEVIQVNHQTVVGWQLKNLVNALREDPSGVILTLKKRPQSMLTSAPALLKNMRWKPLALQTFQQSSLQHKSKKKNKGPIAGKSKRRISCKDLGRGDCEGWLWKKKDAKSYFSQKWKKYWFVLKDASLYWYINEEDEKAEGFISLPEFKIDRASECRKKYAFKACHPKIKSFYFAAEHLDDMNRWLNRINMLTAGYAERERIKQEQDYWSESDKEEADTPSTPKQDSPPPPYDTYPRPPSMSCASPYVEAKHSRLSSTETSQSQSSHEEFRQEVTGSSAVSPIRKTASQRRSWQDLIETPLTSSGLHYLQTLPLEDSVFSDSAAISPEHRRQSTLPTQKCHLQDHYGPYPLAESERMQVLNGNGGKPRSFTLPRDSGFNHCCLNAPVSACDPQDDVQPPEVEEEEEEEEEEGEAAGENIGEKS

SEQ ID NO: 66047 - protein, 52 aa, Homo sapiens
MESRCVTQAGVQWRSLSSLQPPPPVFKQSSCLSHQTSRSPPPLSWKDTCHWI

SEQ ID NO: 66048 - protein, 204 aa, Homo sapiens
MFDPAPVQLIVQFLEQASKPSVNEQNQVQPPPDNKRNRILKLLALKVAAHLKWDLDILEKSLSVPVLNMLLNELLCISKVPPGTKHVDMDLATLPPTTAMAVLLYNRWAIRTIVQSSFPVKQAKPGPPQLSVMNQMQQEKELTENILKVLKEQAADSILVLEAALKLNKDLYVHTMRTLDLLAMEPGMVNGETESSTAGLKVKT

SEQ ID NO: 66049 - protein, 503 aa, Homo sapiens
MMQLVYCVFFFLLVCRSNKSPWVCLTCSSVHCGRYVNGHAKKHYEDAQVPLTNHKKSEKQDKVQHTVCMDCSSYSTYCYRCDDFVVNDTKLGLVQKVREHLQNLENSAFTADRHKKRKLLENSTLNSKLLKVNGSTTAICATGLRNLGNTCFMNAILQSLSNIEQFCCYFKELPAVELRNGKTAGRRTYHTRSQGDNNVSLVEEFRKTLCALWQGSQTAFSPESLFYVVWKIMPNFRGYQQQDAHEFMRYLLDHLHLELQGGFNGVSRSAILQENSTLSASNKCCINGASTVVTAIFGGILQNEVNCLICGTESRKFDPFLDLSLDIPSQFRSKRSKNQENGPVCSLRDCLRSFTDLEELDETELYMCHKCKKKQKSTKKFWIQKLPKVLCLHLKRFHWTAYLRNKVDTYVEFPLRGLDMKCYLLEPENSGPESCLYDLAAVVVHHGSGVGSGHYTAYATHEGRWFHFNDSTVTLTDEETVVKAKAYILFYVEHQAKAGSDKL

SEQ ID NO: 66050 - protein, 138 aa, Homo sapiens
MGSDKRVSRTERSGRYGSIIDRDDRDERESRSRRRDSDYKRSSDDRRGDRYDDYRDYDSPERERERRNSDRSEDGYHSDGDYDSRNDGVLRRPSACGCEADEEENRCKPWFRLRGVLSLARCYQLDGSQSEKVGDSRK

SEQ ID NO: 66051 - protein, 85 aa, Homo sapiens
PEAAAERDAREKLALWDRRPDTTAPLTDRQTDSVLELKAAAENLPVPAEDMVPEVDLKSMKAQVEISLAQLSNSFIPWIIKVVCS

SEQ ID NO: 66052 - protein, 80 aa, Homo sapiens
MPGRSSSNSGSTGFISFSGVESALSSLKNFQACINSGMDTASSVALDLVESQSFWEEEHRGQGPFSSRHIKASASHQHDQ

SEQ ID NO: 66053 - protein, 136 aa, Homo sapiens
GTETPVGCEAAPGGGSKKRDSLGTAGSAHLIIKDLGEIHSRLLDHRPVIQGETRYFVKEFEEKRGLREMRVLENLKNMIHETNEHTLPKCRDTMRDSLSQVLQRLQAANDSVCRLQQREQERKKVWTLPAAAADLE

SEQ ID NO: 66054 - protein, 146 aa, Homo sapiens
MVELCIKLLQVFRFCKSKCHKNFKKKRNPRKVRWTKAFRKAAGKELTVDNSFEFEKRRNEPIKYQRELWNKTIDAMKRVEEIKQKRQAKFIMNRLKKNKELQKVQDIKEVKQNIHLIRAPLAGKGKQLEEKMVQQLQEDVDMEDAP

SEQ ID NO: 66055 - protein, 186 aa, Homo sapiens
MWSHLNRLLFWSIFSSVTCRKAVLDCEAMKTNEFPSPCLDSKTKVVMKGQNVSMFCSHKNKSLQITYSLFRRKTHLGTQDGKGEPAIFNLSITEAHESGPYKCKAQVTSCSKYSRDFSFTIVDPVTSPVLNIMVIQTETDRHITLHCLSVNGSLPINYTFFENHVAISPAISKYDREPAEFNLTKK

SEQ ID NO: 66056 - protein, 185 aa, Homo sapiens
MPGWLTLPTLCRFLLWAFTIFHKAQGDPASHPGPHYLLPPIHEVIHSHRGATATLPCVLGTTPPSYKVRWSKVEPGELRETLILITNGLHARGYGPLGGRARMRRGHRLDASLVIAGVRLEDEGRYRCELINGIEDESVALTLSLEGVVFPYQPSRGRYQFNYYEAKQACEEQDGRLATYSQLYQ

SEQ ID NO: 66057 - protein, 99 aa, Homo sapiens
  MOD_RES (1)..(1): Any amino acid
XQYIEELQKFVEDDNYKLSLKIEPGTSTPRSAASREDLVGPEVGASPQSGRKSVAAEGALLPQTPPSPRNLIPHGHRKCHSLGYKSAFLILSFKFLSLL

SEQ ID NO: 66058 - protein, 21 aa, Homo sapiens
  MOD_RES (1)..(1): Any amino acid
XYLQGYIEHILRIIWTDMHHE

SEQ ID NO: 66059 - protein, 307 aa, Homo sapiens
  MOD_RES (1)..(1): Any amino acid
XRDRGQERLAQFPAAGRGSPGPPGARLGVGLEKGRGREVWRPGVWGCEARASEVNWSCPFDPVCALPQAKFELITSEASYIHSLSVAVGHFLGSAELSECLGAQDKQWLFSKLPEVKSTSERFLQDLEQRLEADVLRFSVCDVVLDHCPAFRRVYLPYVTNQAYQERTYQRLLLENPRFPGILARLEESPVCQRLPLTSFLILPFQRITRLKMLVENILKRTAQGSEDEDMATKAFNALKELVQECNASVQSMKRTEELIHLSKKIHFEGKIFPLISQARWLVRHGELVELAPLPAAPPAKLKLSSK

SEQ ID NO: 66060 - protein, 302 aa, Homo sapiens
IKQTKDAQGPDDAKMNEKLYTVCDVAMNIIMSKSTTYSLESPKDPVLPARFFTQPDKNFSNTKNYLPPEMKSFFTPGKPKTTNVLGAVNKPLSSAGKQSQTKSSRMETVSNASSSSNPSSPGRIKGRLDSSEMDHSENEDYTMSSPLPGKKSDKRDDSDLSELEKPRGRKKTPVTEQEEKLGMDDLTKLVQEQKPKGSQRSRKRGHTASESDEQQWPEEKRLKEDILENEDEQNSPPKKGKRGRPPKPLGGGTPKEEPTMKTSKKGSKKKSGPPAPEEEEEEERQSGNTEQKSKSKQHRVSR

SEQ ID NO: 66061 - protein, 47 aa, Homo sapiens
MSSNLLPTLNSGAVRAMSVLWETDRGAVTSTQEMWRQGYLHSTVKAN

SEQ ID NO: 66062 - protein, 672 aa, Homo sapiens
MIYYFPLQTLELTGLEGFSIAFLSPIFLTITPFWKLVNKKWMLTLLRIITIGSIASFQAPNAKLRLMVLALGVSSSLIVQAVTWWSGSHLQRYLRIWGFILGQIVLVVLRIWYTSLNPIWSYQMSNKVILTLSAIATLDRIGTDGDCSKPEEKKTGEVATGMASRPNWLLAGAAFGSLVFLTHWVFGEVSLVSRWAVSGHPHPGPDPNPFGGAVLLCLASGLMLPSCLWFRGTGLIWWVTGTASAAGLLYLHTWAAAVSGCVFAIFTASMWPQTLGHLINSGTNPGKTMTIAMIFYLLEIFFCAWCTAFKFVPGGVYARERSDVLLGTMMLIIGLNMLFGPKKNLDLLLQTKNSSKVLFRKSEKYMKLFLWLLVGVGLLGLGLRHKAYERKLGKVAPTKEVSAAIWPFRFGYDNEGWSSLERSAHLLNETGADFITILESDASKPYMGNNDLTMWLGEKLGFYTDFGPSTRYHTWGIMALSRYPIVKSEHHLLPSPEGEIAPAITLTVNISGKLVDFVVTHFGNHEDDLDRKLQAIAVSKLLKSSSNQVIFLGYITSAPGSRDYLQLTEHGNVKDIDSTDHDRWCEYIMYRGLIRLGYARISHAELSDSEIQMAKFRIPDDPTNYRDNQKVVIDHREVSEKIHFNPRFGSYKEGHNYENNHHFHMNTPKYFL

SEQ ID NO: 66063 - protein, 967 aa, Homo sapiens
MYERHKRRYSLCDISKVDRTVDVVLLKINRENWCTIEPCPDAASLLASKQSPECENFLDVGLGRECTSKQGVLKRESGSDSDLFHSPSDDMDSIIFPKPEEEHLACDITGSSSSTDDTASLDRHSSHGSDVSLSQILKPNRSRDRQSLDGFYSHGMGAEGRESESEPADPGDVEEEEMDSITEVPANCSVLRSSMRSLSPFRRHSWGPGKNAASDAEMNHRSFSLEGLTGGAGVGNKPSSSLEVSSANAEELRHPFSGEERVDSLVSLSEEDLESDQREHRMFDQQICHRSKQQGFNYCTSAISSPLTKSISLMTISHPGLDNSRPFHSTFHNTSANLTESITEENYNFLPHSPSKKDSEWKSGTKVSRTFSYIKNKMSSSKKSKEKEKEKDKIKEKEKDSKDKEKDKKTVNGHTFSSIPVVGPISCSQCMKPFTNKDAYTCANCSAFVHKGCRESLASCAKVKMKPKGSLQAHDTSSLPTVIMRNKPSQPKERPRSAVLLVDETATTPIFANRRSQQSVSLSKSVSIQNITGVGNDENMSNTWKFLSHSTDSLNKISKVNESTESLTDEGVGTDMNEGQLLGDFEIESKQLEAESWSRIIDSKFLKQQKKDVVKRQEVIYELMQTEFHHVRTLKIMSGVYSQGMMADLLFEQQMVEKLFPCLDELISIHSQFFQRILERKKESLVDKSEKNFLIKRIGDVLVNQFSGENAERLKKTYGKFCGQHNQSVNYFKDLYAKDKRFQAFVKKKMSSSVVRRLGIPECILLVTQRITKYPVLFQRILQCTKDNEVEQEDLAQSLSLVKDVIGAVDSKVASYEKKVRLNEIYTKTDSKSIMRMKSGQMFAKEDLKRKKLVRDGSVFLKNAAGRLKEVQAVLLTDILVFLQEKDQKYIFASLDQKSTVISLKKLIVREVAHEEKGLFLISMGMTDPEMVEVHASSKEERNSWIQIIQDTINTLNRDEDEGIPSE

SEQ ID NO: 66064 - protein, 146 aa, Homo sapiens
MEGDCLSCMKYLMFVFNFFIFLGGACLLAIGIWVMVDPTGFREIVAANPLLLTGAYILLAMGGLLFLLGFLGCCGAVRENKCLLLFFFLFILIIFLAELSAAILAFIFRENLTREFFTKELTKHYQGNNDTDVFSATWNSVMITVS

SEQ ID NO: 66065 - protein, 285 aa, Homo sapiens
  MOD_RES (1)..(1): Any amino acid
XSTTEALFASVEDYILVRGVSLVHTAKMNPVRMAEHALTVWMAPFVSVIRVLGEKGVRVISTSALETLACTGPSVRTRTAPITATAATSTGDVTARMLRPTTKVVDLDPCLSKKPLEEKPSQPYSARESLSEVQSLSSFQSESCDDNGYHWDTSDWMPSVPLPDIQEFPNYEVIDEQTPLYSADPNAIDTDYYPGGYDIESDFPPPPEDFPAADELPPLPPEFSNQFESIHPPRDMPAAGSLGSSSRNRQRFNLNQYLPNFYPLDMSEPQTKGTGENSTCREPHA

SEQ ID NO: 66066 - protein, 388 aa, Homo sapiens
  MOD_RES (1)..(1): Any amino acid
XRSIPEDSELNTVTLPRKARMKDQFGNSIINTPLKRRKVFSQEPPDALALSCQSSFDSVILNCRSIRVGTLFRLLIEPVIFCLDFIKIQLDEPDHDPVEIILNTSDLTKCEWCNVRKLPVVFLQAIPAVYQKLSIQLQMNKEDKVWNDCKGVNKLTNLEEQYIILIFQNGLDPPANMVFESIINEIGIKNNISNFFAKIPFEEANGRLVACTRTYEESIKGSCGQKENKIKTVSFESKIQLRSKQEFQFFDEEEETGENHTIFIGPVEKLIVYPPPPAKGGISVTNEDLHCLNEGEFLNDVIIDFYLKYLVLEKLKKEDADRIHIFSSFFYKRLNQRERRNHETTNLSIQQKRHGRVKTWTRHVDIFEKDFIFVPLNEAWLKQNQTKL

SEQ ID NO: 66067 - protein, 93 aa, Homo sapiens
MSEHVTRSQSSERGNDQESSQPVGPVIVQQPTEEKRQEEEPPTDNQGTDVEAFQQELALLKIEDAPGDGPDVREGTLPTFDPTKVLEAGEGQL

SEQ ID NO: 66068 - protein, 287 aa, Homo sapiens
MASLGANPRRTPQGPRPGAASSGFPSPAPVPGPREAEEEEVEEEEELAEIHLCVLWNSGYLGIAYYDTSDSTIHFMPDAPDHESLKLLQRVLDEINPQSVVTSAKQDENMTRFLGKLASQEHREPKRPEIIFLPSVDFGLEISKQRLLSGNYSFIPDAMTATEKILFLSSIIPFDCLLTPPGDLRFTPIPLLIPSQVRALGGLLKFLGRRRIGVELEDYNVSVPILGFKKFMLTHLVNIDQDTYSVLQIFKSESHPSVYKVASGLKEGLSLFGILNRCHCKWGEKLL

SEQ ID NO: 66069 - protein, 214 aa, Homo sapiens
MPTAAAPIISSVQKLVLYETRARYFLVGSNNAETKYRVLKIDRTEPKDLVIIDDRHVYTQQEVRELLGRLDLGNRTKMGQKGSSGLFRAVSAFGVVGFVRFLEGYYIVLITKRRKMADIGGHAIYKVEDTNMIYIPNDSVRVTHPDEARYLRIFQNVDLSSNFYFSYDLSHSLQYNLTVLRMPLEMLKSEMTQNRQESFDIFEDEGLITQGGSG

SEQ ID NO: 66070 - protein, 16 aa, Homo sapiens
  MOD_RES (1)..(1): Any amino acid
XNTEAFFGQGTRLTVV

SEQ ID NO: 66071 - protein, 91 aa, Homo sapiens
  MOD_RES (1)..(1): Any amino acid
XKLLAFGFAFLDTEVFGKAQHLPPLVFHQYRRLTFPRTQTRRRPLLELTRRHSAAPPPMQNSTLPQAAMLSQMSQERGVQPAPFLQTQFPH

SEQ ID NO: 66072 - protein, 49 aa, Homo sapiens
MRDLLQYIACFFAFFSAGFLIVATWTDCWMVNADDSLEMLDLRETILIP

SEQ ID NO: 66073 - protein, 98 aa, Homo sapiens
  MOD_RES (1)..(1): Any amino acid
XKHEEKQQEGGIVSKNFTKKIHRPVIGSQKGEHIDCIISSARCPVRLPAEVDPVTVFASLSPEGLLIIEAPQVPPYSTFGESSFNNELPQDSQEVTCT

SEQ ID NO: 66074 - protein, 53 aa, Homo sapiens
MAMSNGNNDFVVLSNSSIATSAANPSPLTPCDGDHAAQQLTPKEATRTKCPGV

SEQ ID NO: 66075 - protein, 25 aa, Homo sapiens
  MOD_RES (1)..(1): Any amino acid
XATLQQLEPVTGQVSVLVMCHTREL

SEQ ID NO: 66076 - protein, 341 aa, Homo sapiens
MSLMVVSMVCVGFFLLQGAWPHEGVHRKPSLLAHPGPLVKSEETVILQCWSDVRFQHFLLHREGKFKDTLHLIGEHHDGVSKANFSIGPMMQDLAGTYRCYGSVTHSPYQLSAPSDPLDIVITGLYEKPSLSAQPGPTVLAGESVTLSCSSRSSYDMYHLSREGEAHERRFSAGPKVNGTFQADFPLGPATHGGTYRCFGSFRDSPYEWSNSSDPLLVSVTGNPSNSWPSPTEPSSETGNPRHLHVLIGTSVVIILFILLLFFLLHRWCCNKKNAVVMDQEPAGNRTVNREDSDEQDPQEVTYAQLNHCVFTQRKITHPSQRPKTPPTDIIVYTELPNAEP

SEQ ID NO: 66077 - protein, 135 aa, Homo sapiens
MAEFLDDQETRLCDNCKKEIPVFNFTIHEIHCQRNIGMCPTCKEPFPKSDMETHMAAEHCQVTCKCNKKLEKRLLKKHEETECPLRLAVCQHCDLELSILKLKEHEDYCGARTELCGNCGRNVLVKDLKTHPEVC

SEQ ID NO: 66078 - protein, 68 aa, Homo sapiens
MAGRVPSLLVLLVFPSSCLAFRSPLSVFKRFKETTRPFSNECLGTTRPVVPIDSSDFALDIRMPGVTP

SEQ ID NO: 66079 - protein, 43 aa, Homo sapiens
MEEEASSPGLGCSKPHLEKLTLGITRILEKPPAERHMISSWEQ

SEQ ID NO: 66080 - protein, 673 aa, Homo sapiens
MASQPNSSAKKKEEKGKNIQVVVRCRPFNLAERKASAHSIVECDPVRKEVSVRTGGLADKSSRKTYTFDMVFGASTKQIDVYRSVVCPILDEVIMGYNCTIFAYGQTGTGKTFTMEGERSPNEEYTWEEDPLAGIIPRTLHQIFEKLTDNGTEFSVKVSLLEIYNEELFDLLNPSSDVSERLQMFDDPRNKRGVIIKGLEEITVHNKDEVYQILEKGAAKRTTAATLMNAYSSRSHSVFSVTIHMKETTIDGEELVKIGKLNLVDLAGSENIGRSGAVDKRAREAGNINQSLLTLGRVITALVERTPHVPYRESKLTRILQDSLGGRTRTSIIATISPASLNLEETLSTLEYAHRAKNILNKPEVNQKLTKKALIKEYTEEIERLKRDLAAAREKNGVYISEENFRVMSGKLTVQEEQIVELIEKIGAVEEELNRVTELFMDNKNELDQCKSDLQNKTQELETTQKHLQETKLQLVKEEYITSALESTEEKLHDAASKLLNTVEETTKDVSGLHSKLDRKKAVDQHNAEAQDIFGKNLNSLFNNMEELIKDGSSKQKAMLEVHKTLFGNLLSSSVSALDTITTVALGSLTSIPENVSTHVSQIFNMILKEQSLAAESKTVLQELINVLKTDLLSSLEMILSPTVVSILKINSQLKHIFKTSLTVADKKIKKRN

SEQ ID NO: 66081 - protein, 138 aa, Homo sapiens
MAAIRKKLVIVGDGACGKTCLLIVFSKDQFPEVYVPTVFENYVADIEVDGKQVELALWDTAGQEDYDRLRPLSYPDTDVILMCFSIDSPDSLENIPEKWTPEVKHFCPNVPIILVGNKKDLRNDEHTRRELAKMKQEP

SEQ ID NO: 66082 - protein, 348 aa, Homo sapiens
MDEDEDMTKTRTFFAAKIVIGIALAGIMLVCGIGNFVFIAALTRYKKLRNLTNLLIANLAISDFLVAIICCPFEMDYYVVRQLSWEHGHVLCASVNYLRTVSLYVSTNALLAIAIDRYLAIVHPLKPRMNYQTASFLIALVWMVSILIAIPSAYFATETVLFIVKSQEKIFCGQIWPVDQQLYYKSYFLFIFGVEFVGPVVTMTLCYARISRELWFKAVPGFQTEQIRKRLRCRRKTVLVLMCILTAYVLCWAPFYGFTIVRDFFPTVFVKEKHYLTAFYVVECIAMSNSMINTVCFVTVKNNTMKYFKKMMLLHWRPSQRGSKSSADLDLRTNGVPTTEEVDCIRLK

SEQ ID NO: 66083 - protein, 582 aa, Homo sapiens
MEELVVEVRGSNGAFYKAFVKDVHEDSITVAFENNWQPDRQIPFHDVRFPPPVGYNKDINESDEVEVYSRANEKEPCCWWLAKVRMIKGEFYVIEYAACDATYNEIVTIERLRSVNPNKPATKDTFHKIKLDVPEDLRQMCAKEAAHKDFKKAVGAFSVTYDPENYQLVILSINEVTSKRAHMLIDMHFRSLRTKLSLIMRNEEASKQLESSRQLASRFHEQFIVREDLMGLAIGTHGANIQQARKVPGVTAIDLDEDTCTFHIYGEDQDAVKKARSFLEFAEDVIQVPRNLVGKVIGKNGKLIQEIVDKSGVVRVRIEAENEKNVPQEEEIMPPNSLPSNNSRVGPNAPEEKKHLDIKENSTHFSQPNSTKVQRGMVPFVFVGTKDSIANATVLLDYHLNYLKEVDQLRLERLQIDEQLRQIGASSRPPPNRTDKEKSYVTDDGQGMGRGSRPYRNRGHGRRGPGYTSESDHRDELSDWSLAPTEEERESFLRRGDGRRRGGGGRGQGGRGRGGGFKGNDDHSRTDNRPRNPREAKGRTTDGSLQNTSSEGSRLRTGKDRNQKKEKPDSVDGQQPLVNGVP

SEQ ID NO: 66084 - protein, 179 aa, Homo sapiens
MASSSGRVTIQLVDEEAGVGAGRLQLFRGQSYEAIRAACLDSGILFRDPYFPAGPDALGYDQLGPDSEKAKGVKWMRPHEFCAEPKFICEDMSRTDVCQGSLAAASLTLYPRLLRRVVPPGQDFQHGYAGVFHFQLWQFGRWMDVVVDDRLPVREGKLMFVRSEQRNEFWAPLLEKAYA

SEQ ID NO: 66085 - protein, 185 aa, Homo sapiens
MSYFGEHFWGEKNHGFEVLYHSVKQGPISTKELADFIRERATIEETYSKAMAKLSKLASNGTPMGTFAPLWEVFRVSSDKLALCHLELTRKLQDLIKDVLRYGEEQLKTHKKVLSGVSQLLPKSRENYLNRCMDQERLRRESTSQKEMDKAETKTKKAAESLRRSVEKYNSARADFEQKMLDSAL

SEQ ID NO: 66086 - protein, 191 aa, Homo sapiens
MAQEVDTAQGAEMRRGAGAARGRASWCWALALLWLAVVPGWSRVSGIPSRRHWPVPYKRFDFRPKPDPYCQAKYTFCPTGSPIPVMEGDDDIEVFRLQAPVWEFKYGDLLGHLKIMHDAIGFRSTLTGKNYTMEWYELFQLGNCTFPHLRPEMDAPFWCNQGAACFFEGIDDVHWKENGTLVQVATISGKL

SEQ ID NO: 66087 - protein, 271 aa, Homo sapiens
VRGLEALLADPQQKIETVISDEEVIKWTKFFVVFRHPVLIFITEKHGNYFAYVQMFNSRILTKYTLLLGQDENSVIKSFTASVDRKFISLMSLSSDGCIYETLIPIRPADPEKNQSLVKSLLLKAVVSGNARNGVALTALDQDHVAVLGSPLAASKGTHVVSHFVNWETPQGCGLGFQNSEQSRRILRRRKIEVSLQPEVPPSKQLLSTIMKDSEKHIEVEVRKFLALKQTPDFHTVIGDTVTGLLERCKAEPSFYPRNCLMQLIQTHVLS

SEQ ID NO: 66088 - protein, 108 aa, Homo sapiens
MENMHLRRVRTMPRHSQSLTMAPYSSVSLVEQLEDRILCHEKTTAALVEHAFRIKDDIVNSLQKMQNKGGGDRLARLFLEEHIRNITAIVKQLNRDIEVLQEQIRARD

SEQ ID NO: 66089 - protein, 181 aa, Homo sapiens
MPRNSGAGYGCPHGDPSMLDSRETPQESRQDMIVRTTQEKLKTSSLTDRQPLSKESLNHALELSVPEKVNNAQWDAPEEALWTTRADGRVRLRIDPSCPQLPYTVHRMFYEALDKYGDLIALGFKRQDKWEHISYSQYYLLARRAAKGFLKQAHSVAILGFNSPEWFFSAVGTVFAGGIVT

SEQ ID NO: 66090 - protein, 113 aa, Homo sapiens
MFQTKLRNETWEDLPKMSCTTEIQAAFILSSFVTFFSGLIILLIFRLIWRSVKKWQIIKGTGIILELFTSGTIARSHVRSLHFQGQFRDHIEMLLSAQTFVGQVLPCWKLFII

SEQ ID NO: 66091 - protein, 104 aa, Homo sapiens
MGLGAPVGIGKPSMWRLGAELGKSVVYQETNGETRVEIKESVRGQDIFIIQTIPRDVNTAVMELLIMAYALKTACARNIIGVIPYFPYSKQSKMRKRGSIVCKL

SEQ ID NO: 66092 - protein, 62 aa, Homo sapiens
  MOD_RES (1)..(1): Any amino acid
XPLQPQPKKPEDEPQETAYRTQVSSCCLHICQGIREVPYKREEEALEERRLSRGEIPTLQRS

SEQ ID NO: 66093 - protein, 19 aa, Homo sapiens
  MOD_RES (1)..(1): Any amino acid
XGMNVPFKRLSAFYFIPKI

SEQ ID NO: 66094 - protein, 79 aa, Homo sapiens
LLKGVTIASGGVLPRIHPELLAKKRGTKGKSETILSPPPEKRGRKATSGKKGGKKSKAAKPRTSKKRQGSHSVTQAGVQ

SEQ ID NO: 66095 - protein, 71 aa, Homo sapiens
  MOD_RES (1)..(1): Any amino acid
XLAFKLKRKLFTIEILENERKEKERIIERLHLPPDLSDTVSRSSKMDLAESAKRLGPGCGMMAGGKKHLDF

SEQ ID NO: 66096 - protein, 84 aa, Homo sapiens
MTMTLHTKASGMALLHQIQGNELEPLNRPQLKIPLERPLGEVYLDSSKPAVYNYPEGAAYEFNAAAAANAQVYGQTGLPYGPGS

SEQ ID NO: 66097 - protein, 61 aa, Homo sapiens
MSTERDSETTFDEDSQPNDEVVPYSDDETEDELDDQGSAVEPEQNRVNREAEENREPFRKE

SEQ ID NO: 66098 - protein, 620 aa, Homo sapiens
MKTRPSSLESVTCWRAKFMEAFFSHVLRGTIDVSSDRRLCDQRFSPLLHSSRHVRQLTICNMLQGATELVAEPNRRVLETLASSLHTLKFRHLLFSDVAAQQSLRQLLHQLIHHGAVSQVSLYSWPVPESALFILILTMSAGFWQPGPGGPPCRLCGEASRGRAPSRDEGSLLLGSRRPRRDAAERCAAALMASRRKSEAKQMPRAAPATRVTRRSTQESLTAGGTDLKRELHPPATSHEAPGTKRSPSAPAATSSASSSTSSYKRAPASSAPQPKPLKRFKRAAGKKGARTRQGPGAESEDLYDFVFIVAGEKEDGEEMEIGEVACGALDGSDPSCLGLPALEASQRFRSISTLELFTVPLSTEAALTLCHLLSSWVSLESLTLSYNGLGSNIFRLLDSLRALSGQAGCRLRALHLSDLFSPLPILELTRAIVRALPLLRVLSIRVDHPSQRDNPGVPGNAGPPSHIIGDEEIPENCLEQLEMGFPRGAQPAPLLCSVLKASGSLQQLSLDSATFASPQDFGLVLQTLKEYNLALKRLSFHDMNLADCQSEVLFLLQNLTLQEITFSFCRLFEKRPAQFLPEMVAAMKGNSTLKGLRLPGNRLGGGQTLGRERGKELGL

SEQ ID NO: 66099 - protein, 418 aa, Homo sapiens
MGEMGRLKSYENQKPPFDAKNPFLAAVTTNRKLNQGTERHLMHLELDISDSKIRYESGDHVAVYPANDSALVNQLGKILGADLDVVMSLNNLDEESNKKHPFPCPTSYRTALTYYLDITNPPRTNVLYELAQYASEPSEQELLRKMASSSGEGKELYLSWVVEARRHILAILQDCPSLRPPIDHLCELLPRLQARYYSIASSSKVHPNSVHICAVVVEYETKAGRINKGVATNWLRAKEPAGENGGRALVPMFVRKSQFRLPFKATTPVIMVGPGTGVAPFIGFIQERAWLRQQGKEVGETLLYYGCRRSDEDYLYREELAQFHRDGALTQLNVAFSREQSHKVYVQHLLKQDREHLWKLIEGGAHIYVCGDARNMARDVQNTFYDIVAELGAMEHAQAVDYIKKLMTKGRYSLDVWS

SEQ ID NO: 66100 - protein, 680 aa, Homo sapiens
MMEEEELEFVEELEAVLQLTPEVQLAIEQVFPSQDPLDRADFNAVEYINTLFPTEQSLANIDEVVNKIRLKIRRLDDNIRTVVRGQTNVGQDGRQALEEAQKAIQQLFGKIKDIKDKAEKSEQMVKEITRDIKQLDHAKRHLTTSITTLNHLHMLAGGVDSLEAMTRRRQYGEVANLLQGVMNVLEHFHKYMGIPQIRQLSERVKAAQTELGQQILADFEEAFPSQGTKRPGGPSNVLRDACLVANILDPRIKQEIIKKFIKQHLSEYLVLFQENQDVAWLDKIDRRYAWIKRQLVDYEEKYGRMFPREWCMAERIAVEFCHVTRAELAKIMRTRAKEIEVKLLLFAIQRTTNFEGFLAKRFSGCTLTDGTLKKLESPPPSTNPFLEDEPTPEMEELATEKGDLDQPKKPKAPDNPFHGIVSKCFEPHLYVYIESQDKNLGELIDRFVADFKAQGPPKPNTDEGGAVLPSCADLFVYYKKCMVQCSQLSTGEPMIALTTIFQKYLREYAWKILSGNLPKTTTSSGGLTISSLLKEKEGSEVAKFTLEELCLICNILSTAEYCLATTQQLEEKLKEKVDVSLIERINLTGEMDTFSTVISSSIQLLVQDLDAACDPALTAMSKMQWQNVEHVGDQSPYVTSVILHIKQNVPIIRDNLASTRKYFTQFCVKFAKSTALSSVI

SEQ ID NO: 66101 - protein, 69 aa, Homo sapiens
MATLVELPDSVLLEIFSYLPVRDRIRISRCDLKSCGTSFEGTWHPGSIPCGWVATCSLAPRPPSCPLLC

SEQ ID NO: 66102 - protein, 126 aa, Homo sapiens
MDDEDGRCLLDVICDPQALNDFLHGSEKLDSDDLLDNPGEAQSAFYEGPGLHVQEASGNHLNPEPNQPAPSVDLDFLEDDILGSPATGGGGGGSGGADQPCDILQQSLQEANITEQTLEAEAELDL

SEQ ID NO: 66103 - protein, 92 aa, Homo sapiens
MNPGFDLSRRNPQEDFELIQRIGSGTYGDVYKARNVNTGELAAIKVIKLEPGEDFAVVQQEIIMMKDCKHPNIVAYFGSYLRYTVCFPFEKQ

SEQ ID NO: 66104 - protein, 1064 aa, Homo sapiens
RLSDAVKQLQAAERGDAQQRLGQSRLITEEANRTTMEVQQATAPMANNLTNWSQNLQHFDSSAYNTAVNSARDAVRNLTEVVPQLLDQLRTVEQKRPASNVSASIQRIRELIAQTRSVASKIQVSMMFDGQSAVEVHSRTSMDDLKAFTSLSLYMKPPVKRPELTETADQFILYLGSKNAKKEYMGLAIKNDNLVYVYNLGTKDVEIPLDSKPVSSWPAYFSIVKIERVGKHGKVFLTVPSLSSTAEEKFIKKGEFSGDDSLLDLDPEDTVFYVGGVPSNFKLPTSLNLPGFVGCLELATLNNDVISLYNFKHIYNMDPSTSVPCARDKLAFTQSRAASYFFDGSGYAVVRDITRRGKFGQVTRFDIEVRTPADNGLILLMVNGSMFFRLEMRNGYLHVFYDFGFSGGPVHLEDTLKKAQINDAKYHEISIIYHNDKKMILVVDRRHVKSMDNEKMKIPFTDIYIGGAPPEILQSRALRAHLPLDINFRGCMKGFQFQKKDFNLLEQTETLGVGYGCPEDSLISRRAYFNGQSFIASIQKISFFDGFEGGFNFRTLQPNGLLFYYASGSDVFSISLDNGTVIMDVKGIKVQSVDKQYNDGLSHFVISSVSPTSNAYFTRVDRDVEVEDFQRYTEKVHTSLYECPIESSPLFLLHKKGKNLSKPKASQNKKGGKSKDAPSWDPVALKLPERNTPRNSHCHLSNSPRAIEHAYQYGGTANSRQEFEHLKGDFGAKSQFSIRLRTRSSHGMIFYVSDQEENDFMTLFLAHGRLVYMFNVGHKKLKIRSQEKYNDGLWHDVIFIRERSSGRLVIDGLRVLEESLPPTEATWKIKGPIYLGGVAPGKAVKNVQINSIYSFSGCLSNLQLNGASITSASQTFSVTPCFEGPMETGTYFSTEGGYVVLDESFNIGLKFEIAFEVRPRSSSGTLVHGHSVNGEYLNVHMKNGQVIVKVNNGIRDFSTSVTPKQSLCDGRWHRITVIRDSNVVQLDVDSEVNHVVGPLNPKPIDHREPVFVGGVPESLLTPRLAPSKPFTGCIRHFVIDGHPVSFSKAALVSGAVSINSCPAA

SEQ ID NO: 66105 - protein, 148 aa, Homo sapiens
MAGNKMFCRPRRQRLSHSRRAELQFPVSHLERCLRESQHARHLSSTTPVFLAGVLEYLTANILEKVGKEVKNSCRLCITPEHVKRALQKDEQLRWILELEDDTHSQVEEMPQSEEEEEEEEEKEEEMVVLVVMGGRRRRRRRRRRKDS

SEQ ID NO: 66106 - protein, 82 aa, Homo sapiens
MEPIVLQSVPHDRYNKTCYICDEQGRESKAATGACMTCNKHGCRQAFHVTCAQFAGLLCEEEGNGADNVQYCGYCKYHFSKL

SEQ ID NO: 66107 - protein, 184 aa, Homo sapiens
MALSRVCWARSAVWGSAVTPGHFVTRRLQLGRSGLAWGAPRSSKLHLSPKADVKNLMSYVVTKTKAINGKYHRFLGRHFPRFYVLYTIFMKGLRWRLTDLCTKIQRGTHPAIHDILALRECFSNHPLGMNQLQALHVKALSRAMLLTSYLPPPLLRHRLKTHTTVIHQLDKALAKLGIGQLTAQ

SEQ ID NO: 66108 - protein, 28 aa, Homo sapiens
  MOD_RES (1)..(1): Any amino acid
XQAVQQQEVYGMMPRDETDSKTASPWKF

SEQ ID NO: 66109 - protein, 173 aa, Homo sapiens
MRLSALLALASKVTLPPHYRYGMSPPGSVADKRKNPPWIRRRPVVVEPISDEDWYLFCGDTVEILEGKDAGKQGKVVQVIRQRNWVVVGGLNTHYRYIGKTMDYRGTMIPSEAPLLHRQVKLVDPMDRKPTEIEWRFTEAGERVRVSTRSGRIIPKPEFPRADGIVPETWIDG

SEQ ID NO: 66110 - protein, 66 aa, Homo sapiens
MNRRRKFLLASVLALQNSSFIYPSCQKCFSRIILVSKRILKTNLDKVQMPVTSYSNALTTKEKPKH

SEQ ID NO: 66111 - protein, 161 aa, Homo sapiens
EEQPDGLSFPEGQEEPDEHQVATVTLEVLLLRTELSLLLQNTHPRQQALEQLLEDKVEDDMLQLSEFDPLLREIAPGPLTTPSVPADSDVAWSFLERCSISPALQAPLLVPASSVVLPQAHCTAHPVNRPCVQPVTTCSMDTHPVLITSARPCLGSCRVPT

SEQ ID NO: 66112 - protein, 423 aa, Homo sapiens
MEKSGPSSTISEQQLQRQEGWINTKTDLAEQSLISSEKWLQLHGLKSNKLTLKQILSQIGFPHCEDYVASLGRPVASRYADGLFPQLYRAEDGRVYNLTAKSELIYQFVEHLTQAVESYKQRMDWLTSKSRQIFGVILEQCVTIVLDFGGILEGELDLCREALTMVLQEQVAHITEFNIIRVSQEPVKWQENATPVTEQSIATAISWVEKLTVELTVSEAGRLDALLEAGRDKTIESIYYFVVGDVPEESKELLLQRALEIPCPVYTVSFNARGEGTIAFLKDLSAKTHSRFHAFAERTECVEFPAFSTKDGDNVMTWNSRKLKGKLPPGAGVREDVFLVWQEMEEACSTLAQIQRLVAEPPKPDVATVDCGAVPSFESSGKIVFCLCDMLACPAQSQKQPLLRLHRIQKTPGTLRHGCRNMA

SEQ ID NO: 66113 - protein, 188 aa, Homo sapiens
AYDAHTSENAPSLLIHFINMFLFSYPESGYSMLYSGQKGIQCFLVVVALLCVPWMLLFKPLVLRRQYLRRKHLGTLNFGGIRVGNGPTEEDAEIIQHDQLSTHSEDADEPSEDEVFDFGDTMVHQAIHTIEYCLGCISNTASYLRLWALSLAHARLSSRINSTAGPVSSSYPSPSSIFGKGSLKSESL

SEQ ID NO: 66114 - protein, 330 aa, Homo sapiens
EEDVDLGYVEDGTPCGPQMMCLEHRCLPVASFNFSTCLSSKEGTICSGNGVCSNELKCVCNRHWIGSDCNTYFPHNDDAKTGITLSGNGVAGTNIIIGIIAGTILVLALILGITAWGYKNYREQRQLPQGDYVKKPGDGDSFYSDIPPGVSTNSASSSKKRSNGLSHSWSERIPDTKHISDICENGRPRSNSWQGNLGGNKKKIRGKRFRPRSNSTEREPQAPEPGHSLAQTVPSQGISPGGSDSPQTGSLDHRYLNPWFKRDYNVAKWVEDVNKNTEGPYFRTLSPAKSPSSSTGSIASSRKYPYPMPPLPDEDKKVNRQSARLWETSI

SEQ ID NO: 66115 - protein, 142 aa, Homo sapiens
MSVIFFACVVRVRDGLPLSASTDFYHTQDFLEWRRRLKSLALRLAQYPGRGSAEGCDFSIHFSSFGDVACMAICSCQCPAAMAFCFLETLWWEFTASYDTTCIGLASRPYAFLEFDSIIQKVKWHFNYVSSSQMECSLEKIQ

SEQ ID NO: 66116 - protein, 620 aa, Homo sapiens
MDRVLLRWISLFWLTAMVEGLQVTVPDKKKVAMLFQPTVLRCHFSTSSHQPAVVQWKFKSYCQDRMGESLGMSSTRAQSLSKRNLEWDPYLDCLDSRRTVRVVASKQGSTVTLGDFYRGREITIVHDADLQIGKLMWGDSGLYYCIITTPDDLEGKNEDSVELLVLEWVFVGLVLLGVFLFFVLVGICWCQCCPHSCCCYVRCPCCPDSCCCPQALYEAGKAAKAGYPPSVSGVPGPYSIPSVPLGGAPSSGMLMDKPHPPPLAPSDSTGGSHSVRKGYRIQADKERDSMKVLYYVEKELAQFDPARRMRGRYNNTISELSSLHEEDSNFRQSFHQMRSKQFPVSGDLESNPDYWSGVMGGSSGASRGPSAMEYNKEDRESFRHSQPRSKSEMLSRKNFATGVPAVSMDELAAFADSYGQRPRRADGNSHEARGGSRFERSESRAHSGFYQDDSLEEYYGQRSRSREPLTDADRGWAFSPARRRPAEDAHLPRLVSRTPGTAPKYDHSYLGSARERQARPEGASRGGSLETPSKRSAQLGPRSASYYAWSPPGTYKAGSSQDDQEDASDDALPPYSELELTRGPSYRGRDLPYHSNSEKKRKKEPAKKTNDFPTRMSLVV

SEQ ID NO: 66117 - protein, 76 aa, Homo sapiens
MADQRMDISSTISDFMSPGPTDLLSSSLGTSGVDCNRKRKGSSTDYQESMDTDKDDPHGRLEYTEHQGRIKNAREA

SEQ ID NO: 66118 - protein, 185 aa, Homo sapiens
MAVPGSFPLLVEGSWGPDPPKNLNTKLQMYFQSPKRSGGGECEVRQDPRSPSRFLVFFYPEDVRQKVLERKNHELVWQGKGTFKLTVQLPATPDEIDHVFEEELLTKESKTKEDVKEPDTIRFVDDCTKHHSIKQLQLSPRLLEVTNTIRVENLPPGADDYSLKLFFENPYNGGGRVANVEYFPE

SEQ ID NO: 66119 - protein, 248 aa, Homo sapiens
  MOD_RES (1)..(1): Any amino acid
XAGKKNVLSSLAVYAEDSEPESDGEAGIEAVGSAAEEKGGLVSDAYGEDDFSRLGGDEDGYEEEEDENSRQSEDDDSETEKPEADDPKDNTEAEKRDPQELVASFSERVRNMSPDEIKIPPEPPGRCSNHLQDKIQKLYERKIKEGMDMNYIIQRKKEFRNPSIYEKLIQFCAIDELGTNYPKDMFDPHGWSEDSYYEALAKAQKIEMDKLEKAKKERTKACCRDVSAAPGDRSCPSPVRAGTASSWV

SEQ ID NO: 66120 - protein, 18 aa, Homo sapiens
YNFNKFYFGSGTKLNVKP

SEQ ID NO: 66121 - protein, 241 aa, Homo sapiens
VIQMELDHERMSYLLYQMLCGIKHLHSAGIIHRDLKPSNIVVKSDCTLKILDFGLARTAGTSFMMTPYVVTRYYRAPEVILGMGYKENVDIWSVGCIMGEMVRHKILFPGRDYIDQWNKVIEQLGTPCPEFMKKLQPTVRNYVENRPKYAGLTFPKLFPDSLFPADSEHNKLKASQARDLLSKMLVIDPAKRISVDDALQHPYINVWYDPAEVEAPPPQIYDKQLDEREHTIEEWKAQVQQ

SEQ ID NO: 66122 - protein, 1316 aa, Homo sapiens
MSVLISQSVINYVEEENIPALKALLEKCKDVDERNECGQTPLMIAAEQGNLEIVKELIKNGANCNLEDLDNWTALISASKEGHVHIVEELLKCGVNLEHRDMGGWTALMWACYKGRTDVVELLLSHGANPSVTGLYSVYPIIWAAGRGHADIVHLLLQNGAKVNCSDKYGTTPLVWAARKGHLECVKHLLAMGADVDQEGANSMTALIVAVKGGYTQSVKEILKRNPNVNLTDKDGNTALMIASKEGHTEIVQDLLDAGTYVNIPDRSGDTVLIGAVRGGHVEIVRALLQKYADIDIRGQDNKTALYWAVEKGNATMVRDILQCNPDTEICTKDGETPLIKATKMRNIEVVELLLDKGAKVSAVDKKGDTPLHIAIRGRSRKLAELLLRNPKDGRLLYRPNKAGETPYNIDCSHQKSILTQIFGARHLSPTETDGDMLGYDLYSSALADILSEPTMQPPICVGLYAQWGSGKSFLLKKLEDEMKTFAGQQIEPLFQFSWLIVFLTLLLCGGLGLLFAFTVHPNLGIAVSLSFLALLYIFFIVIYFGGRREGESWNWAWVLSTRLARHIGYLELLLKLMFVNPPELPEQTTKALPVRFLFTDYNRLSSVGGETSLAEMIATLSDACEREFGFLATRLFRVFKTEDTQGKKKWKKTCCLPSFVIFLFIIGCIISGITLLAIFRVDPKHLTVNAVLISIASVVGLAFVLNCRTWWQVLDSLLNSQRKRLHNAASKLHKLKSEGFMKVLKCEVELMARMAKTIDSFTQNQTRLVVIIDGLDACEQDKVLQMLDTVRVLFSKGPFIAIFASDPHIIIKAINQNLNSVLRDSNINGHDYMRNIVHLPVFLNSRGLSNARKFLVTSATNGDVPCSDTTGIQEDADRRVSQNSLGEMTKLGSKTALNRRDTYRRRQMQRTITRQMSFDLTKLLVTEDWFSDISPQTMRRLLNIVSVTGRLLRANQISFNWDRLASWINLTEQWPYRTSWLILYLEETEGIPDQMTLKTIYERISKNIPTTKDVEPLLEIDGDIRNFEVFLSSRTPVLVARDVKVFLPCTVNLDPKLREIIADVRAAREQISIGGLAYPPLPLHEGPPRAPSGYSQPPSVCSSTSFNGPFAGGVVSPQPHSSYYSGMTGPQHPFYNRGSGPAPGPVVLLNSLNVDAVCEKLKQIEGLDQSMLPQYCTTIKKANINGRVLAQCNIDELKKEMNMNFGDWHLFRSTVLEMRNAESHVVPEDPRFLSESSSGPAPHGEPARRASHNELPHTELSSQTPYTLNFSFEELNTLGLDEGAPRHSNLSWQAHADTGRKGRNQWGYCSFAGAA

SEQ ID NO: 66123 - protein, 43 aa, Homo sapiens
MSTRKRRGGAINSRQAQKRTREATSTPEISLEAEPIELVETDC

SEQ ID NO: 66124 - protein, 50 aa, Homo sapiens
MAANLSRNGPALQEAYVRVVTEKSPTDWALFTYEGNSNDIRCCSCCRGPM

SEQ ID NO: 66125 - protein, 232 aa, Homo sapiens
METWEVSVSDDRAEQRTCLICGDRATGLHYGIISCEGCKGFFKRSICNKRVYRCSRDKNCVMSRKQRNRCQYCRLLKCLQMGMNRKAIREDGMPGGRNKSIGPVQISEEEIERIMSGQEFEEEANHWSNHGDSDHSSPGNRASESNQPSPGSTLSSSRSVELNGFMAFREQYMGMSVPPHYQYIPHLFSYSGHSPLLPQQARSLDPQSYSLIHQLLSAEDLEPLGTPMLIED

SEQ ID NO: 66126 - protein, 512 aa, Homo sapiens
MLLPLLLSSLLGGSQAMDGRFWIRVQESVMVPEGLCISVPCSFSYPRQDWTGSTPAYGYWFKAVTETTKGAPVATNHQSREVEMSTRGRFQLTGDPAKGNCSLVIRDAQMQDESQYFFRVERGSYVRYNFMNDGFFLKVTALTQKPDVYIPETLEPGQPVTVICVFNWAFEECPPPSFSWTGAALSSQGTKPTTSHFSVLSFTPRPQDHNTDLTCHVDFSRKGVSAQRTVRLRVAYAPRDLVISISRDNTPDPPENLRVMVSQANRTVLENLGNGTSLPVLEGQSLCLVCVTHSSPPARLSWTQRGQVLSPSQPSDPGVLELPRVQVEHEGEFTCHARHPLGSQHVSLSLSVHYKKGLISTAFSNGAFLGIGITALLFLCLALIIMKILPKRRTQTETPRPRFSRHSTILDYINVVPTAGPLAQKRNQKATPNSPRTPLPPGAPSPESKKNQKKQYQLPSFPEPKSSTQAPESQESQEELHYATLNFPGVRPRPEARMPKGTQADYAEVKFQ

SEQ ID NO: 66127 - protein, 82 aa, Homo sapiens
MASPDDPLRADHMVKEPVEDTDPSTLSFNMSDKYPIQDTELPKAEECDTITLNCPRNSDMKNQGEENGFPDSTGDPLPEDRG

SEQ ID NO: 66128 - protein, 208 aa, Homo sapiens
DVVGDSAVDEFEKQRPSRKQKSLGLLCQKFLARYPSYPLSTEKTTISLDEVAVSLGVERRRIYDIVNVLESLHLVSRVAKNQYGWHGRHSLPKTLRNLQRLGEEQKYEEQMAYLQQKELDLIDYKFGERKKDGDPDSQEQQLLDFSEPDCPSSSANSRKDKSLRIMSQKFVMLFLVSKTKIVTLDVAAKILIEESQDAPDHSKFKRWR

SEQ ID NO: 66129 - protein, 116 aa, Homo sapiens
MVALCSLQHLGSSDPRALPTLPTATSGQRPAKRRRKSPAMAALTRDPQFQKLQQWYREHRSELNLRRLFDANKDRFNHFSLTLNTNHGHILVDYSKNLVTEDVMRMLVDLAKSRGV

SEQ ID NO: 66130 - protein, 133 aa, Homo sapiens
EAYEAGLIGKNACGSGYDFDVFVVRGAGAYICGEETALIESIEGKQGKPRLKPPFPADVGVFGCPTTVANVETVAVSPTICRRGGTWFAGFGRERNSGTKLFNISGHVNHPCTVEEEMSVPLKELIEKHAVCV

SEQ ID NO: 66131 - protein, 436 aa, Homo sapiens
MTKEEAMIAYVEEMKKIIETMPMTEKVEELLRVIGPFYEIVEDKKSGRSSDITSVRLEKISKCLEDLGNVLTSTPNAKTVNGKAESSDSGAESEEEEAQEEVKGAEQSDNDKKMMKKSADHKNLEVIVTNGYDKDGFVQDIQNDIHASSSLNGRSTEEVKPIDENLGQTGKSAVCIHQDINDDHVEDVTGIQHLTSDSDSEVYCDSMEQFGQEESLDSFTSNNGPFQYYLGGHSSQPMENSGFREDIQVPPGNGNIGNMQVVAVEGKGEVKHGGEDGRNNSGAPHREKRGGETDEFSNVRRGRGHRMQHLSEGTKGRQVGSGGDGERWGSDRGSRGSLNEQIALVLMRLQEDMQNVLQRLQKLETLTALQAKSSTSTLQTAPQPTSQRPSWWPFEMSPGVLTFAIIWPFIAQWLVYLYYQRRRRCSSDIPPESTAH

SEQ ID NO: 66132 - protein, 147 aa, Homo sapiens
MLLRAAWRRAAVAVTAAPGPKPAAPTRGLRLRVGDRAPQSAVPADTAAAPEVGPVLRPLYMDVQATTPLDPRVLDAMLPYLINYYGNPHSRTHAYGWESEAAMERARQQVASLIGADPREIIFTSGATESNNIAIKMESHPVAQARV

SEQ ID NO: 66133 - protein, 108 aa, Homo sapiens
MPSRLRKTRKLRGHVSHGHGRIGKHRKHPGGRGNAGGLHHHRINFDKYHPGYFGKVGMKHYHLKRNQSFCPTVNLDKLWTLVSEQTRVNAAKNKTGAAPIIDVVRSVS

SEQ ID NO: 66134 - protein, 139 aa, Homo sapiens
MEAEETMECLQEFPEHHKMILDRLNEQREQDRFTDITLIVDGHHFKAHKAVLAACSKFFYKFFQEFTQEPLVEIEGVSKMAFRHLIEFTYTAKLMIQGEEEANDVWKAAEFLQMLEAIKALEVRNKENSAPLEENTTGK

SEQ ID NO: 66135 - protein, 242 aa, Homo sapiens
  MOD_RES (1)..(1): Any amino acid
XHTDCLVSALHHCFDGPTGELAHAFFPPHGGIHFDDSEYWVLGPTRYSWKKGVWLTDLVHVAAHEIGHALGLMHSQHGRALMHLNATLRGWKALSQDELWGLHRLYGESLCRAGGRGPGGPEPGRAPHAPDRMPRQAVRVRVLGAEGLLRRSPAAHEEALPQQLRLLLRIPLPHGGHHPTAPQDQNQAGARGQERDLPLRPEDPPQERESVLVQGPGAPGVLLPRLPGPGRGAPEHHRQRRQ

SEQ ID NO: 66136 - protein, 168 aa, Homo sapiens
MAGLTAAAPRPGVLLLLLSILHPSRPGGVPGAIPGGVPGGVFYPGAGLGALGGGALGPGGKPLKPGVGPFGGPQPGVPLGYPIKAPKLPGYGPGGVAGAAGKAGYPTGTGVGPQAAAAAAAKAAAKFGAGAAGVLPGVGGAGVPGVPGAIPGIGGIAGVGTPAAAAAA

SEQ ID NO: 66137 - protein, 66 aa, Homo sapiens
  MOD_RES (1)..(1): Any amino acid
XFVQTYSLRAFEKPPQVQTQALRDFEKHLNDLKKENFSLKLRIYFLEERMQQKYEASREDIYKREN

SEQ ID NO: 66138 - protein, 178 aa, Homo sapiens
MAFSKGFRIYHKLDPPPFSLIVETRHKEECLMFESGAVAVLSSAEKEAIKGTYSKVLDAYGLLGVLRLNLGDTMLHYLVLVTGCMSVGKIQESEVFRVTSTEFISLRIDSSDEDRISEVRKVLNSGNFYFAWSASGISLDLSLNAHRSMQEQTTDNRFFWNQSLHLHLKHYGVNCDDW

SEQ ID NO: 66139 - protein, 328 aa, Homo sapiens
MRAVLSQKTTPLPRYLWPGHLSGPRRLTWSWCSDHRTPTCRELGSPHPTPCTGPARGWPRRGGGPCGFTSAGHVLCGYPLCLLSGPIQGCGTGLGDSSMAFLSRTSPVAAASFQSRQEARGSILLQSCQLPPQWLSTEAWTGEWKQPHGGALTSRLQPRRPPGRGHHQHHHHHPRRGTRRGWWSCPPRSGSCSPSSAPMPPSTAPSAWSAPAGTASRRRPGGCCPWEPWSRSAGSWGSSLSVTGTARSSWPSLCTRSASCSRWSPCVTGTHVGRVRSSAIWSCWTSLPGRTLTPCTTSTSAKAEPPSPPLSPATSPPSTWTGRSVCRG

SEQ ID NO: 66140 - protein, 115 aa, Homo sapiens
  MOD_RES (1)..(1): Any amino acid
XSQRNKDIPNMLDVLKDMNKVKLRAIERSPGGRPIHKRKRQNSHWDPVSLISHALKQKFAFQEDDSFEKENRSWESSPFSSPETSRVSYTNVKLIFQFFSDVLFMLQLCVQVLLK

SEQ ID NO: 66141 - protein, 74 aa, Homo sapiens
GAGRTERADRWPGAARRTAAEGFPQARTPDLCWYWWPCRVEKVTGRPGPRCLLDPGRSPTPEDLKEKKEVVEEA

SEQ ID NO: 66142 - protein, 150 aa, Homo sapiens
MCSEIILRQEVLKDGFHRDLLIKVKFGESIEDLHTCRLLIKQDIPAGLYVDPYELASLRERNITEAVMVSENFDIEAPNYLSKESEVLIYARRDSQCIDCFQAFLPVHCRYHRPHSEDGEASIVVNNPDLLMFCDQGEGCKCFLRVETSE

SEQ ID NO: 66143 - protein, 695 aa, Homo sapiens
MVKLAKAGKNQGDPKKMAPPPKEVEEDSEDEEMSEDEEDDSSGEEVVIPQKKGKKAAATSAKKVVVSPTKKVAVATPAKKAAVTPGKKAAATPAKKTVTPAKAVTTPGKKGATPGKALVATPGKKGAAIPAKGAKNGKNAKKEDSDEEEDDDSEEDEEDDEDEDEDEDEIEPAAMKAAAAAPASEDEDDEDDEDDEDDDDDEEDDSEEEAMETTPAKGKKAAKVVPVKAKNVAEDEDEEEDDEDEDDDDDEDDEDDDDEDDEEEEEEEEEEPVKEAPGKRKKEMAKQKAAPEAKKQKVEGTEPTTAFNLFVGNLNFNKSAPELKTGISDVFAKNDLAVVDVRIGMTRKFGYVDFESAEDLEKALELTGLKVFGNEIKLEKPKGKDSKKVTQDELKEVFEDAAEIRLVSKDGKSKGIAYIEFKTEADAEKTFEEKQGTEIDGRSISLYYTGEKGQNQDYRGGKNSTWSGESKTLVLSNLSYSATEETLQEVFEKATFIKVPQNQNGKSKGYAFIEFASFEDAKEALNSCNKREIEGRAIRLELQGPRGSPNARSQPSKTLFVKGLSEDTTEETLKESFDGSVRARIVTDRETGSSKGFGFVDFNSEEDAKAAKEAMEDGEIDGNKVTLDWAKPKGEGGFGGRGGGRGGFGGRGGGRGGRGGFGGRGRGGFGGRGGFRGGRGGGGDHKPQGKKTKFE

SEQ ID NO: 66144 - protein, 600 aa, Homo sapiens
MLDFPQHVSSDKEVRAASTEADKRLSRFDIEMSMRGDIFERIVHLQETCDLGKIKPEARRYLEKSIKMGKRNGLHLPEQVQNEIKSMKKRMSELCIDFNKNLNEDDTFLVFSKAELGALPDDFIDSLEKTDDDKYKITLKYPHYFPVMKKCCIPETRRRMEMAFNTRCKEENTIILQQLLPLRTKVAKLLGYSTHADFVLEMNTAKSTSRVTAFLDDLSQKLKPLGEAEREFILNLKKKECKDRGFEYDGKINAWDLYYYMTQTEELKYSIDQEFLKEYFPIEVVTEGLLNTYQELLGLSFEQMTDAHVWNKSVTLYTVKDKATGEVLGQFYLDLYPREGKYNHAACFGLQPGCLLPDGSRMMAVAALVVNFSQPVAGRPSLLRHDEVRTYFHEFGHVMHQICAQTDFARFSGTNVETDFVEVPSQMLENWVWDVDSLRRLSKHYKDGSPIADDLLEKLVASRLVNTGLLTLRQIVLSKVDQSLHTNTSLDAASEYAKYCSEILGVAATPGTNMPATFGHLAGGYDGQYYGYLWSEVFSMDMFYSCFKKEGIMNPEVGMKYRNLILKPGGSLDGMDMLHNFLKREPNQKAFLMSRGLHAP

SEQ ID NO: 66145 - protein, 129 aa, Homo sapiens
MEPAGERFPEQRKYPELVLDTELDREEQAELRLTLTAVDGGSPPRSGTVQILILVLDANDNAPEFVQALYEVQVPENSPVGSLVVKVSARDLDTGTNGEISYSLYYSSQEIDKPFELSSLSGEIRLIKK

SEQ ID NO: 66146 - protein, 43 aa, Homo sapiens
MWATLPLLCAGAWLLGVPVCGAAELCVNSLEKFHFKSWMSKWH

SEQ ID NO: 66147 - protein, 117 aa, Homo sapiens
QDTAGKHSHHHRPLGLRVPPGGGTHAAAVHPALVHVPQEHQGQRGEGLSLPRHLHDDRCQPGGRCAASWVSPKDDLRDMFYKILHGFKDQVGEDNWQQFSEQFPPLLKERLAAFYGV

SEQ ID NO: 66148 - protein, 130 aa, Homo sapiens
MASSNTVLMRLVASAYSIAQKAGMIVRRVIAEGDLGIVEKTCATDLQTKADRLAQMSICSSLARKFPKLTIIGEEDLPSEEVDQELIEDSQWEEILKQPCPSQYSAIKEEDLVVWVDPLDGTKEYTEGLL

SEQ ID NO: 66149 - protein, 90 aa, Homo sapiens
MRKQGVSSKRLQSSGRSQSKGRRGASLAREPEVEEEMEKSALGGGKLPRGSWRSSPGRIQSLKERKGLELEVVAKTFLLGPFQFVRNSLA

SEQ ID NO: 66150 - protein, 222 aa, Homo sapiens
MLRRALLCLAVAALVRADAPEEEDHVLVLRKSNFAEALAAHKYLLVEFYAPWCGHCKALAPEYAKAAGKLKAEGSEIRLAKVDATEESDLAQQYGVRGYPTIKFFRNGDTASPKEYTAGREADDIVNWLKKRTGPAATTLPDGAAAESLVESSEVAVIGFFKDVESDSAKQFLQAAEAIDDIPFGITSNSDVFSKYQLDKDGVVLFKKRRGFTVLARVVSNS

SEQ ID NO: 66151 - protein, 84 aa, Homo sapiens
  MOD_RES (1)..(1): Any amino acid
XPLPHADASRARDVPGAEAAPGVHGLAATAGCLCQGEPVGPHVAVPVQERIPFFKFCYQCGRSIGVRLLPCPRCYGILTCSKYC

SEQ ID NO: 66152 - protein, 127 aa, Homo sapiens
MDFNMKKLASDAGIFFTRAVQFTEEKFGQAEKTELDAHFENLLARADSTKNWTEKILRQTEVLLQPNPSARVEEFLYEKLDRKVPSRVTNGELLAQYMADAASELGPTTPYDRILLCHPDWSAVVQS

SEQ ID NO: 66153 - protein, 227 aa, Homo sapiens
MLQSMLISGQSIPDELVIKLMLEKLNSPEVCHFGYIITEIPSLSQDAMTTLQQIELIKNLNLKPDVIINIKCPDYDLCQRISGQRQHNNTGYIYSRDQWDPEVIENHRKKKKEAQKDGKGEEEEEEEEQEEEEAFIAEMQMVAEILHHLVQRPEDYLENVENIVKLYKETILQTLEEVMAEHNPQYLIELNGNKPAEELFMIVMDRLKYLNLKRAAILTKLQGAEEE

SEQ ID NO: 66154 - protein, 22 aa, Homo sapiens
MNRPAPVEISYENMRFLITHNP

SEQ ID NO: 66155 - protein, 125 aa, Homo sapiens
MSVDPLSSKALKIKRELSENTPHLSDEALMGLSVRELNRHLRGLSAEEVTRLKQRRRTLKNRGYAASCRVKRVCQKEELQKQKSELEREVDKLARENAAMRLELDALRGKCEALQGFARSVAAAR

SEQ ID NO: 66156 - protein, 41 aa, Homo sapiens
MGDRNCRENHASMPGKVSGSLEVMKSMFKVLTDLVPGFSGL

SEQ ID NO: 66157 - protein, 99 aa, Homo sapiens
MSGFNFGGTGAPTGGFTFGTAKTATTTPATGFSFSTSGTGGFNFGAPFQPATSTPSTGLFSLATQTPATQTTGFTFGTATLASGGTGFSLGIGASKLNL

SEQ ID NO: 66158 - protein, 68 aa, Homo sapiens
MVYKTLFALCILTAGSIAAITVTVIAVVLLVFGVAAYLKIRHSSYGRLLDDHDYGSWGNYNNPLYDDS

SEQ ID NO: 66159 - protein, 94 aa, Homo sapiens
MVLSLILCCLSFILFMFQLYTMRRGGLFYATGLCQLCTSVAVFTGALIYAIHAEEILEKHPRGGSFGYCFALAWVAFPLALVSGIIYIHLRKRE

SEQ ID NO: 66160 - protein, 414 aa, Homo sapiens
MVFHLRTRYEQANCDCLNGGTCVSNKYFSNIHWCNCPKKFGGQHCEIDKSKTCYEGNGHFYRGKASTDTMGRPCLPWNSATVLQQTYHAHRSDALQLGLGKHNYCRNPDNRRRPWCYVQVGLKLLVQECMVHDCADGKKPSSPPEELKFQCGQKTLRPRFKIIGGEFTTIENQPWFAAIYRRHRGGSVTYVCGGSLISPCWVISATHCFIDYPKKEDYIVYLGRSRLNSNTQGEMKFEVENLILHKDYSADTLAHHNDIALLKIRSKEGRCAQPSRTIQTICLPSMYNDPQFGTSCEITGFGKENSTDYLYPEQLKMTVVKLISHRECQQPHYYGSEVTTKMLCAADPQWKTDSCQGDSGGPLVCSLQGRMTLTGIVSWGRGCALKDKPGVYTRVSHFLPWIRSHTKEENGLAL

SEQ ID NO: 66161 - protein, 163 aa, Homo sapiens
MEGDDCEFRYGDGTNEAQDNDFPTVERSRLQEMLSLLGLETYQVQKLSLQDSLQISFDSMKNWAPQVPKDLPWNFLRKLQALNADARNTTMVLDVLPDARPVEKESQMEEEIIYWDPADDLAADIYSFSELPTPDTPVNPLDLLCALLLSSDSFLQQEIALKM

SEQ ID NO: 66162 - protein, 136 aa, Homo sapiens
MWQLWASLCCLLVLANARSRPSFHPLSDELVNYVNKRNTTWQAGHNFYNVDMSYLKRLCGTFLGGPKPPQRVMFTEDLKLPASFDAREQWPQCPTIKEIRDQGSCGSCWAFGAVEAISDRICIHTNAHVSVEVSAE

SEQ ID NO: 66163 - protein, 92 aa, Homo sapiens
MFGCLVAGRLVQTAAQQVAEDKFVFDLPDYESINHVVVFMLGTIPFPEGMGGSVYFSYPDSNGMPVWQLLGFVTNGKPSAIFKISGLKSGNY

SEQ ID NO: 66164 - protein, 134 aa, Homo sapiens
MDAQCSAKVNARKRRKEAPGPNGATEEDGVPSKVQRCAVGLRQPAPFSDEIEVDFSKPYVRVTMEEASRGTPCERPVRVYADGIFDLFHSGHARALMQAKNLFPNTYLIVGDFFPVGEDGCSPKQWEKMGEVGG

SEQ ID NO: 66165 - protein, 39 aa, Homo sapiens
MAASLRLLGAASGLRYWSRRLRPAAGSFAAGSIFPSRCC

SEQ ID NO: 66166 - protein, 91 aa, Homo sapiens
MVPFDQKSGGKGGEDESVILKSCTRRKTDSIEKRFCFDVEAVDRPGVITMQALSEEDRRLWMEAMDGREPVYNSNKDSQSEGTAQLDSIGF

SEQ ID NO: 66167 - protein, 116 aa, Homo sapiens
MLGITSCSDQQAKEGEGLEGSSTGSSSGNHGGSGGGNGHKPGCEKPGNEARGSGESGIQGQGSSWGSGGGDAVGGVNTVNSETSPGMFNFDTFWKNFKSKLGFINWDAINKDQRSS

SEQ ID NO: 66168 - protein, 184 aa, Homo sapiens
MAAERGAGQQQSQEMMEVDRRVESEESGDEEGKKHSSGIVADLSEQSLKDGEERGEEDPEEEHELPVDMETINLDRDAEISALFQDVDLNHYRIGKIEGFEVLKKVKTLCLRQNLIKCIENLEELQSLRELDLYDNQIKKIENLEALTELEILDISFNLLRNIEGVDKLTRLKKLFLVNNKISK

SEQ ID NO: 66169 - protein, 118 aa, Homo sapiens
  MOD_RES (1)..(1): Any amino acid
XIKIYSLSSQPIDHEGIKSKLSDRSPDIDNYSEEEEESFSSEQEGSDDPLHGQDLFYEDEDLRKVKKTRRKLTSTSAITRLHPRPRSYTGIWPVFLTGFECQGQRPSPPVFVSSHSSS

SEQ ID NO: 66170 - protein, 28 aa, Homo sapiens
MAHSEEAALLPGNHVPNGCAADPKASRE

SEQ ID NO: 66171 - protein, 109 aa, Homo sapiens
MILGIGSSPHLLWTLEGTHIWSLLGDASHTDRLPEAGAGKLLSEVPVAAGKLPFSRMPICEHMVESPTCSQMSNLVCGTDGLTYTNECQLCLARIKTKQDIQIMKDGKC

SEQ ID NO: 66172 - protein, 133 aa, Homo sapiens
MNEVSVIKEGWLHKRGEYIKTWRPRYFLLKSDGSFIGYKERPEAPDQTLPPLNNFSVAECQLMKTERPRPNTFVIRCLQWTTVIERTFHVDSPDEREEWMRAIQMVANSLKQRAPGEDPMDYKCGSPSDSSTT

SEQ ID NO: 66173 - protein, 200 aa, Homo sapiens
MPLGLLWLGLALLGALHAQAQDSTSDLIPAPPLSKVPLQQNFQDNQFQGKWYVVGLAGNAILREDKDPQKMYATIYELKEDKSYNVTSVLFREKAQKCDYWIRTFVPGCQPGEFTLGNIKSYPGLTSYLVRVVSTNYNQHAMVFFKKVSQNREYFKITLYGRTKELTSELKENFIRFSKSLGLPENHIVFPVPIDQCIDG

SEQ ID NO: 66174 - protein, 64 aa, Homo sapiens
MPVAVMAESAFSFKKLLDQCENQELEAPGGIATPPVYGQLLALYLLHNDINFYDLYLLNFIYNQ

SEQ ID NO: 66175 - protein, 66 aa, Homo sapiens
MACLSPSQLQKFQQDGFLVLEGFLSAEECVAMQQRIGEIVAEMDVPLHCRTEFSTQEEEQLRAQGS

SEQ ID NO: 66176 - protein, 65 aa, Homo sapiens
MLWFQGAIPAAIATAKRSGAVFVVFVAGDDEQSTQMAASWEDDKVTEASSNSFVAIKIDTKRCIC

SEQ ID NO: 66177 - protein, 189 aa, Homo sapiens
MFSCCFPTSRGCCFRNGGSESLFRQCRRRLIPHPRRLWPFVRRRTQVPQDSPGQALAGQATPEIPSGLPLHIVLVQEEIREPMEAQTHAPGPYADIAALAAPAVEPKPAWEEPPPERALEVEGAPAKDQPSQELPEIMVMLKSIKTRLGRRVPAAPPALRRNLLLQAWKCVCNWASRLFAPNVLPRTGS

SEQ ID NO: 66178 - protein, 214 aa, Homo sapiens
MRKIDLCLSSEGSEVILATSSDEKHPPENIIDGNPETFWTTTGMFPQEFIICFHKHVRIERLVIQSYFVQTLKIEKSTSKEPVDFEQWIEKDLVHTEGQLQNEEIVAGVGWRYLGSLQPPSPGFKRFSCLSLPRSWDYRHLPPHPANFFAFLVKMGFCHVGQAGLELQTSGDLPTSASQSAGITGVSHCARPGKANFKWRRVGKAFQKPPWYTR

SEQ ID NO: 66179 - protein, 40 aa, Homo sapiens
MQVPNSTGPDNATLQMLRNPAIAVALPVVYSLVAAVSIPG

SEQ ID NO: 66180 - protein, 138 aa, Homo sapiens
  MOD_RES (1)..(1): Any amino acid
XVMRGHPAALAPAWGALVISLEHRFYGLSIPAGGLEMAQLRFLSSRLALADVVSARLALSRLFNISSSSPWICFGGSYAGSLAAWARLKIVLHSLGQKCLSFSRAETVAQLRSTEPQLSGVGDRQWLYQTCTEFGFYV

SEQ ID NO: 66181 - protein, 808 aa, Homo sapiens
MSLLFSRCNSIVTVKKNKRHMAEVNASPLKHFVTAKKKINGIFEQLGAYIQESATFLEDTYRNAELDPVTTEEQVLDVKGYLSKVRGISEVLARRHMKVAFFGRTSNGKSTVINAMLWDKVLPSGIGHTTNCFLRVEGTDGHEAFLLTEGSEEKRSAKTVNQLAHALHQDKQLHAGSLVSVMWPNSKCPLLKDDLVLMDSPGIDVTTELDSWIDKFCLDADVFVLVANSESTLMQTEKHFFHKVSERLSRPNIFILNNRWDASASEPEYMEEVRRQHMERCTSFLVDELGVVDRSQAGDRIFFVSAKEVLNARIQKAQGMPEGGGALAEGFQVRMFEFQNFERRFEECISQSAVKTKFEQHTVRAKQIAEAVRLIMDSLHMAAREQQVYCEEMREERQDRLKFIDKQLELLAQDYKLRIKQITEEVERQVSTAMAEEIRRLSVLVDDYQMDFHPSPVVLKVYKNELHRHIEEGLGRNMSDRCSTAITNSLQTMQQDMIDGLKPLLPVSVRSQIDMLVPRQCFSLNYDLNCDKLCADFQEDIEFHFSLGWTMLVNRFLGPKNSRRALMGYNDQVQRPIPLTPANPSMPPLPQGSLTQEEFMVSMVTGLASLTSRTSMGILVVGGVVWKAVGWRLIALSFGLYGLLYVYERLTWTTKAKERAFKRQFVEHASEKLQLVISYTGSNCSHQVQQELSGTFAHLCQQVDVTRENLEQEIAAMNKKIEVLDSLQSKAKLLRFPGYTLGASPSSPRSHVLHQICHLLSSKSVDPAQFPHLHHNHQPGSRFLFLPCPRLSSPSCGCFKAAAKDFLR

SEQ ID NO: 66182 - protein, 108 aa, Homo sapiens
MLGLRPPLLALVGLLSLGCVLSQECTKFKVSSCRECIESGPGCTWCQKLGAALGPPAHATAASSPRRRSRVAPVCPRTEQGGQAPGGNYLGQAGFFPSPFWRFSAPLK

SEQ ID NO: 66183 - protein, 40 aa, Homo sapiens
MRPWTGSWRWIMLILFAWGTLLFYIGGHLVRDNDHPDHSS

SEQ ID NO: 66184 - protein, 176 aa, Homo sapiens
MMEELHSLDPRRQELLEARFTGVGVSKGPLNSESSNQSLCSVGSLSDKEVERRVEQPLYGLDGSAAKEATEEQSALPTLMSVMLAKPRLDTEQLAQRGAGLCFTFVSAQQNSPSSTGSGNTEHSCSSQKQISIQHRQTQSDLTIEKISALENSKNSDLEKKEGRIDDLLRANCDLR

SEQ ID NO: 66185 - protein, 20 aa, Homo sapiens
  MOD_RES (1)..(1): Any amino acid
XNSGNTPLVFGKGTRLSVIA

SEQ ID NO: 66186 - protein, 106 aa, Homo sapiens
MQIFVKTLTGKTITLEVEPSDTIENVKAKIQDKEGIPPDQQRLIFAGKQLEDGRTLSDYNIQKESTLHLVLRLRGGAKKRKKKSYTTPKKNKHKRKKVKLAVLKYY

SEQ ID NO: 66187 - protein, 693 aa, Homo sapiens
  MOD_RES (1)..(1): Any amino acid
XEVFASWKQQCLNRGKQDISERLISASLFLRFLCPAIMSPSLFNLMQEYPDDRTSRTLTLIAKVIQNLANFAKFGNKEEYMAFMNDFLEHEWGGMKRFLLEISNPDTISNTPGFDGYIDLGRELSVLHSLLWEVVSQLDKGENSFLQATVAKLGPLPRVLADITKSLTNPTPIQQQLRRFTEHNSSPNVSGSLSSGLQKIFEDPTDSDLHKLKSPSQDNTDSYFRGKTLLLVQQASSQSMTYSEKDERESSLPNGRSVSLMDLQDTHAAQVEHASVMLDVPIRLTGSQLSITQVASIKQLRETQSTPQSAPQVRRPLHPALNQPGGLQPLSFQNPVYHLNNPIPAMPKASIDSSLENLSTASSRSQSNSEDFKLSGPSNSSMEDFTKRSTQSEDFSRRHTVPDRHIPLALPRQNSTGQAQIRKVDQGGLGARAKAPPSLPHSASLRSTGSMSVVSAALVAEPVQNGSRSRQQSSSSRESPVPKVRAIQRQQTQQVQSPVDSATMSPVERTAAWVLNNGQYEEDVEETEQNLDEAKHAEKYEQEITKLKERLRVSSRRLEEYERRLLVQEQQMQKLLLEYKARLEDSEERLRRQQEEKDSQMKSIISRLMAVEEELKKDHAEMQAVIDAKQKIIDAQVINGDEIIQTGKTDRVPGFSQHQTDERADPSEGAVQHAGPQWHLPHQPHQAFHHGEW

SEQ ID NO: 66188 - protein, 522 aa, Homo sapiens
DNKHREKSSTREKREKYSKEKSNSFSDKGEERHKEKRHKEGFHFDDERHQSNVDRKEKSAKDEPRKRESQNGEHRNRGASSKRDGTSSQHAENLVRNHGKDKDSRRKHGHEEGSSVWWKLDQRPGGEETVEIEKEETDLENARADAYTASCEDDFEDYEDDFEVCDGDDDESSNEPESREKLEELPLAQKKEIQEIQRAINAENERIGELSLKLFQKRGRTEFEKEPRTDTNSSPSRASVCGIFVDFASASHRQKSRTQALKQKMRSTKLLRLIDLDFSFTFSLLDLPPVNEYDMYIRNFGKKNTKQAYVQCNEDNVERDIQTEEIETREVWTQHPGESTVVSGGSEQRDTSDAVVMPKIDTPRLCSFLRAACQVMAVLLEEDRLAAEPSWNLRAQDRALYFSDSSSQLNTSLPFLQSHVLLLEPFESIFTVCRNSARLSCRLGFERRLKAALLCDAERWLLDVPDRHVFHRWNPYLSKPPKPSSSSRTYLNVRPQKAELCAFTLFYSRRNVRFVLPHRFLG

SEQ ID NO: 66189 - protein, 79 aa, Homo sapiens
MAQEKMKLGFKSLPSSTTADGNILRRVNSAPLINGLGFNSQVLQADMLRIRTNRTTFRNRRSLEITSPTSVEQKPKDLF

SEQ ID NO: 66190 - protein, 73 aa, Homo sapiens
MGSALGRARRTLSGRPFQRAPCKTRRALSLSAALRNVTKAQGGCPKSLVLWGCRPKRPRKRRTSLKLAWRGHS

SEQ ID NO: 66191 - protein, 90 aa, Homo sapiens
MSAARESHPHGVKRSASPDDDKEHTGRLVIGDHKSTSHFRTGEEDKKINEELESQYQQSMDSKLSGRYRRHCGLGFSEVEDHDGEGDVAG

SEQ ID NO: 66192 - protein, 626 aa, Homo sapiens
  MOD_RES (1)..(1): Any amino acid
XGIGLGFMTAVCVIWFFTPPSAHKYHKLHKNLRHWNTRSLDIKEPEILKGWMNEIYNYDPETYHATLTHSVFVRLEGGTLRLSKPNKNISRRASYNEPKPEVTYISQKIYDLSDSKIYLVPKTLARKRIWNKKYPICIELGQQDDFMSKAQTDKETSEEKPPAEGSEDPKKPPRPQEGTRSSQRDQILYLFGRTGREKEEWFRRFILASKLKSEIKKSSGVSGGKPGLLPAHSRHNSPSGHLTHSRSSSKGSVEEIMSQPKQKELAGSVRQKMLLDYSVYMGRCVPQESRSPQRSPLQSAESSPTAGKKLPEVPPSEEEEQEAWVNALLGRIFWDFLGEKYWSDLVSKKIQMKLSKIKLPYFMNELTLTELDMGVAVPKILQAFKPYVDHQGLWIDLEMSYNGSFLMTLETKMNLTKLGKEPLVEALKVGEIGKEGPRAFCLADSDEESSSAGSSEEDDAPEPSGGDKQLLPGAEGYVGGHRTSKIMRFVDKITKSKYFQKATETEFIKKKIEEVSNTPLLLTVEVQECRGTLAVNIPPPPTDRVWYGFRKPPHVELKARPKLGEREVTLVHVTDWIEKKLEQEFQKVFVMPNMDDVYITIMHSAMDPRSTSCLLKDPPVEAADQP

SEQ ID NO: 66193 - protein, 249 aa, Homo sapiens
MRSLLLLSAFCLLEAALAAEVKKPAAAAAPGTAEKLSPKAATLAERSAGLAFSLYQAMAKDQAVENILVSPVVVASSLGLVSLGGKATTASQAKAVLSAEQLRDEEVHAGLGELLRSLSNSTARNVTWKLGSRLYGPSSVSFADDFVRSSKQHYNCEHSKINFRDKRSALQSINEWAAQTTDGKLPEVTKDVERTDGALLVNAMFFKPHWDEKFHHKMVDNRGFMVTRSYTVGVMMMHRTGLYNYYDDE

SEQ ID NO: 66194 - protein, 310 aa, Homo sapiens
  MOD_RES (1)..(1): Any amino acid
XTGAVLFLNHAHAPGTAPPPVVSTGAASANSALVTVERADSSHLSILIDPRCPDLTDSFARLESAQASVLQALTEHQAQPRLVGDQEQELLDTLADQLPRLLARASELQTECMGLRKGHGTLGQGLSALQSEQGRLIQLLSESQGHMAHLVNSVSDILDALQRDRGLGRPRNKADLQRAPARGTRPRGCATGSRPRDCLDVLLSGQQDDGVYSVFPTHYPAGFQVYCDMRTDGGGWTVFQRREDGSVNFFRGWDAYRDGFGRLTGEHWLGPLDWCTLSLALLVPVAPSPTPPHSFVNVLHPPVPGGPTLQ

SEQ ID NO: 66195 - protein, 151 aa, Homo sapiens
MDYERALRLLRLPQLPPGAQLVKSAWLSLCLQERRLVDVAGFSIFIPSSPSLMMKPVMGKKPRLVQLIWKPSSVATTPPPLREIVSLAQPLLSWISGSVHSPQARRRPITTSISQRSWKFWPKPTVFRETSGGPWAMPRPSMPSRASISLS

SEQ ID NO: 66196 - protein, 96 aa, Homo sapiens
MSQAGAQEAPIKKKRPPVKDEDLKGARGNLTKNQEIKSKTYQVMRECEQAGSAAPSVFSRTRTERFLSPAVSGAATLPHSPGPSAKGSAPAPWKHQ

SEQ ID NO: 66197 - protein, 408 aa, Homo sapiens
MCLFRVISFLFSHNTKTTSWLDPRLAKKAKPPEECKENELPYGWEKIDDPIYGTYYVDHINRRTQFENPVLEAKRKLQQHNMPHTELGTKPLQAPGFREKPLFTRDASQLKGTFLSTTLKKSNMGFGFTIIGGDEPDEFLQVKSVIPDGPAAQDGKMETGDVIVYINEVCVLGHTHADVVKLFQSVPIGQSVNLVLCRGYPLPFDPEDPANSMVPPLAIMERPPPVMVNGRHNYETYLEYISRTSQSVPDITDRPPHSLHSMPTDGQLDGTYPPPVHDDNVSMASSGATQAELMTLTIVKGAQGFGFTIADSPTGQRVKQILDIQGCPGLCEGDLIVEINQQNVQNLSHTEVVDILKDCPIGSETSLIIHRGGKTNTGSAIKYVGKIVGSFNNIVKMQISLELNEIIL

SEQ ID NO: 66198 - protein, 160 aa, Homo sapiens
MGPEALSSLLLLLLVASGDADMKGHFDPAKCRYALGMQDRTIPDSDISASSSWSDSTAARHSRLESSDGDGAWCPAGSVFPKEEEYLQVDLQRLHLVALVGTQGRHAGGLGKEFSRSYRLRYSRDGRRWMGWKDRWGQEVISGNEDPEGVVLKDLGPPMV

SEQ ID NO: 66199 - protein, 142 aa, Homo sapiens
MNGRSCSMSLHRTSGTPQGPRMVSGHHIPAIRAHSGTPGPSPCGSTSSPTMASLANNLHLKMPSGGGMAPQNNVAESRIHLPALSPRRQMLTNGKPRFQVTQAGGMSGSHTLKPKQQEFGSPFPPNPGKGPLFRVSLWRPRP

SEQ ID NO: 66200 - protein, 638 aa, Homo sapiens
MTGTPKTQEGAKDLEVDMNKTEVTPRLWTTCRDGEVLLRLSKHGPGHETPMTIPEFFRESVNRFGTYPALASKNGKKWEILNFNQYYEACRKAAKSLIKLGLERFHGVGILGFNSAEWFITAVGAILAGGLCVGIYATNSAEVCQYVITHAKVNILLVENDQQLQKILSIPQSSLEPLKAIIQYRLPMKKNNNLYSWDDFMELGRSIPDTQLEQVIESQKANQCAVLIYTSGTTGIPKGVMLSHDNITWIAGAVTKDFKLTDKHETVVSYLPLSHIAAQMMDIWVPIKIGALTYFAQADALKGTLVSTLKEVKPTVFIGVPQIWEKIHEMVKKNSAKSMGLKKKAFVWARNIGFKVNSKKMLGKYNTPVSYRMAKTLVFSKVKTSLGLDHCHSFISGTAPLNQETAEFFLSLDIPIGELYGLSESSGPHTISNQNNYRLLSCGKILTGCKNMLFQQNKDGIGEICLWGRHIFMGYLESETETTEAIDDEGWLHSGDLGQLDGLGFLYVTGHIKEILITAGGENVPPIPVETLVKKKIPIISNAMLVGDKLKFLSMLLTLKASTVTEIVKQQDPLVYKAIQQGINAVNQEAMNNAQRIEKWVILEKDFSIYGGELGPMMKLKRHFVAQKYKKQIDHMYH

SEQ ID NO: 66201 - protein, 56 aa, Homo sapiens
  MOD_RES (1)..(1): Any amino acid
XGRLPFYNQDHERLFELILMEEIRFPRTLSPEAKSLLAGLLKKDPKQSGLWSRQNH

SEQ ID NO: 66202 - protein, 631 aa, Homo sapiens
MVSKLSQLQTELLAALLESGLSKEALIQALGEPGPYLLAGEGPLDKGESCGGGRGELAELPNGLGETRGSEDETDDDGEDFTPPILKELENLSPEEAAHQKAVVETLLQEDPWRVAKMVKSYLQQHNIPQREVVDTTGLNQSHLSQHLNKGTPMKTQKRAALYTWYVRKQREVAQQFTHAGQGGLIEEPTGDELPTKKGRRNRFKWGPASQQILFQAYERQKNPSKEERETLVEECNRAECIQRGVSPSQAQGLGSNLVTEVRVYNWFANRRKEEAFRHKLAMDTYSGPPPGPGPGPALPAHSSPGLPPPALSPSKVHGVRYGQPATSETAEVPSSSGGPLVTVSTPLHQVSPTGLEPSHSLLSTEAKLVSAAGGPLPPVSTLTALHSLEQTSPGLNQQPQNLIMASLPGVMTIGPGEPASLGPTFTNTGASTLVIGLASTQAQSVPVINSMGSSLTTLQPVQFSQPLHPSYQQPLMPPVQSHVTQSPFMATMAQLQSPHALYSHKPEVAQYTHTGLLPQTMLITDTTNLSALASLTPTKQVFTSDTEASSESGLHTPASQATTLHVPSQDPASIQHLQPAHRLSASPTVSSSSLVLYQSSDSSNGQSHLLPSNHSVIETFISTQMASSSQ

SEQ ID NO: 66203 - protein, 99 aa, Homo sapiens
  MOD_RES (1)..(1): Any amino acid
XELYFEKGEYFVEMYYRNETQHEPYPLMLPGCSPSCPLERFAELVGPVIPQDWSTECMTTNSHQGPAETAHSARRNHDIALPCGRSTCLENTVLYYHYG

SEQ ID NO: 66204 - protein, 93 aa, Homo sapiens
  MOD_RES (1)..(1): Any amino acid
XALRQRERLPTTAQQEDPEKIQVQLCFKTCSPESQQIYGDIKDVRLDASMVFASPQEVSQEEFLDGVLMSAENSAQSWRLQTQLSWGRAVAPS

SEQ ID NO: 66205 - protein, 109 aa, Homo sapiens
MFQAAGAAQATPSHDAKGGGSSTVQRSKSFSLRAQVKETCAACQKTVYPMERLVADKLIFHNSCFCCKHCHTKLSLGSYAALHGEFYCKPHFQQLFKSKGNYDEGFGRK

SEQ ID NO: 66206 - protein, 157 aa, Homo sapiens
  MOD_RES (1)..(1): Any amino acid
XIIHLAQMKGLQRSQILPTEEYEEAMSTMQVSQLDLFRLLDQNRDGHLQLREVLAQTRLGNGWWMTPESIQEMYAAIKADPDGDGWVGDVDDYSLHGGCLVTRGTKWIANNWINVDPSRARQALFQQEMARLAREGGTDSQPEWALDRAYRDARVEL

SEQ ID NO: 66207 - protein, 157 aa, Homo sapiens
MKTPNAQEAEGQQTRAAAGRATGSANMTKKKVSQKKQRGRPSSQPRRNIVGCRISHGWKEGDEPITQWKGTVLDQLLDDYKEGDLRIMPESSESPPTEREPGGVVDGLIGKHVEYTKEDGSKRIGMVIHQVETKPSVYFIKFDDDFHIYVYDLVKKS

SEQ ID NO: 66208 - protein, 37 aa, Homo sapiens
MATVWDEAEMELGRRCSRCPRRRSSSAHGCWTVRSRS

SEQ ID NO: 66209 - protein, 121 aa, Homo sapiens
MFTLAEVASLNDIQPTYRILKPWWDVFMDYLAVVMLMVAIFAGTMQLTKDQVVCLPVLPSPVNSKAHTPPGNAEVTTNIPKMEAATNQDQDGRTTNDISFGTSAVTPDIPLRATYPRTDFA

SEQ ID NO: 66210 - protein, 195 aa, Homo sapiens
  MOD_RES (1)..(1): Any amino acid
XEPHVEEDDDDELDSKLNYKPPPQKSLKELQEMDKDDESLIKYKKTLLGDGPVVTDPKAPNVVVTRLTLVCESAPGPITMDLTDLEALKKETIVLKEGSEYRVKIHFKVNRDIVSGLKYVQHTYRTGVKVDKATFMVGSYGPRPEEYEFLTPVEEAPKGMLARGTYHNKSFFTDDDKQDHLSWEWNLSIKKEWTE

SEQ ID NO: 66211 - protein, 226 aa, Homo sapiens
MLPFLLATLGTTALNNSNPKDYCYSARIRSTVLQGLPFGGVPTVLALDFMCFLALLFLFSILRKVAWDYGRLALVTDADRLRRQERDRVEQEYVASAMHGDSHDRYERLTSVSSSVDFDQRDNGFCSWLTAIFRIKDDEIRDKCGGDAVHYLSFQRHIIGLLVVVGVLSVGIVLPVNFSGDLLENNAYSFGRTTIANLKSGNNLLWLHTSFAFLYLLLTVYSMRRH

SEQ ID NO: 66212 - protein, 105 aa, Homo sapiens
MALTQGPLTFRDVAIEFSQEEWKSLDPVQKALYWDVMLENYRNLVFLGILPKCMTKELPPIGNSNTGEKCQTVTLERHECYDVENFYLREIQKNLQDLEFQWKDG

SEQ ID NO: 66213 - protein, 459 aa, Homo sapiens
MKLNVDGLLVYFPYDYIYPEQFSYMRELKRTLDAKGHGVLEMPSGTGKTVSLLALIMAYQRAYPLEVTKLIYCSRTVPEIEKVIEELRKLLNFYEKQEGEKLPFLGLALSSRKNLCIHPEVTPLRFGKDVDGKCHSLTASYVRAQYQHDTSLPHCRFYEEFDAHGREVPLPAGIYNLDDLKALGRRQGWCPYFLARYSILHANVVVYSYHYLLDPKIADLVSKELARKAVVVFDEAHNIDNVCIDSMSVNLTRRTLDRCQGNLETLQKTVLRIKETDEQRLRDEYRRLVEGLREASAARETDAHLANPVLPDEVLQEAVPGSIRTAEHFLGFLRRLLEYVKWRLRVQHVVQESPPAFLSGLAQRVCIQRKPLRFCAERLRSLLHTLEITDLADFSPLTLLANFATLVSTYAKAAWTPRWPSNPYLSVSSLSSSHLGHCPRWTSTPRSWTSTPSPWQPSP

SEQ ID NO: 66214 - protein, 155 aa, Homo sapiens
  MOD_RES (1)..(1): Any amino acid
XVDYCLLSDHGCEYSCVNMDRSFACQCPEGHVLRSDGKTCAKLDSCALGDHGCEHSCVSSEDSFVCQCFEGYILREDGKTCRRKDVCQAIDHGCEHICVNSDDSYTCECLEGFRLAEDGKRCRSKMSANQPTMAANTFVLIMGIPTSANAQRDLF

SEQ ID NO: 66215 - protein, 244 aa, Homo sapiens
MLELQYHNEDLEKDKTSQNCLGRGMEQVAKKLGVAHEEIQRLTDELQVKEKEQCKLDSALKKAQLEIDKLKENLVKLKENDAADLQKAKEQNQRLDEEILALRNRVRSLDSEKKVLGEMVERLKGEVCESQENKQLGNHSPGKTVGGEQREQHPSSGEKLKYNQQGEVQQLHQNLHRLQILCNSAENELRYERGQNLDLKQHNSLLQEENIKILDLQRKLEHAHKVCLTDTCISEKQQLEEKIK

SEQ ID NO: 66216 - protein, 31 aa, Homo sapiens
  MOD_RES (1)..(1): Any amino acid
XFELLEELPTPKFSFGGRSGNSVAALVFQKM

SEQ ID NO: 66217 - protein, 96 aa, Homo sapiens
MPLLEGSVGVEDLVLLEPLVEESLLKNLQLRYENKEIYTYIGNVVISVNPYQQLPIYGPEFIAKYQDYTFYELKPHIYALANVAYQSLRDRDRDQC

SEQ ID NO: 66218 - protein, 121 aa, Homo sapiens
MASNVTNKTDPRSMNSRVFIGNLNTLVVKKSDVEAIFSKYGKIVGCSVHKGFAFVQYVNERNARAAVAGEDGRMIAGQVLDINLAAEPKVNRGKAGVKRSAAEMYGSSFDLDYDFQRDYYD

SEQ ID NO: 66219 - protein, 66 aa, Homo sapiens
MELVQVLKRGLQQITGHGGLRGYLRVFFRTNDAKVGTLVGEDKYGNKYYEDNKQFFAGVKGMEFLI

SEQ ID NO: 66220 - protein, 164 aa, Homo sapiens
MGRRSSDTEEESRSKRKKKHRRRSSSSSSSDSRTYSRKKGGRKSRSKSRSWSRDLQPRSHSYDRRRRHRSSSSSSYGSRRKRSRSRSRGRGKSYRVQRSRSKSRTRRSRSRPRLRSHSRSSERSSHRRTRSRSRDRERRKGRDKEKREKEKDKGKDKELHNIKR

SEQ ID NO: 66221 - protein, 81 aa, Homo sapiens
MTVFFKTLRNHWKKTTAGLCLLTWGGHWLYGKHCDNLLRRAACQEAQTSLALLPRLECNGTISAHCNLRLPGSSDSLASAS

SEQ ID NO: 66222 - protein, 25 aa, Homo sapiens
QFWSSVKEKVISEFQSKVHRTQRNA

SEQ ID NO: 66223 - protein, 165 aa, Homo sapiens
MRGGEVALGWNKKKRLFCEDFRFKMVTAAMLLQCCPVLARGPTSLLGKVVKTHQFLFGIGRCPILATQGPNCSQIHLKATKAGGDSPSWAKGHCPFMLSELQDGKSKIVQKAAPEVQEDVKAFKTDLPSSLVSVSLRKPFSGPQEQEQISGKVTHLIQNNMPGNY

SEQ ID NO: 66224 - protein, 140 aa, Homo sapiens
  MOD_RES (1)..(1): Any amino acid
XGCSVLVNTSCRLVNLTAHLRQKAGLPPDATIALLAEDGNLVSLEEDLKEGASRAQTMGNSLLKERAIYVLVRIIKGEDMASTRYESLLENLDDHYPELAEELRRLSGLSSVGHNWRKRMGTRRGRHEQSPTSRPRKGPD

SEQ ID NO: 66225 - protein, 242 aa, Homo sapiens
MIQTPDADLDVTNIIQADEPTTLTTNALDLNSVLGKDYGALKDIVINANPASPPLSLLVLHRLLCEHFRVLSTVHTHSSVKSVPENLLKCFGEQNKKQPRQDYQLGFTLIWKNVPKTQMKFSIQTMCPIEGEGNIARFLFSLFGQKHNAVNATLIDSWVDIAIFQLKEGSSKEKAAVFRSMNSALGKSPWLAGNELTVADVVLWSVLQQIGGCSVTVPANVQRWMRSCENLAPFNTALKLLK

SEQ ID NO: 66226 - protein, 280 aa, Homo sapiens
MAEELVLERCDLELETNGRDHHTADLCREKLVVRRGQPFWLTLHFEGRNYEASVDSLTFSVVTGPAPSQEAGTKARFPLRDAVEEGDWTATVVDQQDCTLSLQLTTPANAPIGLYRLSLEASTGYQGSSFVLGHFILLFNAWCPADAVYLDSEEERQEYVLTQQGFIYQGSAKFIKNIPWNFGQFEDGILDICLILLDVNPKFLKNAGRDCSRRSSPVYVGRVVSGMVNCNDDQGVLLGRWDNNYGDGVSPMSWIGSVDILRRWKNHGCQRVKYGQCWVF

SEQ ID NO: 66227 - protein, 128 aa, Homo sapiens
MNAPPAFESFLLFEGEKQLLKDPQVLFAGYKVPHPLEHKIIIRVQTTPDYSPQEAFTNAITDLISELSLLEERFRVRAGPGGADGVGWTLARVPRPGTALACFFGGPQGEAAVMEEQGLPPQAPGHVD

SEQ ID NO: 66228 - protein, 50 aa, Homo sapiens
MASEELQKDLEEVKVLLEKATRKRVRDALTAEKSKIETEIKNKMQQKSQK

SEQ ID NO: 66229 - protein, 45 aa, Homo sapiens
MSDKPDLSEVEKFDRSKLKKTNTEEKNTLPSKEIFFSLVGVNIQD

SEQ ID NO: 66230 - protein, 200 aa, Homo sapiens
MSLLRSLRVFLVARTGSYPAGSLLRQSPQPRHTFYAGPRLSASASSKELLMKLRRKTGYSFVNCKKALETCGGDLKQAEIWLHKEAQKEGWSKAAKLQGRKTKEGLIGLLQEGNTTVLVEVNCETDFVSRNLKFQLLVQQVALGTMMHCQTLKDQPSAYSKGFLNSSELSGLPAGPDREGSLKDQLALAIVLRTHHICMI

SEQ ID NO: 66231 - protein, 280 aa, Homo sapiens
MGHCRLCHGKFSSRSLRSISERAPGASMERPSAEERVLVRDFQRLLGVAVRQDPTLSPFVCKSCHAQFYQCHSLLKSFLQRVNASPAGRRKPCAKVGAQPPTGAEEGACLVDLITSSPQCLHGLVGWVHGHAASCGALPHLQRTLSSEYCGVIQVVWGCDQGHDYTMDTSSSCKAFLLDSALAVKWPWDKETAPRLPQHRGWNPGDAPQTSQGRGTGTPVGAETKTLPSTDVAQPPSDSDAVGPRSGFPPQPSLPLCRAPGQLGEKQLPSSTSDDRRRLE

SEQ ID NO: 66232 - protein, 298 aa, Homo sapiens
MLLLAAAFLVAFVLLLYMVSPLISPKPLALPGAHVVVTGGSSGIGKCIAIECYKQGAFITLVARNEDKLLQAKKEIEMHSINDKQVVLCISVDVSQDYNQVENVIKQAQEKLGPVDMLVNCAGMAVSGKFEDLEVSTFERLMSINYLGSVYPSRAVITTMKERRVGRIVFVSSQAGQLGLFGFTAYSASKFAIRGLAEALQMEVKPYNVYITVAYPPDTDTPGFAEENRTKPLETRLISETTSVCKPEQVAKQIVKDAIVVTMGLFRTIALFYLGSFDSIVRRCMMQREKSENADKTA

SEQ ID NO: 66233 - protein, 78 aa, Homo sapiens
MSSFLPEGGCYELLTVIGKGFEDLMTVNLARYKPTGEYVTVRRINLEACSNEMVTFLQGELHVSKLFNHPNIVPYRAT

SEQ ID NO: 66234 - protein, 59 aa, Homo sapiens
MVKEKKKADKKGEKSARSPSSLSDNLDFSKQDGNTTRQEMSPAGVPLLGMQLNEVKPKK

SEQ ID NO: 66235 - protein, 114 aa, Homo sapiens
MDHPSREKDERQRTTKPMAQRSAHCSRPSGSSSSSGVLMVGPNFRVGKKIGCGNFGELRLGKNLYTNEYVAIKLVKVSHRCITLDHVGNIMPWCWSSLALAWRTCLTSVTEHLL

SEQ ID NO: 66236 - protein, 210 aa, Homo sapiens
MRPRLWLLLAAQLTVLHGNSVLQQTPAYIKVQTNKMVMLSCEAKISLSNMRIYWLRQRQAPSSDSHHEFLALWDSAKGTIHGEEVEQEKIAVFRDASRFILNLTSVKPEDSGIYFCMIVGSPELTFGKGTQLSVVDFLPTTAQPTKKSTLKKRVCRLPRPETQKGPLCSPITLGLLVAGVLVLLVSLGVAIHLCCRRRRARLRFMKQLYK

SEQ ID NO: 66237 - protein, 450 aa, Homo sapiens
MGAGPSLLLAALLLLLSGDGAVRCDTPANCTYLDLLGTWVFQVGSSGSQRDVNCSVMGPQEKKVVVYLQKLDTAYDDLGNSGHFTIIYNQGFEIVLNDYKWFAFFKYKEEGSKVTTYCNETMTGWVHDVLGRNWACFTGKKVGTASENVYSNRLYKYDHNFVKAINAIQKSWTATTYMEYETLTLGDMIRRSGGHSRKIPRPKPAPLTAEIQQKILHLPTSWDWRNVHGINFVSPVRNQASCGSCYSFASMGMLEARIRILTNNSQTPILSPQEVVSCSQYAQGCEGGFPYLIAGKYAQDFGLVEEACFPYTGTDSPCKMKEDCFRYYSSEYHYVGGFYGGCNEALMKLELVHHGPMAVAFEVYDDFLHYKKGIYHHTGLRDPFNPFELTNHAVLLVGYGTDSASGMDYWIVKNSWGTGWGENGYFRIRRGTDECAIESIAVAATPIPKL

SEQ ID NO: 66238 - protein, 110 aa, Homo sapiens
MSKKRGALYQLIDRIRRIGFGLEQNNTVKGKVPLQFSGQNEKNRVPRAATSRTERIWPGGVIPYVIGGNFTGSQRAMFKQAMRHWEKHTCVTFIERSDEESYIVFTYRPC

SEQ ID NO: 66239 - protein, 63 aa, Homo sapiens
MQIELSTCFFLCLLRFCFSATRRYYLGAVELSWDYMQSDLDFLLECQNLFHSTPQSCTKRLCL

SEQ ID NO: 66240 - protein, 38 aa, Homo sapiens
MSGYSSDRDRGRDRGKRWKHTEEARKLQLEVTTARSQF

SEQ ID NO: 66241 - protein, 222 aa, Homo sapiens
MISNPELKDKPLGVQQKYLVVTCNYEARKLGVKKLMNVRDAKEKCPQLVLVNGEDLTRYREMSYKVTELLEEFSPVVERLGFDENFVDLTEMVEKRLQQLQSDELSAVTVSGHVYNNQSINLLDVLHIRLLVGSQIAAEMREAMYNQLGLTGCAGVASNKLLAKLVSGVFKPNQQTVLLPESCQHLIHSLNHIKEIPGIGYKTAKCLEALGINSVRDLQTFS

SEQ ID NO: 66242 - protein, 106 aa, Homo sapiens
  MOD_RES (1)..(1): Any amino acid
XQPKANPTVTLFPPSSEELQANKATLVCLISDFYPGAVTVAWKADGSPVKAGVETTKPSKQSNNKYAASSYLSLTPEQWKSHRSYSCQVTHEGSTVEKTVAPTECS

SEQ ID NO: 66243 - protein, 124 aa, Homo sapiens
  MOD_RES (1)..(1): Any amino acid
XISAQTSTLLCFSVNGVFKEVDGKSRDSLRAFTRTFIAVPASNSGSEEIQRAFAMPAPTPSSSPVPTLSPEQQEMLQAFSTQSGMNLEWSQKCLQDNNWDYTRSAQAFTHLKAKGEIPEVAFMK

SEQ ID NO: 66244 - protein, 583 aa, Homo sapiens
MMCEVMPTISEAEGPPGGGGGHGSGSPSQPDADSHFEQLMVSMLEERDRLLDTLRETQETLALTQGKLHEVGHERDSLQRQLNTALPQEFAALTKELNVCREQLLEREEEIAELKAERNNTRLLLEHLECLVSRHERSLRMTVVKRQAQSPAGVSSEVEVLKALKSLFEHHKALDEKVRERLRVALERCSLLEEELGATHKELMILKEQNNQKKTLTDGVLDINHEQENTPSTSGKRSSDGSLSHEEDLAKVIELQEIISKQSREQSQMKERLASLSSHVTELEEDLDTARKDLIKSEEMNTKLQRDVREAMAQKEDMEERITTLEKRYLAAQREATSVHDLNDKLENEIANKDSMHRQTEDKNRQLQERLELAEQKLQQTLRKAETLPEVEAELAQRVAALSKAEERHGNIEERLRQMEAQLEEKNQELQRARQREKMNEEHNKRLSDTVDKLLSESNERLQLHLKERMAALEDKNSLLREVESAKKQLEETQHDKDQLVLNIEALRAELDHMRLRADPTWAVSQISGSPWQTATQTPTAPVQCCGAHRKAGWQPCEMSLPRYKLLMSRIGNVPSKLVSWQM

SEQ ID NO: 66245 - protein, 162 aa, Homo sapiens
MMEGLKKRTRKAFGIRKKEKDTDSTGSPDRDGIQPSPHEPPYNSKAECAREGGKKVSKKSNGAPNGFYAEIDWERYNSPELDEEGYSIRPEEPGSTKGKHFYSSSESEEEEESHKKFNIKIKPLQSKDILKNAATVDELKASIGNIALSPSPVCLFLILGCN

SEQ ID NO: 66246 - protein, 268 aa, Homo sapiens
MKPILLQGHERSITQIKYNREGDLLFTVAKDPIVNVWYSVNGERLGTYMGHTGAVWCVDADWDTKHVLTGSADNSCRLWDCETGKQLALLKTNSAVRTCGFDFGGNIIMFSTDKQMGYQCFVSFFDLRDPSQIDNNEPYMKIPCNDSKITSAVWGPLGECIIAGHESGELNQYSAKSGEVLVNVKEHSRQINDIQLSRDMTMFVTASKDNTAKLFDSTTLEHQKTFRTERPVNSAALSPNYDHVVLGGGQEAMDVTTTSTRIGKFEAR

SEQ ID NO: 66247 - protein, 244 aa, Homo sapiens
MENFTALFGAQADPPPPPTALGFGPGKPPPPPPPPAGGGPGTAPPPTAATAPPGADKSGAGCGPFYLMRELPGSTELTGSTNLITHYNLEQAYNKFCGKKVKEKLSNFLPDLPGMIDLPGSHDNSSLRSLIEKPPILSSSFNPITGTMLAGFRLHTGPLPEQCRLMHIQPPKKKNKHKHKQSRTQDPVPPETPSDSDHKKKKKKKEEDPERKRKKKEKKKKKNRHSPDHPGMGSSQASSSSSLR

SEQ ID NO: 66248 - protein, 87 aa, Homo sapiens
  MOD_RES (1)..(1): Any amino acid
XRRLWQSAQQARRGWRPFSQEYCQMLILTPPGIPSPGPSFVSSGPGPSCPHSVWPCSSPAFATVRWDRRRPGPPLPPSGHLGHRRGA

SEQ ID NO: 66249 - protein, 97 aa, Homo sapiens
  MOD_RES (1)..(1): Any amino acid
XSTDLHGNNLFLVAVHELGHALGLEHSSNPNAIMAPFYQWKDVDNFKLPEDDLRGIQQLYGAWAVTSGLCMPLSSPWPMRSRHCCHPHFVDEEPKAQ

SEQ ID NO: 66250 - protein, 659 aa, Homo sapiens
MNNHVSSKPSTMKLKHTINPILLYFIHFLISLYTILTYIPFYFFSESRQEKSNRIKAKPVNSKPDSAYRSVNSLDGLASVLYPGCDTLDKVFTYAKNKFKNKRLLGTREVLNEEDEVQPNGKIFKKVILGQYNWLSYEDVFVRAFNFGNGLQMLGQKPKTNIAIFCETRAEWMIAAQACFMYNFQLVTLYATLGGPAIVHALNETEVTNIITSKELLQTKLKDIVSLVPRLRHIITVDGKPPTWSEFPKGIIVHTMAAVEALGAKASMENQPHSKPLPSDIAVIMYTSGSTGLPKGVMISHSNIIAGITGMAERIPELGEEDVYIGYLPLAHVLELSAELVCLSHGCRIGYSSPQTLADQSSKIKKGSKGDTSMLKPTLMAAVPEIMDRIYKNVMNKVSEMSSFQRNLFILAYNYKMEQISKGRNTPLCDSFVFRKVRSLLGGNIRLLLCGGAPLSATTQRFMNICFCCPVGQGYGLTESAGAGTISEVWDYNTGRVGAPLVCCEIKLKNWEEGGYFNTDKPHPRGEILIGGQSVTMGYYKNEAKTKADFFEDENGQRWLCTGDIGEFEPDGCLKIIDRKKDLVKLQAGEYVSLGKVEAALKNLPLVDNICAYANSVPWREVKKIKPSFLLPWYPYLPVPQQGKLHRTTPEEWGVKKWQ

SEQ ID NO: 66251 - protein, 111 aa, Homo sapiens
  MOD_RES (1)..(1): Any amino acid
XSELQATYRLLRGKDVEFPNDYPSGCLLGCVDLIDCLSQKQFKEQFPDISQESDSPFVFICKNPQEMVVKFPIKGNPKICSLEDERTSEFLGISWKSLFLLYLVSPISFPF

SEQ ID NO: 66252 - protein, 404 aa, Homo sapiens
MADNLDEFIEEQKARLAEDKAELESDPPYMEMKGKLSAKLSENSKILISMAKENIPPNSQQTRGSLGIDYGLSLPLGEDYERKKHKLKEELRQDYRRYLTQGITQGKRKKNFLSTSETDPSTLGVSLPIGERLSAKERLKLERNKEYNQFLRGKEESSEKFRQVEKSTEPKSQRNKKPIGQVKPDLTSQIQTSCENSEGPRKDVLTPSEAYEELLNQRRLEEDRYRQLDDEIELRNRRIIKKANEEVGISNLKHQRFASKAGIPDRRFHRFNEDRVFDRRYHRPDQDPEVSEEMDERFRYESDFDRRLSRVYTNDRMHRNKRGNMPPMEHDGDVIEQSNIRISSAENKSAPDNETSKSANQDTCSPFAGMLFGGEDRELIQRRKEKYRLELLEQMAEQQRNKRR

SEQ ID NO: 66253 - protein, 23 aa, Homo sapiens
MTFYLFGIRSFPKLWKSPYLGLG

SEQ ID NO: 66254 - protein, 80 aa, Homo sapiens
MPLEQRSQHCKPEEGLEARGEALGLVGAQAPATEEQQTASSSSTLVEVTLGEVPAADSPSPPHSPQGASSFSTTINYTLW

SEQ ID NO: 66255 - protein, 82 aa, Homo sapiens
MPQAFLLGSIHEPAGALMEPQPCPGSLAESFLEEELRLNAELSQLQFSEPVGIIYNPVEYAWEPHRNYVTRYCQGPKEVLFL

SEQ ID NO: 66256 - protein, 451 aa, Homo sapiens
MASPAPPEHAEEGCPAPAAEEQAPPSPPPPQASPAERQQQEEEAQEAGAAEGAGLQVEEAAGRAAAAVTWLLGEPVLWLGCRADELLSWKRPLRSLLGFVAANLLFCWEVINSKPDERPRLSHCIAESWMNFSIFLQEMSLFKQQSPGKFCLLVCSVCTFFTILGSYIPGVILSYLLLLCAFLCPLFKCNDIGQKIYSKIKSVLLKLDFGIGEYINQKKRERSEADKEKSHKDDSELDFSALCPKISLTVAAKELSVSDTDVSEVSWTDNGTFNLSEGYTPQTDTSDDLDRPSEEVFSRDLSDFPSLENGMGTNDEDELSLGLPTELKRKKEQLDSGHRPSKETQSAAGLTLPLNSDQTFHLMSNLAGDVITAAVTAAIKDQLEGVQQALSQAAPIPEEDTDTEEGDDFELLDQSELDQIESELGLTQDQEAEAQQNKKSSGFLSNLLGGH

SEQ ID NO: 66257 - protein, 467 aa, Homo sapiens
MAAGGDHGSPDSYRSPLASRYASPEMCFVFSDRYKFRTWRQLWLWLAEAEQTLGLPITDEQIQEMKSNLENIDFKMAAEEEKRLRHDVMAHVHTFGHCCPKAAGIIHLGATSCYVGDNTDLIILRNALDLLLPKLARVISRLADFAKERASLPTLGFTHFQPAQLTTVGKRCCLWIQDLCMDLQNLKRVRDDLRFRGVKGTTGTQASFLQLFEGDDHKVEQLDKMVTEKAGFKRAFIITGQTYTRKVDIEVLSVLASLGASVHKICTDIRLLANLKEMEEPFEKQQIGSSAMPYKRNPMRSERCCSLARHLMTLVMDPLQTASVQWFERTLDDSANRRICLAEAFLTADTILNTLQNISEGLVVYPKVIERRIRQELPFMATENIIMAMVKAGGSRQVQRFLEEEVYPLLKPYESVMKCKQVPLDKNVVCVIPCCISNSKSTSDTWQLGSLPASATAPDFLVAWIYS

SEQ ID NO: 66258 - protein, 46 aa, Homo sapiens
PTTQQSPQDEQEKLLDEAIQAVKVQSFQMKRCLCFLYLKELLAFLS

SEQ ID NO: 66259 - protein, 101 aa, Homo sapiens
  MOD_RES (1)..(1): Any amino acid
XWRLSAVCGALGGRALLLRTPVVRPAHISAFLQDRPIPEWCGVQHIHLSPSHHSGSKAASLHWTSERVVSVLLLGLLPAAYLNPCSAMDYSLAAALTLHGH

SEQ ID NO: 66260 - protein, 151 aa, Homo sapiens
MPQTYKRKRSWSRAVFSNLQRKGLEKRFEIQKYVTKPDRKQLAAMLGLTDAQVKVWFQNRRMKWRHSKEAQAQKDKDKEAGEKPSGGAPAADGEQDERSPSRSEGEAESESSDSESLDMAPSDTERTEGSERSLHQTTVIKAPVTGALITA

SEQ ID NO: 66261 - protein, 593 aa, Homo sapiens
MCLNKTKQLFGVAKRLPFWRKERSPHRPILQAGLPANASTVVGGDVEFVCKVYSDAQPHIQWIKHVEKNGSKYGPDGLPYLKVLKAAGVNTTDKEIEVLYIRNVTFEDAGEYTCLAGNSIGISFHSAWLTVLPAPGREKEITASPDYLEIAIYCIGVFLIACMVVTVILCRMKNTTKKPDFSSQPAVHKLTKRIPLRRQVTVSAESSSSMNSNTPLVRITTRLSSTADTPMLAGVSEYELPEDPKWEFPRDKLTLGKPLGEGCFGQVVMAEAVGIDKDKPKEAVTVAVKMLKDDATEKDLSDLVSEMEMMKMIGKHKNIINLLGACTQDGPLYVIVEYASKGNLREYLRARRPPGMEYSYDINRVPEEQMTFKDLVSCTYQLARGMEYLASQKCIHRDLAARNVLVTENNVMKIADFGLARDINNIDYYKKTTNGRLPVKWMAPEALFDRVYTHQSDVWSFGVLMWEIFTLGGSPYPGIPVEELFKLLKEGHRMDKPANCTNELYMMMRDCWHAVPSQRPTFKQLVEDLDRILTLTTNEEYLDLSQPLEQYSPSYPDTRSSCSSGDDSVFSPDPMPYEPCLPQYPHINGSVKT

SEQ ID NO: 66262 - protein, 113 aa, Homo sapiens
MAPAAWLRSAAARALLPPMLLLLLQPPPLLARALPPDAHHLHAERRGPQPWHAALPSSPAPAPATQEAPRPASSLRPPRCGVPDPSDGLSARNRQKRFVLSGGRWEKTDLTYR

SEQ ID NO: 66263 - protein, 55 aa, Homo sapiens
MVLPQGLLTFRDVAIEFSQEEWKCLDPAQRTLYRDVMLENYRNLVSLGRLSQNTA

SEQ ID NO: 66264 - protein, 476 aa, Homo sapiens [sequence omitted]

SEQ ID NO: 66265 - protein, 542 aa, Homo sapiens
MASNSLFSTVTPCQQNFFWDPSTSRRFSPPSSSLQPGKMSDVSPVVAAQQQQQQQQQQQQQQQQQQQQQQQEAAAAAAAAAAAAAAAAAVPRLRPPHDNRTMVEIIADHPAELVRTDSPNFLCSVLPSHWRCNKTLPVAFKVVALGEVPDGTVVTVMAGNDENYSAELRNASAVMKNQVARFNDLRFVGRSGRGKSFTLTITVFTNPPQVATYHRAIKVTVDGPREPRRHRQKLDDSKPSLFSDRLSDLGRIPHPSMRVGVPPQNPRPSLNSAPSPFNPQGQSQITDPRQAQSSPPWSYDQSYPSYLSQMTSPSIHSTTPLSSTRGTGLPAITDVPRRISDSEPSTLDSQSSTTLFLSSEEPGPSTAALPSPSSSSCEPQAFSPGPPALPPLLPPLPAASAPPGPGASRRTGRYSVVASSPEAAPRLVDWLPGCPSTISPSTRGDDKERPPPVLAPAEGPERSRAPRPSTAGREEGTVDAGTSPPPRARPAAAASLEAHVGDILVELRTMNGHLDSIARALTKLASSLGPQPEPLPDVSDAN

SEQ ID NO: 66266 - protein, 142 aa, Homo sapiens [sequence omitted]

SEQ ID NO: 66267 - protein, 56 aa, Homo sapiens
  MOD_RES (1)..(1): Any amino acid
XQSINAHPSNCICIKFDPMGKYFATGSADALVSLWDVDELVCVRCFSRGQTMGGTV

SEQ ID NO: 66268 - protein, 515 aa, Homo sapiens
MKALVNQLHERVEHIKLGGGEKARALHISRGKLLPRERIDNLIDPGSPFLELSQFAGYQLYDNEEVPGGGIITGIGRVSGVECMIIANDATVKGGAYYPVTVKKQLRAQEIAMQNRLPCIYLVDSGGAYLPRQADVFPDRDHFGRTFYNQAIMSSKNIAQIAVVMGSCTAGGAYVPAMADENIIVRKQGTIFLAGPPLVKAATGEEVSAEDLGGADLHCRKSGVSDHWALDDHHALHLTRKVVRNLNYQKKLDVTIEPSEEPLFPADELYGIVGANLKRSFDVREVIARIVDGSRFTEFKAFYGDTLVTGFARIFGYPVGIVGNNGVLFSESAKKGTHFVQLCCQRNIPLLFLQNITGFMVGREYEAEGIAKDGAKMVAAVACAQVPKITLIIGGSYGAGNYGMCGRAYSPRFLYIWPNARISVMGGEQAANVLATITKDQRAREGKQFSSADEAALKEPIIKKFEEEGNPYYSSARVWDDGIIDPADTRLVLGLSFSAALNAPIEKTDFGIFRM

SEQ ID NO: 66269 - protein, 80 aa, Homo sapiens
MVLGPEQKMSDDSVSGDHGESASLGNINPAYSNPSLSQSPGDSEEYFATYFNEKISIPEEEARVQWCNPGSPQPPPPAFK

SEQ ID NO: 66270 - protein, 1072 aa, Homo sapiens
MSRRKPASGGLAASSSAPARQAVLSRFFQSTGSLKSTSSSTGAADQVDPGAAAAAAAAAAAAPPAPPAPAFPPQLPPHIATEIDRRKKRPLENDGPVKKKVKKVQQKEGGSDLGMSGNSEPKKCLRTRNVSKSLEKLKEFCCDSALPQSRVQTESLQERFAVLPKCTDFDDISLLHAKNAVSSEDSKRQINQKDTTLFDLSQFGSSNTSHENLQKTASKSANKRSKSIYTPLELQYIEMKQQHKDAVLCVECGYKYRFFGEDAEIAARELNIYCHLDHNFMTASIPTHRLFVHVRRLVAKGYKVGVVKQTETAALKAIGDNRSSLFSRKLTALYTKSTLIGEDVNPLIKLDDAVNVDEIMTDTSTSYLLCISENKENVRDKKKGNIFIGIVGVQPATGEVVFDSFQDSASRSELETRMSSLQPVELLLPSALSEQTEALIHRATSVSVQDDRIRVERMDNIYFEYSHAFQAVTEFYAKDTVDIKGSQIISGIVNLEKPVICSLAAIIKYLKEFNLEKMLSKPEEINARLDAVSEVLHSESSVFGQIENHLRKLPDIERGLCSIYHKKCSTQEFFLIVKTLYHLKSEFQAIIPAVNSHIQSDLLRTVILEIPELLSPVEHYLKILNEQAAKVGDKTELFKDLSDFPLIKKRKDEIQGVIDEIRMHLQEIRKILKNPSAQYVTVSGQEFMIEIKNSAVSCIPTDWVKVGSTKAVSRFHSPFIVENYRHLNQLREQLVLDCSAEWLDFLEKFSEHYHSLCKAVHHLATVDCIFSLAKVAKQGDYCRPTVQEERKIVIKNGRHPVIDVLLGEQDQYVPNNTDLSEDSERVMIITGPNMGGKSSYIKQVALITIMAQIGSYVPAEEATIGIVDGIFTRMGAADNIYKGQSTFMEELTDTAEIIRKATSQSLVILDELGRGTSTHDGIAIAYATLEYFIRDVKSLTLFVTHYPPVCELEKNYSHQVGNYHMGFLVSEDESKLDPGAAEQVPDFVTFLYQITRGIAARSYGLNVAKLADVPGEILKKAAHKSKELEGLINTKRKRLKYFAKLWTMHNAQDLQKWTEEFNMEETQTSLLH

SEQ ID NO: 66271 - protein, 96 aa, Homo sapiens
MPVDLGQALGLLPSLAKAEDSQFSESDAALQEELSSPETARQLFRQFRYQVMSGPHETLKQLRKLCFQWLQPEVHTKEQILEILMLEQFLTILPGE

SEQ ID NO: 66272 - protein, 336 aa, Homo sapiens
  MOD_RES (1)..(1): Any amino acid
XLLDDDDQVAFSFILDNIVTQKMMAVPDSWPFHHPVNKKFVPDYYKVIVNPMDLETIRKNISKHKYQSRESFLDDVNLILANSVKYNGPESQYTKTAQEIVNVCYQTLTEYDEHLTQLEKDICTAKEAALEEAELESLDPMTPGPYTPQPPDLYDTNTSLSMSRDASVFQDESNMSVLDIPSATPEKQMRQGRGRLGEEDSDVDIEGYDDEEEDGKPKTPAPEGEDGDGDLADEEEGTVQQPQASVLYEDLLMSEGEDDEEDAGSDEEGDNPFSAIQLSESGSDSDVGSGGIRPKQPRMLQENTRMDMENEESMMSYEGDGGEASHGLEDSNIRYQ

SEQ ID NO: 66273 - protein, 1643 aa, Homo sapiens
  MOD_RES (1)..(1): Any amino acid
XFLVSFMVDARGGSMRGSRHHGMRIIIPPRKCTAPTRITCRLVKRHKLANPPPMVEGEGLASRLVEMGPAGAQFLGPVIVEIPHFGSMRGKERELIVLRSENGETWKEHQFDSKNEDLTELLNGMDEELDSPEELGKKRICRIITKDFPQYFAVVSRIKQESNQIGPEGGILSSTTVPLVQASFPEGALTKRIRVGLQAQPVPDEIVKKILGNKATFSPIVTVEPRRRKFHKPITMTIPVPPPSGEGVSNGYKGDTTPNLRLLCSITGGTSPAQWEDITGTTPLTFIKDCVSFTTNVSARFWLADCHQVLETVGLATQLYRELICVPYMAKFVVFAKMNDPVESSLRCFCMTDDKVDKTLEQQENFEEVARSKDIEVLEGKPIYVDCYGNLAPLTKGGQQLVFNFYSFKENRLPFSIKIRDTSQEPCGRLSFLKEPKTTKGLPQTAVCNLNITLPAHKKIEKTDRRQSFASLALRKRYSYLTEPGMKTVERSTGATRSLPTTYSYKPFFSTRPYQSWTTAPITVPGPAKSGFTSLSSSSSNTPSASPLKSIWSVSTPSPIKSTLGASTTSSVKSISDVASPIRSFRTMSSPIKTVVSQSPYNIQVSSGTLARAPAVTEATPLKGLASNSTFSSRTSPVTTAGSLLERSSITMTPPASPKSNINMYSSSLPFKSIITSAAPLISSPLKSVVSPVKSAVDVISSAKITMASSLSSPVKQMPGHAEVALVNGSISPLKYPSSSTLINGCKATATLQEKISSATNSVSSVVSAATDTVEKVFSTTTAMPFSPLRSYVSAAPSAFQSLRTPSASALYTSLGSSISATTSSVTSSIITVPVYSVVNVLPEPALKKLPDSNSFTKSAAALLSPIKTLTTETHPQPHFSRTSSPVKSSLFLAPSALKLSTPSSLSSSQEILKDVAEMKEDLMRMTAILQTDVPEEKPFQPELPKEGRIDDEEPFKIVEKVKEDLVKVSEILKKDVCVDNKGSPKSPKSDKGHSPEDDWIEFSSEEIREARQQAAASQSPSLPERVQVKAKAASEKDYNLTKVIDYLTNDIGSSSLTNLKYKFEDAKKDGEERQKRVLKPAIALQEHKLKMPPASMRTSTSEKELCKMADSFFGTDTILESPDDFSQHDQDKSPLSDSGFETRSEKTPSAPQSAESTGPKPLFHEVPIPPVITETRTEVVHVIRSYDPSAGDVPQTQPEEPVSPKPSPTFMELEPKPTTSSIKEKVKAFQMKASSEEDDHNRVLSKGMRVKEETHITTTTRMVYHSPPGGEGASERIEETMSVHDIMKAFQSGRDPSKELAGLFEHKSAVSPDVHKSAAETSAQHAEKDNQMKPKLERIIEVHIEKGPQSPCERTDIRMAIVADHLGLSWTELARELNFSVDEINQIRVENPNSLISQSFMLLKKWVTRDGKNATTDALTSVLTKINRIDIVTLLEGPIFDYGNISGTRSFADENNVFHDPVDGWQNETSSGNLESCAQARRVTGGLLDRLDDSPDQCRDSITSYLKGEAGKFEANGSHTEITPEAKTKSYFPESQNDVGKQSTKETLKPKIHGSGHVEEPASPLAAYQKSLEETSKLIIEETKPCVPVSMKKMSRTSPADGKPRLSLHEEEGSSGSEQKQGEGFKVKTKKEIRHVEKKSHS

SEQ ID NO: 66274 - protein, 475 aa, Homo sapiens
MRTCTCRQDSKQLRMSLPSRQTAIIVNPPPPEYINTKKNGRLTNQLQYLQKVVLKDLWKHSFSWPFQRPVDAVKLQLPDYYTIIKNPMDLNTIKKRLENKYYAKASECIEDFNTMFSNCYLYNKPGDDIVLMAQALEKLFMQKLSQMPQEEQVVGVKERIKKGTQQNIAVSSAKEKSSPSATEKVFKQQEIPSVFPKTSISPLNVVQGASVNSSSQTAAQVTKGVKRKADTTTPATSAVKASSEFSPTFTEKSVALPPIKENMPKNVLPDSQQQYNVVKTVKVTEQLRHCSEILKEMLAKKHFSYAWPFYNPVDVNALGLHNYYDVVKNPMDLGTIKEKMDNQEYKDAYKFAADVRLMFMNCYKYNPPDHEVVTMARMLQDVFETHFSKIPIEPVESMPLCYIKTDITETTGRENTNEASSEGNSSDDSEDERVKRLAKLQEQLKAVHQQLQVLSQVPFRKLNKKKEKSKKEKKK

SEQ ID NO: 66275 - protein, 121 aa, Homo sapiens
MPAALVENSQVICEVWASNLEEEMRKIREIVLSYSYIAMDTEFPGVVVRPIGEFRSSIDYQYQLLRCNVDLLKIIQLGLTFTNEKGEYPSGINTWQFNFKFNLTGYDFGYMVKLLTDSRLP

SEQ ID NO: 66276 - protein, 564 aa, Homo sapiens
MAEDKSKRDSIEMSMKGCQTNNGFVHNEDILEQTPDPGSSTDNLKHSTRGILGSQEPDFKGVQPYAGMPKEVLFQFSGQARYRIPREILFWLTVASVLVLIAATIAIIALSPKCLDWWQEGPMYQIYPRSFKDSNKDGNGDLKGIQDKLDYITALNIKTVWITSFYKSSLKDFRYGVEDFREVDPIFGTMEDFENLVAAIHDKGLKLIIDFIPNHTSDKHIWFQLSRTRTGKYTDYYIWHDCTHENGKTIPPNNWLSVYGNSSWHFDEVRNQCYFHQFMKEQPDLNFRNPDVQEEIKEILRFWLTKGVDGFSLDAVKFLLEAKHLRDEIQVNKTQIPDTVTQYSELYHDFTTTQVGMHDIVRSFRQTMDQYSTEPGRYRFMGTEAYAESIDRTVMYYGLPFIQEADFPFNNYLSMLDTVSGNSVYEVITSWMENMPEGKWPNWMIGGPDSSRLTSRLGNQYVNVMNMLLFTLPGTPITYYGEEIGMGNIVAANLNESYDINTLRSKSPMQWDNSSNAGFSEASNTWLPTNSDYHTVNVDSCSVTHARVQWRDLGTLQPLLPGFK

SEQ ID NO: 66277 - protein, 91 aa, Homo sapiens
MPVDFTGYWKMLVNENFEEYLRALDVNVALRKIANLLKPDKEIVQDGDHMIIRTLSTFRNYIMDFQVGKEFEEDLTGIDDRKCMSETGFSS

SEQ ID NO: 66278 - protein, 323 aa, Homo sapiens
MVKLLVAKILCMVGVFFFMLLGSLLPVKIIETDFEKAHRSKKILSLCNTFGGGVFLATCFNALLPAVREKLQKVLSLGHISTDYPLAETILLLGFFMTVFLEQLILTFRKEKPSFIDLETFNAGSDVGSDSEYESPFMGGARGHALYVEPHGHGPSLSVQGLSRASPVRLLSLAFALSAHSVFEGLALGLQEEGEKVVSLFVGVAVHETLVAVALGISMARSAMPLRDAAKLAVTVSAMIPLGIGLGLGIESAQGVPGSVASVLLQGLAGGTFLFITFLEILAKELEEKSDRLLKVLFLVLGYTVLAGMVFLKWISPPEPRVS

SEQ ID NO: 66279 - protein, 156 aa, Homo sapiens
MPVPASWPHPPCPFLLLTLLLGLTGVAGEDELQVIQPEKSVSVAAGESATLRCAMTSLIPVGPIMWFRGAGAGRELIYNQKEGHFPRVTTVSELTKRNNLDFSISISNITPADAGTYYCVKFRKGSPDDVEFKSGAGTELSVREAALAPTAPLLVA

SEQ ID NO: 66280 - protein, 1169 aa, Homo sapiens
MDPSAPQPRAETSGKDIWHPGERCLAPSPDNGKLCEASIKSITVDENGKSFAVVLYADFQERKIPLKQLQEVKFVKDCPRNLIFDDEDLEKPYFPNRKFPSSSVAFKLSDNGDSIPYTINRYLRDYQREGTRFLYGHYIHGGGCILGDDMGLGKTVQVISFLAAVLHKKGTREDIENNMPEFLLRSMKKEPLSSTAKKMFLIVAPLSVLYNWKDELDTWGYFRVTVLHGNRKDNELIRVKQRKCEIALTTYETLRLCLDELNSLEWSAVIVDEAHRIKNPKARVTEVMKALKCNVRIGLTGTILQNNMKELWCVMDWAVPGLLGSGTYFKKQFSDPVEHGQRHTATKRELATGRKAMQRLAKKMSGWFLRRTKTLIKDQLPKKEDRMVYCSLTDFQKAVYQTVLETEDVTLILQSSEPCTCRSGQKRRNCCYKTNSHGETVKTLYLSYLTVLQKVANHVALLQAASTSKQQETLIKRICDQVFSRFPDFVQKSKDAAFETLSDPKYSGKMKVLQQLLNHCRKNRDKVLLFSFSTKLLDVLQQYCMASGLDYRRLDGSTKSEERLKIVKEFNSTQDVNICLVSTMAGGLGLNFVGANVVVLFDPTWNPANDLQAIDRAYRIGQCRDVKVLRLISLGTVEEIMYLRQIYKQQLHCVVVGSENAKRYFEAVQGSKEHQGELFGIHNLFKFRSQGSCLTKDILEREGQVEAGIMTATTWLKEGPPAHKLEMPRQPDCQECRGTEQAAEPLAKEACDLCSDFSDEEPVGATGIKTAKNKAPDSSKASSSPGQLTLLQCGFSKLLETKCKAVEDSDGNTASDDESSDEQPTCLSTEAKDAGCEKNQDSLGTSKHQKLDNILNPKEKHIFYKSEKILEQNISSKSDEKKIKNTDKHCILQNVTESEDSDVICPTQYTTERFPDNSIRFKPPLEGSEDSETEHTVKTRNNDNSRNTDDKRNGIISKKLSPENTTLKSILKRKGTSDISDESDDIEISSKSRVRKRASSLRFKRIKETKKELHNSPKTMNKTNQVYAANEDHNSQFIDDYSSSDESLSVSHFSFSKQSHRPRTIRDRTSFSSKLPSHNKKNSTFIPRKPMKCSNEKVVNQEQSYESMDKFLDGVQEVAYIHSNQNVIGSSKAENHMSRWAAHDVFELKQFSQLPANIAVCSSKKFGRS

SEQ ID NO: 66281 - protein, 122 aa, Homo sapiens
  MOD_RES (1)..(1): Any amino acid
XQTAYFIGIFTFLWVERPMTAKKKPNFILLLKALLLSSYGKLLLIPAVIWEHDYTSVCLKLIKVFVLTSNFQAIRVTLNINRKLSFLAVLSGLLLESIMVYFFQSMEWDVGSDYAIFKSQDF

SEQ ID NO: 66282 - protein, 326 aa, Homo sapiens
MMTDLKQSHSVRLNDGPFMPVLGFGTYAPDHTPKSQAAEATKVAIDVGFRHIDSAYLYQNEEEVGQAIWEKIADGTVKREEIFYTIKLWATFFRAELVHPALERSLKKLGPDYVDLFIIHVPFAMKPGKELLPKDASGEIILETVELCDTWEALEKCKEAGLTRSIGVSNFNHKLLELILNKPGLKYKPTCNQVECHPYLNQSKLLEFCKSKDIVLVAYSALGSQRDPQWVDPDCPHLLEEPILKSIAKKHSGSPGQVALRYQLQRGVVVLAKSFSQERIKENFQIFDFELTPEDMKAIDGLNRNLRYDKLQFAANHPYFPFSEEY

SEQ ID NO: 66283 - protein, 288 aa, Homo sapiens
MVKKRLPSSDTVFRFETPGSPRKANVEASRSSTDSPSSVFLSSEAENGVEEKKKACRSPTAQSPTPSVEADSPDQKKIISLWSKSSFDGASLASDKNDCKTESKNDPKTERKKSSSSSQYKANMHFHKLFLSVPTEEPLKQSFTCALQKEILYQGKLFVSENWICFHSKVFGKDTKISIPAFSVTLIKKTKTALLVPNALIIATVTDRYIFVSLLSRDSTYKLLKSVCGHLENTSVGNSPNPSSAENSFRADRPSSLPLDFNDEFSDLDGVVQQRRQDMEGYSSSGSQ

SEQ ID NO: 66284 - protein, 1518 aa, Homo sapiens
MAAVGSGGYARNDAGEKLPSVMAGVPARRGQSSPPPAPPICLRRRTRLSTASEETVQNRVSLEKVLGITAQNSSGLTCDPGTGHVAYLAGCVVVILDPKENKQQHIFNTARKSLSALAFSPDGKYIVTGENGHRPAVRIWDVEEKNQVAEMLGHKYGVACVAFSPNMKHIVSMGYQHDMVLNVWDWKKDIVVASNKVSCRVIALSFSEDSSYFVTVGNRHVRFWFLEVSTETKVTSTVPLVGRSGILGELHNNIFCGVACGRGRMAGSTFCVSYSGLLCQFNEKRVLEKWINLKVSLSSCLCVSQELIFCGCTDGIVRIFQAHSLHYLANLPKPHYLGVDVAQGLEPRKAEAVYPDTVALTFDPIHQWLSCVYKDHSIYIWDVKDINRVGKVWSELFHSSYVWNVEVYPEFEDQRACLPSGSFLTCSSDNTIRFWNLDSSPDSHWQKNIFSNTLLKVVYVENDIQHLQDMSHFPDRGSENGTPMDVKAGVRVMQVSPDGQHLASGDRSGNLRIHELHFMDELVKVEAHDAEVLCLEYSKPETGLTLLASASRDRLIHVLNVEKNYNLEQTLDDHSSSITAIKFAGNRDIQMISCGADKSIYFRSAQQGSDGLHFVRTHHVAEKTTLYDMDIDITQKYVAVACQDRNVRVYNTVNGKQKKCYKGSQGDEGSLLKVHVDPSGTFLATSCSDKSISVIDFYSGECIAKMFGHSEIITSMKFTYDCHHLITVSGDSCVFIWHLGPEITNCMKQHLLEIDHRQQQQHTNDKKRSGHPRQDTYVSTPSEIHSLSPGEQTEDDLEEECEPEEMLKTPSKDSLDPDPRCLLTNGKLPLWAKRLLGDDDVADGLAFHAKRSYQPHGRWAERAGQEPLKTILDAQDLDCYFTPMKPESLENSILDSLEPQSLASLLSESESPQEAGRGHPSFLPQQKESSEASELILYSLEAEVTVTGTDSQYCRKEVEAGPGDQQGDSYLRVSSDSPKDQSPPEDSGESEADLECSFAAIHSPAPPPDPAPRFATSLPHFPGCAGPTEDELSLPEGPSVPSSSLPQTPEQEKFLRHHFETLTESPCRELFPAALGDVEASEAEDHFFNPRLSISTQFLSSLQKASRFTHTFPPRATQCLVKSPEVKLMDRGGSQPRAGTGYASPDRTHVLAAGKAEETLEAWRPPPPCLTSLASCVPASSVLPTDRNLPTPTSAPTPGLAQGVHAPSTCSYMEATASSRARISRSISLGDSEGPIVATLAQPLRRPSSVGELASLGQELQAITTATTPSLDSEGQEPALRSWGNHEARANLRLTLSSACDGLLQPPVDTQPGVTVPAVSFPAPSPVEESALRLHGSAFRPSLPAPESPGLPAHPSNPQLPEARPGIPGGTASLLEPTSGALGLLQGSPARWSEPWVPVEALPPSPLELSRVGNILHRLQTTFQEALDLYRVLVSSGQVDTGQQQARTELVSTFLWIHSQLEAECLVGTSVAPAQALPSPGPPSPPTLYPLASPDLQALLEHYSELLVQAVRRKARGH

SEQ ID NO: 66285 - protein, 1162 aa, Homo sapiens
MLVGQGAGPLGPAVVTAAVVLLLSGVGPAHGSEDIVVGCGGFVKSDVEINYSLIEIKLYTKHGTLKYQTDCAPNNGYFMIPLYDKGDFILKIEPPLGWSFEPTTVELHVDGVSDICTKGGDINFVFTGFSVNGKASTTVRVTNSNANAASPLIVAGYNVSGSVRSDGEPMKGVKFLLFSSLVTKEDVLGCNVSPVPGFQPQDESLVYLCYTVSREDGSFSFYSLPSGGYTVIPFYRGERITFDVAPSRLDFTVEHDSLKIEPVFHVMGFSVTGRVLNGPEGDGVPEAVVTLNNQIKVKTKADGSFRLENITTGTYTIHAQKEHLYFETVTIKIAPNTPQLADIVATGFSVCGQISIIRFPDTVKQMNKYKVVLSSQDKDKSLVTVETDAHGSFCFKANPGTYKVQVMVPEAETRAGLTLKPQTFPLTVTDRPVMDVAFVQFLASVSGKVSCLDTCGDLLVTLQSLSRQGEKRSLQLSGKVNAMTFTFDNVLPGKYKISIMHEDWCWKNKSLEVEVLEDDVSAVEFRQTGYMLRCSLSHAITLEFYQDGNGRENVGIYNLSKGVNRFCLSKPGVYKVTPRSCHRFEQAFYTYDTSSPSILTLTAIRHHVLGTITTDKMMDVTVTIKSSIDSEPALVLGPLKSVQELRREQQLAEIEARRQEREKNGNEEGEERMTKPPVQEMVDELQGPFSYDFSYWARSGEKITVTPSSKELLFYPPSMEAVVSGESCPGKLIEIHGKAGLFLEGQIHPELEGVEIVISEKGASSPLITVFTDDKGAYSVGPLHSDLEYTVTSQKEGYVLTAVEGTIGDFKAYALAGVSFEIKAEDDQPLPGVLLSLSGGLFRSNLLTQDNGILTFSNLSPGQYYFKPMMKEFRFEPSSQMIEVQEGQNLKITITGYRTAYSCYGTVSSLNGEPEQGVAMEAVGQNDCSIYGEDTVTDEEGKFRLRGLLPGCVYHVQLKAEGNDHIERALPHHRVIEVGNNDIDDVNIIVFRQINQFDLSGNVITSSEYLPTLWVKLYKSENLDNPIQTVSLGQSLFFHFPPLLRDGENYVVLLDSTLPRSQYDYILPQVSFTAVGYHKHITLIFNPTRKLPEQDIAQGSYIALPLTLLVLLAGYNHDKLIPLLLQLTSRLQGVGALGQAASDNSGPEDAKRQAKKQKTRRT

SEQ ID NO: 66286 - protein, 171 aa, Homo sapiens
MVWKWMPLLLLLVCVATMCSAQDRTDLLNVCMDAKHHKTKPGPEDKLHDQCSPWKKNACCTASTSQELHKDTSRLYNFNWDHCGKMEPACKRHFIQDTCLYECSPNLGPWIQQVNQSWRKERFLDVPLCKEDCQRWWEDCHTSHTCKSNWHRGWDWTSGVNKCPAGALCRT

SEQ ID NO: 66287 - protein, 112 aa, Homo sapiens
MCQVHAQKPHSGPQVLGLRLLQTARLPGAWRAPHPLPRLWGRQAQPLRQKLRTGVLGPEGRPRPARAPGPVGLPCLYPAQRTAGQALRRLPHASAPGGPAAGGRAPEAQGEH

SEQ ID NO: 66288 - protein, 240 aa, Homo sapiens
MPSDLAKKKAAKKKEAAKARQRPRKGHEENGDVVTEPQVAEKNEANGRETTEVDLLTKELEDFEMKKAAARAVTGVLASHPNSTDVHIINLSLTFHGQELLSDTKLELNSGRRYGLIGLNGIGKSMLLSAIGKREVPIPEHIDIYHLTREMPPSDKTPLHCVMEVDTERAMLEKEAERLAHEDAECEKLMELYERLEELDADKAEMRASRILHGLGFTPAMQRKKLKDFSGGWRMRVALA

SEQ ID NO: 66289 - protein, 156 aa, Homo sapiens
MNPDLRRERDSASFNPELLTHILDGSPEKTRRRREIENMILNDPDFQHEDLNFLTRSQRYEVAVRKSAIMVKKMREFGIADPDEIMWFKKLHLVNFVEPVGLNYSMFIPTLLNQGTTAQKEKWLLSSKGLQIIGTYAQTEMGHVGKTSNHAIVLAQ

SEQ ID NO: 66290 - protein, 173 aa, Homo sapiens
MESEQLFHRGYYRNSYNSITSASSDEELLDGAGVIMDFQTSEDDNLLDGDTAVGTHYTMTNGGSINSSTHLLDLLDEPIPGVGTYDDFHTIDWVREKCKDRERHRRINSKKKESAWEMTKSLYDAWSGWLVVTLTGLASGALAGLIDIAADWMTDLKEGICLSALWYNHEQCC

SEQ ID NO: 66291 - protein, 155 aa, Homo sapiens
MDVGSKEVLMESPPVLEMSIGAPEAQQRLALSEHLVTTATFSIGSTGLVVYDYQQLLIAYKPAPGTCCYIMKIAPESIPSLEALTRKVHNFQGQWKPQRERKRPGQRVFCSFCRRARSCFCPHRRDKPWRNGSLGRGWEWAEVAPRGPGTPATTE

SEQ ID NO: 66292 - protein, 577 aa, Homo sapiens
MVVSAGHWSSEKAEMNILEINETLRPQLPENKQQLRNLKEKCFLTQLAGFLANRQKKYKYEECKDLIKFMLRNERQFKEEKLAEQLKQAEELRQYKVLVHSQERELTQLKEKLREGRDASRSLNEHLQALLTPDEPDKSQGQDLQEQLAEGCRLAQHLVQKLSPENDEDEDEDVQVEEDEKVLESSAPREMQKAEEKEVPEDSLEECAITCSNSHGPYDCNQPHRKTKITFEEDKVDSTLIGSSSHVEWEDAVHIIPENESDDEEEEEKGPVSPRNLQESEEEEVPQESWDEGYSTLSIPPEMLASYKSYSSTFHSLEEQQVCMAVDIGRHRWDQVKKEDHEATGPRLSRELLDEKEPEVLQDSLGRCYSTPSGYLELPDLGQPYSSAVYSLEEQYLGLALDVDRIKKDQEEEEDQGPPCPRLSRELLEVVEPEVLQDSLDRCYSTPSSCLEQPDSCQPYGSSFYALEEKHVGFSLDVGEIEKYQEVEEDQDPSCPRLNSMLMEVEEPEVLQDSLDICYSTPSMYFELPDSFQHYRSVFYSFEEEHISFALYVDNRFFTLTVTSLHLVFQMGVIFPQ

SEQ ID NO: 66293 - protein, 60 aa, Homo sapiens
  MOD_RES (1)..(1): Any amino acid
XGRLEYWNPDNKCCSSCLQRFGPPPCPGENPRPSLAWAELAEAGPCQGALPPHTWKPRRP

SEQ ID NO: 66294 - protein, 1714 aa, Homo sapiens
MSVSRTMEDSCELDLVYVTERIIAVSFPSTANEENFRSNLREVAQMLKSKHGGNYLLFNLSERRPDITKLHAKVLEFGWPDLHTPALEKICSICKAMDTWLNADPHNVVVLHNKGNRGRIGVVIAAYMHYSNISASADQALDRFAMKRFYEDKIVPIGQPSQRRYVHYFSGLLSGSIKMNNKPLFLHHVIMHGIPNFESKGGCRPFLRIYQAMQPVYTSGIYNIPGDSQTSVCITIEPGLLLKGDILLKCYHKKFRSPARDVIFRVQFHTCAIHDLGVVFGKEDLDDAFKDDRFPEYGKVEFVFSYGPEKIQGMEHLENGPSVSVDYNTSDPLIRWDSYDNFSGHRDDGMEEVVGHTQGPLDGSLYAKVKKKDSLHGSTGAVNATRPTLSATPNHVEHTLSVSSDSGNSTASTKTDKTDEPVPGASSATAALSPQEKRELDRLLSGFGLEREKQGAMYHTQHLRSRPAGGSAVPSSGRHVVPAQVHVNGGALASERETDILDDELPNQDGHSAGSMGTLSSLDGVTNTSEGGYPEALSPLTNGLDKSYPMEPMVNGGGYPYESASRAGPAHAGHTAPMRPSYSAQEGLAGYQREGPHPAWPQPVTTSHYAHDPSGMFRSQSFSEAEPQLPPAPVRGGSSREAVQRGLNSWQQQQQQQQQPRPPPRQQERAHLESLVASRPSPQPLAETPIPSLPEFPRAASQQEIEQSIETLNMLMLDLEPASAAAPLHKSQSVPGAWPGASPLSSQPLSGSSRQSHPLTQSRSGYIPSGHSLGTPEPAPRASLESVPPGRSYSPYDYQPCLAGPNQDFHSKSPASSSLPAFLPTTHSPPGPQQPPASLPGLTAQPLLSPKEATSDPSRTPEEEPLNLEGLVAHRVAGVQAREKQPAEPPAPLRRRAASDGQYENQSPEATSPRSPGVRSPVQCVSPELALTIALNPGGRPKEPHLHSYKEAFEEMEGTSPSSPPPSGVRSPPGLAKTPLSALGLKPHNPADILLHPTGEPRSYVESVARTAVAGPRAQDSEPKSFSAPATQAYGHEIPLRNGTLGGSFVSPSPLSTSSPILSADSTSVGSFPSGESSDQGPRTPTQPLLESGFRSGSLGQPSPSAQRNYQSSSPLPTVGSSYSSPDYSLQHFSSSPESQARAQFSVAGVHTVPGSPQARHRTVGTNTPPSPGFGWRAINPSMAAPSSPSLSHHQMMGPPGTGFHGSTVSSPQSSAATTPGSPSLCRHPAGVYQVSGLHNKVATTPGSPSLGRHPGAHQGNLASGLHSNAIASPGSPSLGRHLGGSGSVVPGSPCLDRHVAYGGYSTPEDRRPTLSRQSSASGYQAPSTPSFPVSPAYYPGLSSPATSPSPDSAAFRQGSPTPALPEKRRMSVGDRAGSLPNYATINGKVSSPVASGMSSPSGGSTVSFSHTLPDFSKYSMPDNSPETRAKVKFVQDTSKYWYKPEISREQAIALLKDQEPGAFIIRDSHSFRGAYGLAMKVSSPPPTIMQQNKKGDMTHELVRHFLIETGPRGVKLKGCPNEPNFGSLSALVYQHSIIPLALPCKLVIPNRDPTDESKDSSGPANSTADLLKQGAACNVLFVNSVDMESLTGPQAISKATSETLAADPTPAATIVHFKVSAQGITLTDNQRKLFFRRHYPLNTVTFCDLDPQERKWMKTEGGAPAKLFGFVARKQGSTTDNACHLFAELDPNQPASAIVNFVSKVMLNAGQKR

SEQ ID NO: 66295 - protein, 24 aa, Homo sapiens
  MOD_RES (1)..(1): Any amino acid
XRVVQAGVQWHNHGSLQPRSPGFK

SEQ ID NO: 66296 - protein, 325 aa, Homo sapiens
MVRRDRLRRMREWWVQVGLLAVPLLAAYLHIPPPQLSPALHSWKSSGKFFTYKGLRIFYQDSVGVVGSPEIVVLLHGFPTSSYDWYKIWEGLTLRFHRVIALDFLGFGFSDKPASIVEALLRHLGLQNRRINLLSHDYGDIVAQELLYRYKQNRSGRLTIKSLCLSNGGIFPETHRPLLLQKLLKDGGVLSPILTRLMNFFVFSRGLTPVFGPYTRPSESELWDMWAGIRNNDGNLVIDSLLQYINQRKKFRRRWVGALASVTIPIHFIYGPLDPVNPYPEFLELYRKTLPRSTVSILDDHISHYPQLEDPMGFLNAYMGFINSF

SEQ ID NO: 66297 - protein, 101 aa, Homo sapiens
MSVNVNRSVSDQFYRYKMPRLIAKVEGKGNGIKTVIVNMVDVAKALNRPPTYPTKYFGCELGAQTQFDVKNDRYIVNGSHEANKLQDMLDGFIKKFVLCPE

SEQ ID NO: 66298 - protein, 44 aa, Homo sapiens
MDPNCSCAAGVSCTCAGSCKCKECKCTSCKKSECEAISMVWGCG

SEQ ID NO: 66299 - protein, 206 aa, Homo sapiens
MSLHGKRKEIYKYEAPWTVYAMNWSVRPDKRFRLALGSFVEEYNNKVGETETRLECLLNNNKNSDFCAPLTSFDWNEVDPYLLGTSSIDTTCTIWGLETGQVLGRVNLVSGHVKTQLIAHDKEVYDIAFSRAGGGRDMFASVGADGSVRMFDLRHLEHSTIIYEDPQHHPLLRLCWNKQDPNYLATMAMDGMEVVILDVRVPCTPV

SEQ ID NO: 66300 - protein, 41 aa, Homo sapiens
MAAAALPAWLSLQSRARTLRAFSTAVYSATPVPTPSLRTTS

SEQ ID NO: 66301 - protein, 76 aa, Homo sapiens
MAEYTRLHNALALIRLRNPPVNAISTTLLRDIKEGLQKAVIDHTIKAIVICGAEGKFSAGNSSLTLSHHLWNPATD

SEQ ID NO: 66302 - protein, 110 aa, Homo sapiens
  MOD_RES (1)..(1): Any amino acid
XSDKIRTVQDALESLVARESVQGYTTKTKQEVEISRRVTLEKLPPVLVLHLKRFVYEKTGGCQKLIKNIEYPVDLEISKVVYHHGNSATGGHYTTDVFQIGLNGWLRIDD

SEQ ID NO: 66303 - protein, 283 aa, Homo sapiens
  MOD_RES (1)..(1): Any amino acid
XRGPQWKANPHPFACSVEDPTKQTKFKGIKSYISYKLTPTHAASPVYRRYKHFDWLYNRLLHKFTVISVPHLPEKQATGRFEEDFIEKRKRRLILWMDHMTSHPVLSQYEGFQHFLSCLDDKQWKMGKRRAEKDEMVGASFLLTFQIPTEHQDLQDVEDRVDTFKAFSKKMDDSVLQLSTVASELGLLSNFPDIIHLQKGAFAKVKESQRMSDEGRMVQDEADGIRRRCRVVGFALQAEMNHFHQRRELDFKHMMQNYLRQQILFYQRVGQQLEKTLRMYDNL

SEQ ID NO: 66304 - protein, 388 aa, Homo sapiens
MPSRAEDYEVLYTIGTGSYGRCQKIRRKSDGKILVWKELDYGSMTEAEKQMLVSEVNLLRELKHPNIVRYYDRIIDRTNTTLYIVMEYCEGGDLASVITKGTKERQYLDEEFVLRVMTQLTLALKECHRRSDGGHTVLHRDLKPANVFLDGKQNVKLGDFGLARILNHDTSFAKTFVGTPYYMSPEQMNRMSYNEKSDIWSLGCLLYELCALMPPFTAFSQKELAGKIREGKFRRIPYRYSDELNEIITRMLNLKDYHRPSVEEILENPLIADLVADEQRRNLERRGRQLGEPEKSQDSSPVLSELKLKEIQLQERERALKAREERLEQKEQELCVRERLAEDKLARAENLLKNYSLLKERKFLSLASNPESHFVAQAGMQWCDHSSM

SEQ ID NO: 66305 - protein, 136 aa, Homo sapiens
MVQKKKFCPRLLDYLVIVGARHPSSDSVAQTPELLRRYPLEDHTEFPLPPDVVFFCQPEGCLSVRQRRMSLRDDTSFVFTLTDKDTGVTRYGICVNFYRSFQKRISKEKGEGGAGSRGKEGTHATCASEEGGTESS

SEQ ID NO: 66306 - protein, 70 aa, Homo sapiens
MAAAAAEQQQFYLLLGNLLSPDNVVRKQAEETYENIPGQSKITFLLQAIRNTTAAEEARQMAAVLLRRLL

SEQ ID NO: 66307 - protein, 95 aa, Homo sapiens
DPAFLYLLSAPREAPATGPSPQHPQKMDGELGRLFPPSLGLPPGPQPAASSLPSPLQPSWSCPSCTFINAPDRPGCEMCSTQRPCTWDPLAAAST

SEQ ID NO: 66308 - protein, 196 aa, Homo sapiens
MAETEALSKLREDFRMQNKSVFILGASGETGRVLLKEILEQGLFSKVTLIGRRKLTFDEEAYKNVNQEVVDFEKLDDYASAFQGHDVGFCCLGTTRGKAGAGEVEAKVEELKFDRYSVFRPGVLLCDRQESRPGEWLVRKFFGSLPDSWASGHSVPVVTVVRAMLNNVVRPRDKQMELLENKAIHDLGKAHGSLKP

SEQ ID NO: 66309 - protein, 216 aa, Homo sapiens
MQTSETGSDTGSTVTLQTSVASQAAVPTQVVQQVPVQQQVQQVQTVQQVQHVYPAQVQYVEGSDTVYTNGAIRTTTYPYTETQMYSQNTGGNYFDTQGSSAQVTTVVSSHSMVGTGGIQMGVTGGQLISSSGGTYLIGNSMENSGHSVTHTTRASPATLQWLLDNYETAEGVSLPRSTLYNHYLRHCQEHKLDPVNAASFGKLIRSIFMGLRTRRL

SEQ ID NO: 66310 - protein, 45 aa, Homo sapiens
MFGQNLEVQLSSARTENTTVVWKSFHDRSPGGNVGQGQGLGDSPC

SEQ ID NO: 66311 - protein, 881 aa, Homo sapiens
VMAFGILNYFRDAWNIFDFVTVLGSITDILVTEFGNPNNFINLSFLRLFRAARLIKLLRQGYTIRILLWTFVQSFKALPYVCLLIAMLFFIYAIIGMQVFGNIGIDVEDEDSDEDEFQITEHNNFRTFFQALMLLFRSATGEAWHNIMLSCLSGKPCDKNSGILTRECGNEFAYFYFVSFIFLCSFLMLNLFVAVIMDNFEYLTRDSSILGPHHLDEYVRVWAEYDPAAWGRMPYLDMYQMLRHMSPPLGLGKKCPARVAYKRLLRMDLPVADDNTVHFNSTLMALIRTALDIKIAKGGADKQQMDAELRKEMMAIWPNLSQKTLDLLVTPHKSTDLTVGKIYAAMMIMEYYRQSKAKKLQAMREEQDRTPLMFQRMEPPSPTQEGGPGQNALPSTQLDPGGALMAHESGLKESPSWVTQRAQEMFQKTGTWSPEQGPPTDMPNSQPNSQSVEMREMGRDGYSDSEHYLPMEGQGRAASMPRLPAENQTISDTSPMKRSASVLGPKARRLDDYSLERVPPEENQRHHQRRRDRSHRASERSLGRYTDVDTGLGTDLSMTTQSGDLPSKERDQERGRPKDRKHRQHHHHHHHHHHPPPPDKDRYAQERPDHGRARARDQRWSRSPSEGREHMAHRQGSSSVSGSPAPSTSGTSTPRRGRRQLPQTPSTPRPHVSYSPVIRKAGGSGPPQQQQQQQQQQQQQAVARPGRAATSGPRRYPGPTAEPLAGDRPPTGGHSSGRSPRMERRVPGPARSESPRACRHGGARWPASGPHVSEGPPGPRHHGYYRGSDYDEADGPGSGGGEEAMAGAYDAPPPVRHASSGATGRSPRTPRASGPACASPSRHGRRLPNGYYPAHGLARPRGPGSRKGLHEPYSESDDDWC

SEQ ID NO: 66312 - protein, 184 aa, Homo sapiens
MPRAPKRQRCMPEEDLQSQSETQGLEGAQAPLAVEEDASSSTSTSSSFPSSFPSSSSSSSSSCYPLIPSTPEEVSADDETPNPPQSAQIACSSPSVVASLPLDQSDEGSSSQKEESPSTLQVLPDSESLPRSEIDEKVTDLVQFLLFKYQMKEPITKAEILESVIRNYEDHFPLLFSEASECML

SEQ ID NO: 66313 - protein, 68 aa, Homo sapiens
MALELYMDLLSAPCRAVYIFSKKHDIQFNFQFVDLLKGHHHSKGYIDINPLRKLPSLKDGKFILSESC

SEQ ID NO: 66314 - protein, 738 aa, Homo sapiens [sequence omitted]

SEQ ID NO: 66315 - protein, 302 aa, Homo sapiens
NLLAEKVEQLMEWSSRRSIFRMNGDKFRKFIKAPPRNYSMIVMFTALQPQRQCSVCRQANEEYQILANSWRYSSAFCNKLFFSMVDYDEGTDVFQQLNMNSAPTFMHFPPKGRPKRADTFDLQRIGFAAEQLAKWIADRTDVHIRVFRPPNYSGTIALALLVSLVGGLLYLRRNNLEFIYNKTGWAMVSLCIVFAMTSGQMWNHIRGPPYAHKNPHNGQVSYIHGSSQAQFVAESHIILVLNAAITMGMVLLNEAATSKGDVGKRRIICLVGLGLVVFFFSFLLSIFRSKYHGYPYSDLDFE

SEQ ID NO: 66316 - protein, 2542 aa, Homo sapiens
MFSKKPHGDVKKSTQKVLDTKKDALTRLKHLRIVIENAESIDLKQFFDQHFSHIYYVFFENFVTIEASLKQKGHKSQREELDAILFIFEKILQLLPERIHQRWQFHSIGLILKKLLHTGNSLKIRREGVRLFLLWLQALQNNCSKEQLWMFSCLIPGFSAPQSEHGPRTLDNLINPPLNLQETQVTIEEITPLVPPQSGDKGQEDLTSYFLEALLKYIVIQVKSLEWKNKENQERGFSFLFSHFKKYYLPYIFPNICKENSLYHPILDIPQMRPKPHYVVIKKDAETNEAIYCTKEPFIKARVIVIRWLVSFWLEPKPHTGPHIPGMEGEVLPKNIQRAAASLVSREESKNDNADKTDRTTEPEQSHSNTSTLTEREPSSSSLCSIDEEHLTDIEIVRRVFSSKRSNVNFVTEIFRQAFLLPICEAAAMRKVVKVYQEWIQQEEKPLFMQEPEEIVITSSDLPCIENVTDHDISMEEGEKREEENGTNTADHVRNSSWAKNGSYQGALHNASEEATEQNIRAGTQAVLQVFIINSSNIFLLEPANEIKNLLDEHTDMCKRILNIYRYMVVQVSMDKKTWEQMLLVLLRVTESVLKMPSQAFLQFQGKKNMTLAGRLAGPLFQTLIVAWIKANLNVYISRELWDDLLSVLSSLTYWEELATEWSLTMETLTKVLARNLYSLDLSDLPLDKLSEQKQKKHKGKGVGHEFQKVSVDKSFSRGWSRDQPGQAPMRQRSATTTGSPGTEKARSIVRQKTVAMRSRSIGECALPSAYIRSAKSAPVLIHTSKPFLPDIVLTPLSDELSDIDDAQILPRSTRVRHFSQSEETGNEVFGALNEEQPLPRSSSTSDILEPFTVERAKGAVPVIDSSSRHAPSLQSSTEASSITRSTESHITDTHSRESSLEVGDSIYDHLCHLIGPVELADSAFEQIQYIDLEGDDDLLSTLKEYFKENQENHSKNETGKDPASQEVTIAVNRGERLSLDKLECTDQETESENITSFVGTPENLQFQKEPNSAVFMSNIAPNQSDSFFRTQTSEKSKQLNTDKQPSEPSLDSPCDKEKRKHLYRQAATELDACVDVTLVEKLKSVQINEKITVPHVMRAKKATLKAPVNRRMPHVTSTSKLSPTKRSLSETVTHRAKIMKIATKKRNSVHVTFRPSTESVQFYNPLENKEAPWKMRLRKLGGFSSGSSNSSTSNTHTSTNSATELVKPGVYRPLDTLGTASVSSKTVKESTEIPTTILQKEGIASSQLGSRSTLRSSSHEAGLQQGSLGGVYKTVVHALSKPKANVSPQRQNRMPPEAPLRDLYSHVMGYFGRKAAVNKEDMSQKLPPLNSDIGGSSANVPDLMDEFIAERLRSGNASTMTRRGSSPGSLEIPKDLPDILNKQNQMRPIDDPGVPSEWTSPASAGSSDLISSDSHSDSFSAFQYDGRKFDNFGFGTDTGVTSSADVDSGSGHHQSAEEQEVASLTTLHIDSETSSLNQQAFSAEVATITGSESASPVHSPLGSRSQTPSPSTLNIDHMEQKDLQLDEKLHHSVLQTPDDLEISEFPSECCSVMAGGTLTGWHADVATVMWRRMLGILGDVNSIMDPEIHAQVFDYLCELWQNLAKIRDNLGISTDNLTSPSPPVLIPPLRILTPWLFKATMLTDKYKQGKLHAYKLICNTMKRRQDVSPNRDFLTHFYNIMHCGLLHIDQDIVNTIIKHCSPQFFSLGLPGATMLIMDFIVAAGRVASSAFLNAPRVEAQVLLGSLVCFPNLYCELPSLHPNIPDVAVSQFTDVKELIIKTVLSSARDEPSGPARCVALCSLGIWICEELVHESHHPQIKEALNVICVSLKFTNKTVAHVACNMLHMLVHYVPRLQIYQPDSPLKIIQILIATITHLLPSTEASSYEMDKRLVVSLLLCLLDWIMALPLKTLLQPFHATGAESDKTEKSVLNCIYKVLHGCVYGAQCFSNPRYFPMSLSDLASVDYDPFMHLESLKEPEPLHSPDSERSSKLQPVTEVKTQMQHGLISIAARTVITHLVNHLGHYPMSGGPAMLTSQVCENHDNHYSESTELSPELFESPNIQFFVLNNTTLVSCIQIRSEENMPGGGLSAGLASANSNVRIIVRDLSGKYSWDSAILYGPPPVSGLSEPTSFMLSLSHQEKPEEPPTSNECLEDITVKDGLSLQFKRFRETVPTWDTIRDEEDVLDELLQYLGVTSPECLQRTGISLNIPAPQPVCISEKQENDVINAILKQHTEEKEFVEKHFNDLNMKAVEQDEPIPQKPQSAFYYCRLLLSILGMNSWDKRRSFHLLKKNEKLLRELRNLDSRQCRETHKIAVFYVAEGQEDKHSILTNTGGSQAYEDFVAGLGWEVNLTNHCGFMGGLQKNKSTGLTTPYFATSTVEVIFHVSTRMPSDSDDSLTKKLRHLGNDEVHIVWSEHTRDYRRGIIPTEFGDVLIVIYPMKNHMFSIQIMKKPEVPFFGPLFDGAIVNGKVLPIMVRATAINASRALKSLIPLYQNFYEERARYLQTIVQHHLEPTTFEDFAAQVFSPAPYHHLPSDADH

SEQ ID NO: 66317 - protein, 801 aa, Homo sapiens
EVTRRIEMWISILELNELGEYAAVELHQAKDVNTGGIFQLRQGHSRRVQVTVKPVQHSGTLPLMVEAILSVSIGCVTARSTKLQRGLDSYQEEDLNCVRERWSDALIKRREYLDEQIKKVSNKTEKTEDDVEREAQLVEQWVGLTEERNAVLVPAPGSGIPGAPADWIPPPGMETHIPVLFLDLNADDLSANEQLVGPHASGVNSILPKEHGSQFFYLPIIKHSDDEVSATASWDSSVHDSVHLNRVTPQNERIYLIVKTTVQLSHPAAMELVLRKRIAANIYNKQSFTQSLKRRISLKNIFYSCGVTYEIVSNIPKATEEIEDRETLALLAARSENEGTSDGETYIEKYTRGVLQVENILSLERLRQAVTVKEALSTKARHIRRSLSTPNVHNVSSSRPDLSGFDEDDKGWPENQLDMSDYSSSYQDVACYGTLPRDSPRRNKEGCTSETPHALTVSPFKAFSPQPPKFFKPLMPVKEEHKKRIALEARPLLSQESMPPPQAHNPGCIVPSGSNGSSMPVEHNSKREKKIDSEEEENELEAINRKLISSQPYVPVEFADFSVYNASLENREWFSSKVDLSNSRVLEKEVSRSPTTSSITSGYFSHSASNATLSDMVVPSSDSSDQLAIQTKDADSTEHSTPSLVHDFRPSSNKELTEVEKGLVKDKIIVVPLKENSALAKGSPSSQSIPEKNSKSLCRTGSCSELDACPSKISQPARGFCPREVTVEHTTNILEDHSFTEFMGVSEGKDFDGLTDSSAGELSSRRSLPNKTGGKTVSDGLHHPSQLHSKLENDQGGTTSR

SEQ ID NO: 66318 - protein, 686 aa, Homo sapiens
  MOD_RES (1)..(1): Any amino acid
XNRIAAGEVIQRPANAIKEMIENCLDAKSTSIQVIVKEGGLKLIQIQDNGTGIRKEDLDIVCERFTTSKLQSFEDLASISTYGFRGEALASISHVAHVTITTKTADGKCAYRASYSDGKLKAPPKPCAGNQGTQITVEDLFYNIATRRKALKNPSEEYGKILEVVGRYSVHNAGISFSVKKQGETVADVRTLPNASTVDNIRSIFGNAVSRELIEIGCEDKTLAFKMNGYISNANYSVKKCIFLLFINHRLVESTSLRKAIETVYAAYLPKNTHPFLYLSLEISPQNVDVNVHPTKHEVHFLHEESILERVQQHIESKLLGSNSSRMYFTQTLLPGLAGPSGEMVKSTTSLTSSSTSGSSDKVYAHQMVRTDSREQKLDAFLQPLSKPLSSQPQAIVTEDKTDISSGRARQQDEEMLELPAPAEVAAKNQSLEGDTTKGTSEMSEKRGPTSSNPRKRHREDSDVEMVEDDSRKEMTAACTPRRRIINLTSVLSLQEEINEQGHEVLREMLHNHSFVGCVNPQWALAQHQTKLYLLNTTKLSEELFYQILIYDFANFGVLRLSEGNLIGLPLLIDNYVPPLEGLPIFILRLATEVNWDEEKECFESLSKECAMFYSIRKQYISEESTLSGQQSEVPGSIPNSWKWTVEHIVYKALRSHILPPKHFTEDGNILQLANLPDLYKVFERC

SEQ ID NO: 66319 - protein, 506 aa, Homo sapiens
GHQPLSTMTVRSRVADVFGSKDTESLEPVLLPLVDRRFPKKWERPVAESLGHKDKDQEDYFQKGGLQIKFHCSKQLSLESSRQVTSESQEEPWEEEFGREMRRQLWLEEEEMWQQRQKKWALLEQEHQEKLRQWNLEDLAREQQRRWVQLEKEQESPRREPEQLGEDVERRIFTPTSRWRDLEKAELSLVPAPSRTQSAHQSRRPHLPMSPSTQQPALGKQRPMSSVEFTYRPRTRRVPTKPKKSASFPVTGTSIRRLTWPSLQISPANIKKKVYHMDMEAQRKNLQLLSEESELRLPHYLRSKALELTTTTMELGALRLQYLCHKYIFYRRLQSLRQEAINHVQIMKETEASYKAQNLYIFLENIDRLQSLRLQAWTDKQKGLEEKHRECLSSMVTMFPKLQLEWNVHLNIPEVTSPKPKKCKLPAASPRHIRPSGPTYKQPFLSRHRACVPLQMARQQGKQMEAVWKTEVASSSYAIEKKTPASLPRDQLRGHPDIPRLLTLDV

SEQ ID NO: 66320 - protein, 143 aa, Homo sapiens
MGSEAAQLLEAADFAARKHRQQRRKDPEGTPYINHPIGVARILTHEAGITDIVVLQAALLHDTVEDTDTTLDEVELHFGAQVRRLVEEVTDDKTLPKLERKRLQVEQAPHSSPGAKLVKLADKLYNLRDLNRCTPEGTLSYGL

SEQ ID NO: 66321 - protein, 639 aa, Homo sapiens
  MOD_RES (1)..(1): Any amino acid
XYSCVCGEERTSATLTVKALPAKFTEGLRNEEAVEGATAMLWCELSKVAPVEWRKGPENLRDGDRYILRQEGTRCELQICGLAMADAGEYLCVCGQERTSATLTIRALPIKFTEGLRNEEATEGATAVLRCELSKMAPVEWWKGHETLRDGDRHSLRQDGARCELQIRGLVAEDAGEYLCMCGKERTSAMLTVRAMPSKFIEGLRNEEATEGDTATLWCELSKAAPVEWRKGHETLRDGDRHSLRQDGSRCELQIRGLAVVDAGEYSCVCGQERTSATLTVRALPARFIEDVKNQEAREGATAVLQCELSKAAPVEWRKGSETLRGGDRYSLRQDGTRCELQIHGLSVADTGEYSCVCGQERTSATLTVRALPARFTQDLKTKEASEGATATLQCELSKVAPVEWKKGPETLRDGGRYSLKQDGTRCELQIHDLSVADAGEYSCMCGQERTSATLTVRALPARFTEGLRNEEAMEGATATLQCELSKAAPVEWRKGLEALRDGDKYSLRQDGAVCELQIHGLAMADNGVYSCVCGQERTSATLTVRALPARFIEDMRNQKATEGATVTLQCKLRKAAPVEWRKGPNTLKDGDRYSLKQDGTSCELQIRGLVIADAGEYSCICEQERTSATLTVRGKDHM

SEQ ID NO: 66322 - protein, 51 aa, Homo sapiens
SALSQYLFPSFETFNTKNCIAYNPNGNALDESCEDKNRYIYKVLLCCPGWS

SEQ ID NO: 66323 - protein, 131 aa, Homo sapiens
MFEEKASSPSGKMGGEEKPIGAGEEKQKEGGKKKNKEGSGDGGRAELNPWPEYIYTRLEMYNILKAEHDSILAEKAEKDSKPIKVTLPDGKQVDAESWKTTPYQIACGISHGKSLWWMFMLRSANRKWILL

SEQ ID NO: 66324 - protein, 135 aa, Homo sapiens
IIRKVDKQTALLDADDPVSQLHKCAFYLKDTERMYLCLSQERIIQFQLNGGGDVAMLELTGQNFTPNLRVWFGDVEAETMYRCGESMLCVVPDISAFREGWRWVRQPVQVPVTLVRNDGIIYSTSLTFTYTPEPG

SEQ ID NO: 66325 - protein, 72 aa, Homo sapiens
  MOD_RES (1)..(1): Any amino acid
XLTDVDRIATLGYLPTQQDVLRVRVPTTGIIEYPFDLENIIFRWAWLCAPVVPATQEAEAGGSLKPRRLRLK

SEQ ID NO: 66326 - protein, 62 aa, Homo sapiens
MSRRKQTNPNKVHWDQVFAGLEEQARQAMMKTDFPGDLGSQRQAIQQLRDQDSSSSHREFEF

SEQ ID NO: 66327 - protein, 14 aa, Homo sapiens
MRSDHLTKHARRHA

SEQ ID NO: 66328 - protein, 707 aa, Homo sapiens
MDHAEENEILAATQRYYVERPIFSHPVLQERLHTKDKVPDSIADKLKQAFTCTPKKIRNIIYMFLPITKWLPAYKFKEYVLGDLVSGISTGVLQLPQGPFAVISLMIGGVAVRLVPDDIVIPGGVNATNGTEARDALRVKVAMSVTLLSGIIQFCLGVCRFGFVAIYLTEPLVRGFTTAAAVHVFTSMLKYLFGVKTKRYSGIFSVVYSTVAVLQNVKNLNVCSLGVGLMVFGLLLGGKEFNERFKEKLPAPIPLEFFAVVMGTGISAGFNLKESYNVDVVGTLPLGLLPPANPDTSLFHLVYVDAIAIAIVGFSVTISMAKTLANKHGYQVDGNQELIALGLCNSIGSLFQTFSISCSLSRSLVQEGTGGKTQLAGCLASLMILLVILATGFLFESLPQAVLSAIVIVNLKGMFMQFSDLPFFWRTSKIELTIWLTTFVSSLFLGLDYGLITAVIIALLTVIYRTQSPSYKVLGKLPETDVYIDIDAYEEVKEIPGIKIFQINAPIYYANSDLYSNALKRKTGVNPAVIMGARRKAMRKYAKEVGNANMANATVVKADAEVDGEDATKPEEEDGEVKYPPIVIKSTFPEEMQRFMPPGDNVHTVILDFTQVNFIDSVGVKTLAGIVKEYGDVGIYVYLAGCSAQVVNDLTRNRFFENPALWELLFHSIHDAVLGSQLREALAEQEASAPPSQEDLEPNATPATPEA

SEQ ID NO: 66329 - protein, 172 aa, Homo sapiens
MHLALLSPLPSIKDSISSPNTFRAALARREEQGTDSRSTSQDDRDSEDGDQPSPVIPVDPDACILPDAALCAFTLLDSVLVTLVQGPARWKMQLFEQPCPGEDPRPGGQIGEVELSSYTPPAGVPGKPAAPHFLPVLCSVSPSGSRVPHDLLGGSGGFTLEDALFGLLFGAD

SEQ ID NO: 66330 - protein, 36 aa, Homo sapiens
MSASEGMKFKFHSGEKVLCFEPDPTKARVLYDAKLG

SEQ ID NO: 66331 - protein, 146 aa, Homo sapiens
MWRRQEEVLPKINLTSCGFPNTNLFPWEFGGGFEKFGNFSIQVPGMQMGQPVPETGPAILLDGYSGPAYSDTYSSAGDSVYTYFSAVAGQDGEVDAEELQRCLTQSGINGTYSPFSLETCRIMIAMLDRDHTGKMGFNAFKELWAA

SEQ ID NO: 66332 - protein, 104 aa, Homo sapiens
MGSRNSSSAGSGSGDPSEGLPRRGAGLRRSEEEEEEDEDVDLAQVLAYLLRRPSWTQRKRMTELGMVVLGIDTTHLWMLPLTPGSWNSMRSRHKWNWPQGSWGL

SEQ ID NO: 66333 - protein, 44 aa, Homo sapiens
MAETSALPTGFGELEVLAVGMVLLVEGAGPTARTAARLTASRAL

SEQ ID NO: 66334 - protein, 289 aa, Homo sapiens
MDQEGGGDGQKAPSFQWRNYKLIVDPALDPALRRPSQKVYRYDGVHFSVNDSKYIPVEDLQDPRCHVRSKNRDFSLPVPKFKLDEFYIGQIPLKEVTFARLNDNVRETFLKDMCRKYGEVEEVEILLHPRTRKHLGLARVLFTSTRGAKETVKNLHLTSVMGNIIHAQLDIKGQQRMKYYELIVNGSYTPQTVPTGGKALSEKFQGSGAATETAESRRRSSSDTAAYPAGTTAVGTPGNGTPCSQDTSFSSSRQDTPSSFGQFTPQSSQGTPYTSRGSTPYSQDSAYSS

SEQ ID NO: 66335 - protein, 285 aa, Homo sapiens
  MOD_RES (1)..(1): Any amino acid
XFGHSSFDQAEISHSESEHLPARDSPSLSENPTTDEDDSEYEDCPEEEEDDWQTCSEEDGPKEEDCSQDWKESSTADSEARSRKTPQKRQIHNFSHLVSKQELLELFKELHTGRKVKDGQLTVGLVGYPNVGKSSTINTIMGNKKVSVSATPGHTKHFQTLYVEPGLCLCDCPGLVMPSFVSTKAEMTCSGILPIDQMRDHVPPVSLIITPREDEDPHRPPTSEELLTAYGYMRGFMTAHGQPDQPRSARYILKDYVSGKLLYCHPPPGRDPVTFQHQHQRLLEN

SEQ ID NO: 66336 - protein, 37 aa, Homo sapiens
MTAEEGVQLSQQNAKDFFRVLNLNKKCDTSKHKVLVV

SEQ ID NO: 66337 - protein, 176 aa, Homo sapiens
MKFSPAHYLLPLLPALVLSTRQDYEELEKQLKEVFKERSTILRQLTKTSRELDGIKVNLQSLKNDEQSAKTDVQKLLELGQKQREEMKSLQEALQNQLKETSEKAEKHQATINFLKTEVERKSKMIRDLQNEAQQLTDLEQKLAVAKNELEKAALDRESQMKAMKETVQLCLTSVF

SEQ ID NO: 66338 - protein, 118 aa, Homo sapiens
MGFNLTFHLSYKFRLLLLLTLCLTVVGWATSNYFVGAIQEIPKAKEFMANFHKTLILGKGKTLTNEASTKKVELDNCPSVSPYLRGQSKLIFKPDLTLEEVQAENPKVSRGRYRPQEC

SEQ ID NO: 66339 - protein, 147 aa, Homo sapiens
NEARLRIVKTLEDIDLGPTEKCVRVNSVSSGLAEEDLETLLQSRVLPSSLMLPKVESPEEIQWAVCEETLKVGPQVGLFLDAVVFGGEDFRASIGVKDISLSLFLCVCVYMCVYIFSLPLKDGHLHNNVYLPTMTMVFHDNGMDTTS

SEQ ID NO: 66340 - protein, 304 aa, Homo sapiens
MAGPCCVWGVVFFSCLSPAGHGGVNQLGGVFVNGRPLPDVVRQRIVELAHQGVRPCDISRQLRVSHGCVSKILGRYYETGSIKPGVIGGSKPKVATPKVVDKIAEYKRQNPTMFAWEIRDRLLAEGICDNDTVPSVSSINRIIRTKVQQPFHPTPDGAGTGVTAPGHTIVPSTASPPVSSASNDPVGSYSINGILGIPRSNDVSEGSVPNGDSQSGVDSLRKHLRADTFTQQQLEALDRVFERPSYPDVFQASEHIKSEQGNEYSLPALTPGLDEVKSSLSASTNPELGSNVSGTQTYPVVTGR

SEQ ID NO: 66341 - protein, 152 aa, Homo sapiens
MQVAMCEQLLGSPATSSSQSVAPRPGAGLKVLFTKETAGYLRGRPQDTVRIFPPWQKLIIPSGSCPVILNTYFCEKVVAKEDSEKTCEVYCPDIPLPRRSISLAQMFVIKGLTNNSPEIQVVCSGVATTGTAWTHGHKEAKQRIPTSTPLRD

SEQ ID NO: 66342 - protein, 165 aa, Homo sapiens
MDGGDDGNLIIKKRFVSEAELDERRKRRQEEWEKVRKPEDPEECPEEVYDPRSLYERLQEQKDRKQQEYEEQFKFKNMVRGLDEDETNFLDEVSRQQELIEKQRREEELKELKEYRNNLKKVGISQENKKEVEKKLTVKPIETKNKFSQAKLLAGAVKHKSSESG

SEQ ID NO: 66343 - protein, 92 aa, Homo sapiens
MKLKEVDRTAMQAWSPAQNHPIYLATGTSAQQLDATFSTNASLEIFELDLSDPSLDMKSCATFSSSHRYHKLIWGPYKMDSKGDVSGVLIAD

SEQ ID NO: 66344 - protein, 258 aa, Homo sapiens
  MOD_RES (1)..(1): Any amino acid
XASRNKSEKKRRDQFNVLIKELSSMLPGNTRKMDKTTVLEKVIGFLQKHNEVSAQTEICDIQQDWKPSFLSNEEFTQLMLEALDGFIIAVTTDGSIIYVSDSITPLLGHLPSDVMDQNLLNFLPEQEHSEVYKILSSHMLVTDSPSPEYLKSDSDLEFYCHLLRGSLNPKEFPTYEYIKFVGNFRSYNNVMQFGKGKSCCYRFLTKGQQWIWLQTHYYITYHQWNSKPEFIVCTHSVVSYADVRVERRQELALEDPPS

SEQ ID NO: 66345 - protein, 214 aa, Homo sapiens
MALPHDSNETSYLLPPNNEDWGRQTIPDFVYGQKDLMAEGIQWPRNAPGIPDALPQSPFDAALCSAWKQRVELGLFRYRLRELQTQILPGAVGFVAQLNVERGVQRRPPQTIKSVRQAFDPVQFNFNKIRPGEVLFRLHREPDLPGTLLQEDILVVINVSPLEWGHVLLVPEPARQLPQRLLPGALRAGIEAVLLSLHPGFRVGFNSLGGLASV

SEQ ID NO: 66346 - protein, 217 aa, Homo sapiens
  MOD_RES (1)..(1): Any amino acid
XAAVPRTPPPRSPNPSPERPRSALAAAILATTLTGRTVAIPQPRQRSRSESDVSSVEQDSFIEPYATTSQLRPRPNWQSEMGRRSSLPSFETLDYGDEEDIETQLSSSGKELGDVSAREDRGGHSDDLYAVPHRNQVPLLHEVNSEDDENISHQDGFPGSPPAPQRTQQKDGKHPVLNLKDEKPPLCEKPPPSPGICLLNYIMIEKLVLENIQINFI

SEQ ID NO: 66347 - protein, 74 aa, Homo sapiens
MSTATTVAPAGIPATPGPVNPPPPEVSNPSKPGRKTNQLQYMQNVVVKTLWKHQFAWPFYQPVDAIKLNLPDYH

SEQ ID NO: 66348 - protein, 479 aa, Homo sapiens
  MOD_RES (1)..(1): Any amino acid
XVHAHPNPEVTWYKDSQALSLGEEVFLLPGTHTLQLGRARLSDSGMYTCEALNAAGRDQKLVQLSVLVPPAFRQAPRGPQDAVLVRVGDKAVLSCETDALPEPTVTWYKDGQPLVLAQRTQALRGGQRLEIQEAQVSDKGLYSCKVSNVAGEAVRTFTLTVQVPPTFENPKTETVSQVAGSPLVLTCDVSGVPAPTVTWLKDRMPVESSAVHGVVSRGGRLQLSRLQPAQAGTYTCVAENTQAEARKDFVVAVLVAPRIRSSGVAREHHVLEGQEVRLDCEADGQPPPDVAWLKDGSPLGQDMGPHLRFYLDGGSLVLKGLRASDAGAYTCVAHNPAGEDARLHTVNVLVPPTIKQGADGSGTLVSRPGELVTMVCPVRGSPPIHVSWLKDGLPLPLSQRTLLHGSGHTLRISKVQLADAGIFTCVAASPAGVADRNFTLQCPLSWSRWSSRMTWWWFVAPWWNSRARPGAFPCLSCRG

SEQ ID NO: 66349 - protein, 225 aa, Homo sapiens
MFAGGLKEMEQEEVLIHGVSYNAMCQILHFIYTSELELSLSNVQETLVAACQLQIPEIIHFCCDFLMSWVDEENILDVYRLAELFDLSRLTEQLDTYILKNFVAFSRTDKYRQLPLEKVYSLLSSNRLEVSCETEVYEGALLYHYSLEQVQADQISLHEPPKLLETVRFPLMEAEVLQRLHDKLDPSPLRDTVASALMYHRNESLQPSLQSPQTELRSDFQCVVG

SEQ ID NO: 66350 - protein, 65 aa, Homo sapiens
MIHTELKAVRQFQKRKIQVERELDDLKENLRNTERIHQETLRRLESRFFEEKVQIIRVNLKCFVY

SEQ ID NO: 66351 - protein, 251 aa, Homo sapiens
MTEHKMSVEEVCRKYNTDCVQGLTHSKAQEILARDGPNALTPPPTTPEWVKFCRQLFGGFSILLWIGAILCFLAYGIQAGTEDDPSGDNLYLGIVLAAVVIITGCFSYYQEAKSSKIMESFKNMVPQQALVIREGEKMQVNAEEVVVGDLVEIKGGDRVPADLRIISAHGCKVDNSSLTGESEPQTRSPDCTHDNPLETRNITFFSTNCVEGTARGVVVATGDRTVMGRIATLASGLEVGKTPIAIEIEHF

SEQ ID NO: 66352 - protein, 984 aa, Homo sapiens
  MOD_RES (1)..(1): Any amino acid
XQLEEEVKDLADKKESVAHWEAQITEIIQWVSDEKDARGYLQALASKMTEELEALRNSSLGTRATDMPWKMRRFAKLDMSARLELQSALDAEIRAKQAIQEELNKVKASNIITECKLKDSEKKNLELLSEIEQLIKDTEELRSEKGIEHQDSQHSFLAFLNTPTDALDQFETVDSTPLSVHTPTLRKKGCPGSTGFPPKRKTHQFFVKSFTTPTKCHQCTSLMVGLIRQGCSCEVCGFSCHITCVNKAPTTCPVPPEQTKGPLGIDPQKGIGTAYEGHVRIPKPAGVKKGWQRALAIVCDFKLFLYDIAEGKASQPSVVISQVIDMRDEEFSVSSVLASDVIHASRKDIPCIFRVTASQLSASNNKCSILMLADTENEKNKWVGVLSELHKILKKNKFRDRSVYVPKEAYDSTLPLIKTTQAAAIIDHERIALGNEEGLFVVHVTKDEIIRVGDNKKIHQIELIPNDQLVAVISGRNRHVRLFPMSALDGRETDFYKLSETKGCQTVTSGKVRHGALTCLCVAMKRQVLCYELFQSKTRHRKFKEIQVPYNVQWMAIFSEQLCVGFQSGFLRYPLNGEGNPYSMLHSNDHTLSFIAHQPMDAICAVEISSKEYLLCFNSIGIYTDCQGRRSRQQELMWPANPSSCCYNAPYLSVYSENAVDIFDVNSMEWIQTLPLKKVRPLNNEGSLNLLGLETIRLIYFKNKMAEGDELVVPETSDNSRKQMVRNINNKRRYSFRVPEEERMQQRREMLRDPEMRNKLISNPTNFNHIAHMGPGDGIQILKDLPMPGFPYPSPHHHSGLISSPINFEHIYHMTVNSAEKFLSPDSINPEYSPSLRSVPGTPSFMTLRNPRPQESRTVFSGSVSIPSITKSRPEPGRSMSASSGLSARSSAQNGSALKREFSGGSYSAKRQPMPSPSEGSLSSGGMDQGSDAPARDFDGEDSDSPRHSTASNSSNLSSPPSPASPRKTKSLSLESTDRGSWDP

SEQ ID NO: 66353 - protein, 212 aa, Homo sapiens
MGFLHVGQDGLELPTSGDPPASASQSAGITGVSHRTQPPCFEGLTSKDLVREEKTRKRKRKAKESGMALLQGLLTFRDVAIEFSQEEWKCLDPAQRTLYRDVMLENYRNLVSLDTSSKCMMKMFSSTGQGNTEVVHTGTLQIHASHHIGDTCFQEIEKDIHDFVFQWQENETNGHEALMTKTKKLMSSTERHDQRHAGNKPIKNELGSSFHS

SEQ ID NO: 66354 - protein, 80 aa, Homo sapiens
MPPCQPQRPLLLLLLLLACQPQVPSAQVMDFLFEKWKLYGDQCHHNLSLLPPPTELVCNRTFDKYSCWPDTPANTTANIS

SEQ ID NO: 66355 - protein, 67 aa, Homo sapiens
ERLGGWIRSVRGPNGAIFELGPRGIRPAGALGARTLLLGATPPFTPLLQTSVLGWAEGADQAPGQRA

SEQ ID NO: 66356 - protein, 120 aa, Homo sapiens
MPTRPVSFHERGGVGSRADYDTLSLRSLRLGPGGLDDRYSLVSEQLEPAATSTYRAFAYERQASSSSSRAGGLDWPEATEVSPSRTIRAPAVRTLQRFQSSHRSRGVGGAVPGAVLEPVA

SEQ ID NO: 66357 - protein, 62 aa, Homo sapiens
KHSGASARAANGGAWGYRDFRGGQKKGWCTTPQLVATMPVSPAGSHKQQNFGLSTYWYSKTK

SEQ ID NO: 66358 - protein, 104 aa, Homo sapiens
MEPANHFWHAGDLQAMISKEFHLAATQDDCRKGRTQEDILVPSSHPELFASVLPMAPEEAARLQQPQPLPPPSGIHLSASRTLAPTLLYSSPPSHSPFGLSSLI

SEQ ID NO: 66359 - protein, 145 aa, Homo sapiens
MEAFQELRKPSARLECDHCSFRGTDYENVQIHMGTIHPEFCDEMDAGGLGKMIFYQKSAKLFHCHKCFFTSKMYSNVYYHITSKHASPDKWNDKPKNQLNKETDPVKSPPLPEHQKIPCNSAEPKSIPALSMETQKLGSVLSPES

SEQ ID NO: 66360 - protein, 85 aa, Homo sapiens
TATAVAHCKRGNGLIKVNGRPLEMIEPRTLQYKLLEPVLLLGKERFAGVDIRVRVKGGGHVAQIYAIRQSISKALVAYYQKCECG

SEQ ID NO: 66361 - protein, 162 aa, Homo sapiens [sequence omitted]

SEQ ID NO: 66362 - protein, 133 aa, Homo sapiens
AIRANCHQEPSVCLQAACPESWIGFQRKCFYFSDDTKNWTSSQRFCDSQDADLAQVESFQELNFLLRYKGPSDHWIGLSREQGQPWKWINGTEWTRQDRVLLCYPGWSAVVPSWLTAALTSLAQVSLPSQPPE

SEQ ID NO: 66363 - protein, 61 aa, Homo sapiens
  MOD_RES (1)..(1): Any amino acid
XICCLLAFCIGLIFVQRSGNYFVTMFDDYSATLPLLIVVILENIAVCFVYGIDKAGVEFLH

SEQ ID NO: 66364 - protein, 46 aa, Homo sapiens
MNGRADFREPNAEVPRPIPHIGPDYIPTEEERRVFAECNDESFWFR

SEQ ID NO: 66365 - protein, 158 aa, Homo sapiens
  MOD_RES (1)..(1): Any amino acid
XLIPTTTPARPLLPFSTGPGSPLFQPLSFQSQGSPPKGPELSLASIHVPLESIKPSSALPVTAYDKNGFRILFHFAKECPPGRPDVLVVVVSMLNTAPLPVKSIVLQAAVPKSMKVKLQPPSGTELSPFSPIQPPAAITQVMLLANPLKDLFLSTCVT

SEQ ID NO: 66366 - protein, 212 aa, Homo sapiens
MNPASDGGTSESIFDLDYASWGIRSTLMVAGFVFYLGVFVVCHQLSSSLNATYRSLVAREKVFWDLAATRAVFGVQSTAAGLWALLGDPVLHADKARGQQNWCWFHITTATGFFCFENVAVHLSNLIFRTFDLFLVIHHLFAFLGFLGCLVNLQAGHYLAMTTLLLEMSTPFTCVSWMLLKELLPLTELREASGAAAWTSESPCLPLLQKMK

SEQ ID NO: 66367 - protein, 19 aa, Homo sapiens
  MOD_RES (1)..(1): Any amino acid
XPLKAEKNEIIPPTDPFPI

SEQ ID NO: 66368 - protein, 52 aa, Homo sapiens
MTIWQMQKQAQRGSPARTHSMMSLSVRPQRRLLSARVNRSQSFAGVLGSHER

SEQ ID NO: 66369 - protein, 52 aa, Homo sapiens
MCKRNLEVMDSVRRGAQLAIEECQYQFRNRRWNCSTLDSLPVFGKVVTQGGK

SEQ ID NO: 66370 - protein, 102 aa, Homo sapiens
MFSPPVSSGKNGPTSLASGHFTGSNVEDRSSSGSWGNGGHPSPSRNYGDGTPYDHMTSRDLGSHDNLSPPFVNSRIQSKTERGSYSSYGRESNLQGCHQELA

SEQ ID NO: 66371 - protein, 779 aa, Homo sapiens
MADYSNKLYYQLEQETGIQTGYTRTGSIFLAQTQDRLISLKRINAGLNVIGIPSEIISPKKVAELHHLLNVHDLVGAMHVPEDAVVSSADVALALASAASQNGVQIYDRTSVLHVMVKKGQVTGVETDKGQIECQYFVNCAGQWAYELGLSNEEPVSIPLHACEHFYLLTRPLETPLQSSTPTIVDADGRIYIRNWQGGILSGGFEKNPKPIFTEGKNQLEIQNLQEDWDHFEPLLSSLLRRMPELETLEIMKLVNCPETFTPDMRCIMGESPAVQGYFVLAGMNSAGLSFGGGAGKYLAEWMVHGYPSENVWELDLKRFGALQSSRTFLRHRVMEVMPLMYDLKVPRWDFQTGRQLRTSPLYDRLDAQGARWMEKHGFERPKYFVPPDKDLLALEQSKTFYKPDWFDIVESEVKCCKEAVCVIDMSSFTKFEITSTGDQALEVLQYLFSNDLDVPVGHIVHTGMLNEGGGYENDCSIARLNKRSFFMISPTDQQVHCWAWLKKHMPKDSNLLLEDVTWKYTALNLIGPRAVDVLSELSYAPMTPDHFPSLFCKEMSVGYANGIRVMSMTHTGEPGFMLYIPIEYALHVYNEVMSVGQKYGIRNAGYYALRSLRIEKFFAFWGQDINNLTTPLECGRESRVKLEKGMDFIGRDALLQQKQNGVYKRLTMFILDDHDSDLDLWPWWGEPIYRNGQYVGKTTSSAYSYSLERHVCLGFVHNFSEDTGEEQVVTADFINRGEYEIDIAGYRFQAKAKLYPVASLFTQKRRKDDMELSDLHGK

SEQ ID NO: 66372 - protein, 108 aa, Homo sapiens
  MOD_RES (1)..(1): Any amino acid
XLVILHCVVADGNSTRSPETNGLLCGDPEENCAATTTQSKRKGHFSRCPKQYKHYCIKGRCRFVVAEQTPSCVPLRKRRKRKKKEEEMETLGKDITPINEDIEETNIA

SEQ ID NO: 66373 - protein, 193 aa, Homo sapiens
MYQPEDDNNSDVTSDDDMTRNRRESSPPHSVHSFSGDRDWDRRGRSRDMEPRDRWSHTRNPRSRMPPRDLSLPVVAKTSFEMDREDDRDSRAYESRSQDAESYQNVVDLAEDRKPHNTIQDNMENYRKLLSLGVQLAEDDGHSHMTQGHSSRSKRSAYPSTSRGFLAQDSVPAEKRNTEMLDNLPSAGSQVGP

SEQ ID NO: 66374 - protein, 206 aa, Homo sapiens
  MOD_RES (1)..(1): Any amino acid
XWVGSLSMGMIFFCCPIVSVFTDLFGCRKTAVVGAAVGFVGLMSSSFVSSIEPLYLTYGIIFACGCSFAYQPSLVILGHYFKKRLGLVNGIVTAGSSVFTILLPLLLRVLIDSVGLFYTLRVLCIFMFVLFLAGFTYRPLATSTKDKESGGSGSSLFSRKKFSPPKKIFNFAIFKVTAYAVWAVGIPLALFGYFVPYVHLVSMLLH

SEQ ID NO: 66375 - protein, 151 aa, Homo sapiens
  MOD_RES (1)..(1): Any amino acid
XAAMDLGPMRKSYRGDREAFEETHLTSLDPVKQFAAWFEEAVQCPDIGEANAMCLATCTRDGKPSARMLLLKGFGKDGFRFFTNFESRKGKELYLRKKNEELEQLYQDQEVPKPKSWGGYVLYPQVMEFWQGQTNRLHDRIVFRRGLPTGD

SEQ ID NO: 66376 - protein, 191 aa, Homo sapiens
  MOD_RES (1)..(1): Any amino acid
XAFSAIKMRVNAKNLPQMSRKTLGIINAEVKRINTGERRGEEKQTSKNNIEKKKPKFRKRKRKAILKCSFENVYSDDALSKENRVVCETEVLLKELEQMLQQALQPTATPDESEEGHGEEINMGEKTIFFFGDRVSLCHQGWSEVMQSLLTAISASQVQVILLPQPPEYLGLQNNNQRRFMVEDEEKLCLS

SEQ ID NO: 66377 - protein, 113 aa, Homo sapiens
  MOD_RES (1)..(1): Any amino acid
XDELLKALGVNAMLRKVAVAAASKPHVEIRQDGDQFYIKTSTTVRTTEINFKVGEGFEEETVDGRKCRVRPQSHYSVPVSPLGAHGPLLLEEPVSPFAACGAPSLQEFSHLGE

SEQ ID NO: 66378 - protein, 151 aa, Homo sapiens
MEVPPPAPRSFLCRALCLFPRVFAAEAVTADSEVLEERQKRLPYVPEPYYPESGWDRLRELFGKDTPVGGLLMAFQKYSGETVQERKQKDRKALHELKLEEWKGRLQVTEHLPEKIESSLQEDEPENDAKKIEALLNLPRNPSVIDKQDKD

SEQ ID NO: 66379 - protein, 137 aa, Homo sapiens
MLHALVRIGREEGLKALYSGIAPAMLRQASYGTIKIGTYQSLKRLFIERPEDETLPINVICGILSGVISSTIANPTDVLKIRMQAQSNTIQGGMIGNFMNIYQQEGTRGLWKGVSLTAQRAAIVVGVELPVYDITKK

SEQ ID NO: 66380 - protein, 175 aa, Homo sapiens
MLLAQINRDSQGMTEFPGGGMEAQHVTLCLTEAVTVADAKLIDGQVIQLEDGSAAYVQHVPIPKSRDSLRLEDGQAVQLEDGTTAFIHHTSKDSYDQSALQAVQLEDGTTAYIHHAVQVPQSDTILAIQADGTVAGLHTGDATIDPDTISALEQYAAKVSIDGSESVAGTGMIGE

SEQ ID NO: 66381 - protein, 47 aa, Homo sapiens
MARVCRRQQCSVERRGFRQELDSWRHKLIHCVGPVSLCAAAGGTIRA

SEQ ID NO: 66382 - protein, 32 aa, Homo sapiens
MSSDHLNNSTLKEAQFKDLFLKKGTFPKNCYG

SEQ ID NO: 66383 - protein, 290 aa, Homo sapiens; identical to SEQ ID NO: 43868

SEQ ID NO: 66384 - protein, 258 aa, Homo sapiens
MNDDGKVNASSEGYFILVGFSNWPHLEVVIFVVVLIFYLMTLIGNLFIIILSYLDSHLHTPMYFFLSNLSFLDLCYTTSSIPQLLVNLWGPEKTISYAGCMIQLYFVLALGTTECVLLVVMSYDRYAAVCRPLHYTVLMHPRFCHLLAVASWVSGFTNSALHSSFTFWVPLCGHRQVDHFFCEVPALLRLSCVDTHVNELTLMITSSIFVLIPLILILTSYGAIVQAVLRMQSTTGLQKVFGTCGAHLMAVSLFFIPA

SEQ ID NO: 66385 - protein, 35 aa, Homo sapiens
MAGPGPTFPLHRLVWANRHRELEAALHSHQVPPNS

SEQ ID NO: 66386 - protein, 123 aa, Homo sapiens
MSAHMSGLEIMDEDQLIKDVLDKFLNCHEQTYDEEFLNTFTHLSQEDHVSKRGVFGTDSSENIFTSAKVTHKNEADDYHLRNKTIFLRTSSQCLEEQVDNFLDLEDLDMDEEIKPQMSEDTWR

SEQ ID NO: 66387 - protein, 25 aa, Homo sapiens
  MOD_RES (1)..(1): Any amino acid
XEPKDGGLQRRSSPAADVQGENFCE

SEQ ID NO: 66388 - protein, 29 aa, Homo sapiens
DKRQNSSRFSASNNRELQKLPSLKGPPTL

SEQ ID NO: 66389 - protein, 4432 aa, Homo sapiens
  MOD_RES (1)..(1): Any amino acid
XTTEDTLITGSKTAAPVTSTGSTTATLEGQSTAASSRTSNQDISASSQNHQTKSTETTSKAQTDTLTQMMTSTLFSSPSVHNVMETAPPDEMTTSFPSSVTNTLMMTSKTITMTTSTDSTLGNTEETSTAGTESSTPVTSAVSITAGQEGQSRTTSWRTSIQDTSASSQNHWTRSTQTTRESQTSTLTHRTTSTPSFSPSVHNVTGTVSQKTSPSGETATSSLCSVTNTSMMTSEKITVTTSTGSTLGNPGETSSVPVTGSLMPVTSAALVTFDPEGQSPATFSRTSTQDTTAFSKNHQTQSVETTRVSQINTLNTLTPVTTSTVLSSPSGFNPSGTVSQETFPSGETTTSSPSSVSNTFLVTSKVFRMPTSRDSTLGNTEETSLSVSGTISAITSKVSTIWWSDTLSTALSPSSLPPKISTAFHTQQSEGAETTGRPHERSSFSPGVSQEIFTLHETTTWPSSFSSKGHTTWSQTELPSTSTGAATRLVTGNPSTGTAGTIPRVPSKVSAIGEPGEPTTYSSHSTTLPKTTGAGAQTQWTQETGTTGEALLSSPSYSVTQMIKTATSPSSSPMLDRHTSQQITTAPSTNHSTIHSTSTSPQESPAVSQRGHTQAPQTTQESQTTRSVSPMTDTKTVTTPGSSFTASGHSPSEIVPQDAPTISAATTFAPAPTGDGHTTQAPTTALQAAPSSHDATLGPSGGTSLSKTGALTLANSVVSTPGGPEGQWTSASASTSPDTAAAMTHTHQAESTEASGQTQTSEPASSGSRTTSAGTATPSSSGASGTTPSGSEGISTSGETTRFSSNPSRDSHTTQSTTELLSASASHGAIPVSTGMASSIVPGTFHPTLSEASTAGRPTGQSSPTSPSASPQETAAISRMAQTQRTRTSRGSDTISLASQATDTFSTVPPTPPSITSTGLTSPQTETHTLSPSGSGKTFTTALISNATPLPVTYASSASTGHTTPLHVTDASSVSTGHATPLPVTSPSSVSTGHTTPLPVTDTSSESTGHVTPLPVTSFSSASTGDSTPLPVTDTSSASTGHVTPLPVTSLSSASTGDTTPLPVTDTSSASTGHATSLPVTDTSSVSTGHTTPLPVTDTSSASTGHATSLPVTDTSSVSTGHTTPLHVTDASSASTGQATPLPVTSLSSVSTGDTTPLPVTSPSSASTGHATPLLVTDTSSASTGHATPLPVTDASSVSTDHATSLPVTIPSAASTGHTTPLPVTDTSSASTGQATSLLVTDTSSVSTGDTTPLPVTSTSSASTGHVTPLHVTSPSSASTGHATPLPVTSLSSASTGDTMPLPVTSPSSASTGDTTPLPVTDASSVSTGHTTPLHVTDASSASTGQATPLPVTSLSSVSTGDTTPLPVTSPSSASTGHATPLLVTDTSSASTGHATPLPVTDASSVSTDHATSLPVTIPSAASTGHTTPLPVTDTSSASTGQATSLLVTDTSSVSTGDTTPLPVTSTSSASTGHVTPLHVTSPSSASTGHATPLPVTSLSSASTGDTMPLPVTSPSSASTGDTTPLPVTDASSVSTGHTTPLPVTSPSSASTGHTTPLPVTDTSSASKGDTTPLPVTSPSSASTGHTTPLPVTDTSSASTGDTTPLPVTNASSLSTGHATPLHVTSPSSASTGHATPLPVTSTSSASTGHATPLPVTGLSSATTDDTTRLPVTDVSSASTGQATPLPVTSLSSVSTGDTTPLPVTSPSSASTGHASPLLVTDASSASTGQATPLPVTDTSSVSTAHATPLPVTGLSSASTDDTTRLPVTDVSSASTGQAIPLPVTSPSSASTGDTTPLPVTDASSASTGDTTSLPVTIPSSASSGHTTSLPVTDASSVSTGHATSLLVTDASSVSTGDTTPLPVTDTNSASTGDTTPLHVTDASSVSTGHATSLPVTSLSSASTGDTTPLPVTSPSSASSGHTTPLPVTDASSVPTGHATSLPVTDASSVSTGHATPLPVTDASSVSTGHATPLPVTDTSSVSTGQATPLPVTSLSSASTGDTTPLPVTDTSSASTGHAPHLPVTGLSSASTGDTTRLPVTNVSSASTGHATPLPVTSTSSASTGDTTPLPGTDTSSVSTGHTTPLLVTDASSVSTGDTTRLPVTSPSSASTGHTTPLHVTDASSVSTGHTTPLPVTDTSSASTGQATSLLVTDTSSVSTGDTTPLPVTSTSSASTGHVTPLHVTSPSSASTGHATPLPVTSLSSASTGDTTPLPVTDTSSVSTGHTTPLPVTSPSSASTGHTTPLPVTDTSSASKGDTTPLPVTSPSSASTGHTTPLPVTDTSSASTGDTTPLPVTNASSLSTGHATPLHVTSPSSASTGHATPLPVTSTSSASTGHATPLPVTSTSSASTGHATPLPVTDNSSVSTGHATPLPVTGLSSATTDDTTRLPVTDVSSASTGQATPLPVTSLSSVSTGDTTPLPVTSPSSASTGHASPLLVTDASSASTGQATPLPVTDTSSVSTAHATPLPVTGLSSASTDDTTRLPVTDVSSASTGQAIPLPVTSPSSASTGDTTPLPVTDASSASTGDTTSLPVTIPSSASSGHTTSLPVTDASSVSTGHATSLLVTDASSVSTGDTTPLPVTDTNSASTGDTTPLHVTDASSVSTGHATSLPVTSLSSASTGDTTPLPVTSPSSASSGHTTSLPVTDASSVSTGHATSLPVTIPSSASSGHTTPLPVTDASSVPTGHATSLPVTDASSVSTGHATPLPVTDASSVSTGHATPLPVTDTSSVSTGQATPLPVTSLSSASSTGDTTPLPVTDTSSASTGQDTPLPVTSLFSVSTGDTTPLPVTSPSSASTGHATHLLVTDASSVSTGHATSLLVTDASSVSTGHATALHVTDASSLSTGDTTPLPVTSPSSASTGDTTPLPVTDTSSVSTGHATSLPVTDTSSASTGHATSLPVTDTSSASTGQATPLPVTSPSSASTGHAIPLLVTDTSSASTGQATPLPVTSLSSASTGDTTPLPVTDASSVSTGHATSLPVTSLSSVSTGDTTPLPVTSPSSASTGHATPLHVTSPSSASTGHATPLPVTSLSSASTGDTTPLPVTSPSSASTGHATPLHVTDASSVSTGDTTPLPVTSPSSASSGHTTPLPVTDASSASTGDTTPLPVTDTSSASTGHATHLPVTGLSSASTGDTTRLPVTDVSSASTGHATPLPVTSTSSASTGDTTPLPGTDTSSVSTGHTTPLLVTDASSVSTGDTTRLPVTSPSSASTGHTTPLPVTDTPSASTGDTTPLPVTNASSLSTRHATSLHVTSPSSASTGHATPLPVTDTSAASTGHATPLPVTSTSSASTGDTTPLPVTDTSSASTGHATPLPVTNTSSVSTGHATPLHVTSPSSASTGHTTPLPVTDASSVSTGHATSLPVTDASSVSTGHATPLPVTDASSVSTGHATPLPLTSLSSVSTGDTTPLPVTDTSSASTGQATPLPVTSLSSVSTGDTTPLPVTDTSSASTGHATSLPVTDTSSASTGHATPLHVTSPSSASTGHATPLPVTDTSSASTGHATPLPVTSLSSVSTGDTTPLPVTSPSSASTGHATPLLVTDASSASTGQATPLPVTSLSSVSTGDTTPLPVTSPSSASTGHATSLPVTDTSSASTGDTTSLPVTDTSSAYTGDTTSLPVTDTSSSSTGDTTPLLVTETSSASTGDTTPVPVTDTSSVSTGHATPLPVTGLSSASTGDTTRLPVTDISSASTGQATPLPVTNTSSVSTGDTMPLPVTSPSSASTGHATPLPVTSTSSASTGHATPVPVTSTSSASTGHTTPLPVTSPSSASTGHTTPLPVTDTSSASTGDTTPLPVTNASSLSTGHTTPLHVTIPSSASTGDTSTLPVTGASSASTGHATPLPVTDTSSVSTGHATPLPVTSFSSVSTGDTTPLPVTDASSASTGHATPLPVTDTSSASTGDTTPLPVTDASSASTGQATPLPVTSLSSVSTGDTTPLPVTIPSSASSGHTTSLPVSDTSSASTGQATPLPVTSLSSVSTGDTTPLLVTDASSVSTGHATPLPVTDTSSASTGDTTRLPVTDTSSASTGQATPLPVTSLSSVSTGDTTPLLVTNTSSVSTGHATSLPVTIPSSSSSGHTTPLPVTSTSSVSTGHVTPLHVTSPSSSSTGQATPLPVTSTSSSSTGQATPLPVTSTSSASTGHATPLPVTDASSVSTGHATPLPVTDTSSASTGDTTPLPVTDTSSASTGQATPLPVTSLSSVSTGHATPLAVSSATSASTVSSDSPLKMETSGMTTPSLKTDGGRRTATSPPPTTSQTIISTIPSTAMHTRSTAAPIPILPERGVSLFPYGADAGDLEFVRRTVDFTSPLFKPATGFPLGSSLRDSLYFTDNGQIIFPESDYQIFSYPNPLPTGFTGRDPVALVAPFWDDADFSTGRGTTFYQSNTYQAILSTDGSRSYALFLYQSGGMQWDVAQRSVEMAISKTAH

SEQ ID NO: 66390 - protein, 1709 aa, Homo sapiens
MLKRKQSSRVEAQPVTDFGPDESLSDNADILWINKPWVHSLLRICAIISVISVCMNTPMTFEHYPPLQYVTFTLDTLLMFLYTAEMIAKMHIRGIVKGDSSYVKDRWCVFDGFMVFCLWVSLVLQVFEIADIVDQMSPWGMLRIPRPLIMIRAFRIYFRFELPRTRITNILKRSGEQIWSVSIFLLFFLLLYGILGVQMFGTFTYHCVVNDTKPGNVTWNSLAIPDTHCSPELEEGYQCPPGFKCMDLEDLGLSRQELGYSGFNEIGTSIFTVYEAASQEGWVFLMYRAIDSFPRWRSYFYFITLIFFLAWLVKNVFIAVIIETFAEIRVQFQQMWGSRSSTTSTATTQKMMRSSVFHMFILSMVTVDVIVAASNYYKGENFRRQYDEFYLAEVAFTVLFDLEALLKIWCLGFTGYISSSLHKFELLLVIGTTLHVYPDLYHSQFTYFQVLRVVRLIKISPALEDFVYKIFGPGKKLGSLVVFTASLLIVMSAISLQMFCFVEELDRFTTFPRAFMSMFQILTQEGWVDVMDQTLNAVGHMWAPVVAIYFILYHLFATLILLSLFVAVILDNLELDEDLKKLKQLKQSEANADTKEKLPLRLRIFEKFPNRPQMVKISKLPSDFTVPKIRESFMKQFIDRQQQDTCCLLRSLPTTSSSSCDHSKRSAIEDNKYIDQKLRKSVFSIRARNLLEKETAVTKILRACTRQRMLSGSFEGQPAKERSILSVQHHIRQERRSLRHGSNSQRISRGKSLETLTQDHSNTVRYRNAQREDSEIKMIQEKKEQAEMKRKVQEEELRENHPYFDKPLFIVGREHRFRNFCRVVVRARFNASKTDPVTGAVKNTKYHQLYDLLGLVTYLDWVMIIVTICSCISMMFESPFRRVMHAPTLQIAEYVFVIFMSIELNLKIMADGLFFTPTAVIRDFGGVMDIFIYLVSLIFLCWMPQNVPAESGAQLLMVLRCLRPLRIFKLVPQMRKVVRELFSGFKEIFLVSILLLTLMLVFASFGVQLFAGKLAKCNDPNIIRREDCNGIFRINVSVSKNLNLKLRPGEKKPGFWVPRVWANPRNFNFDNVGNAMLALFEVLSLKGWVEVRDVIIHRVGPIHGIYIHVFVFLGCMIGLTLFVGVVIANFNENKGTALLTVDQRRWEDLKSRLKIAQPLHLPPRPDNDGFRAKMYDITQHPFFKRTIALLVLAQSVLLSVKWDVEDPVTVPLATMSVVFTFIFVLEVTMKIIAMSPAGFWQSRRNRYDLLVTSLGVVWVVLHFALLNAYTYMMGACVIVFRFFSICGKHVTLKMLLLTVVVSMYKSFFIIVGMFLLLLCYAFAGVVLFGTVKYGENINRHANFSSAGKAITVLFRIVTGEDWNKIMHDCMVQPPFCTPDEFTYWATDCGNYAGALMYFCSFYVIIAYIMLNLLVAIIVENFSLFYSTEEDQLLSYNDLRHFQIIWNMVDDKREGVIPTFRVKFLLRLLRGRLEVDLDKDKLLFKHMCYEMERLHNGGDVTFHDVLSMLSYRSVDIRKSLQLEELLAREQLEYTIEEEVAKQTIRMWLKKCLKRIRAKQQQSCSIIHSLRESQQQELSRFLNPPSIETTQPSEDTNANSQDNSMQPETSSQQQLLSPTLSDRGGSRQDAADAGKPQRKFGQWRLPSAPKPISHSVSSVNLRFGGRTTMKSVVCKMNPMTDAASCGSEVKKWWTRQLTVESDESGDDLLDI

SEQ ID NO: 66391 - protein, 86 aa, Homo sapiens; identical to SEQ ID NO: 56815

SEQ ID NO: 66392 - protein, 143 aa, Homo sapiens
  MOD_RES (1)..(1): Any amino acid
XNTAASLQQWKVGDKCSAIWSEDGCIYPATIASIDFKRETCVVVYTGYGNREEQNLSDLLSPICEVANNIEQNAQENENESQVSTDESENSRSPGNKSDNIKPKSAPWNSFLPPPPPMPGPRLGPGKGFRQNQKEGRCSHSLN

SEQ ID NO: 66393 - protein, 254 aa, Homo sapiens
MAPRSLLLLLSGALALTDTWAGSHSLRYFSTAVSRPGRGEPRYIAVEYVDDTQFLRFDSDAAIPRMEPREPWVEQEGPQYWEWTTGYAKANAQTDRVALRNLLRRYNQSEAGSHTLQGMNGCDMGPDGRLLRGYHQHAYDGKDYISLNEDLRSWTAADTVAQITQRFYEAEEYAEEFRTYLEGECLELLRRYLENGKETLQRAEQSPQPTIPIVGIVAGLVVLGAVVTGAVVAAVMWRKKSSGRKGSHKSQGKV

SEQ ID NO: 66394 - protein, 308 aa, Homo sapiens
  MOD_RES (1)..(1): Any amino acid
XVHVTNDDRGRSGVAWTQEVAVLLGDMAVRLLQDGAVTVDGHPVALPFLQEPLLYVELRGHTVILHAQPGLQVLWDGQSQVEVSVPGSYQGRTCGLCGNFNGFAQDDLQGPEGLLLPSEAAFGNSWQVQEGRGYPPGLELPPVLLQMEWSRRAQEQLLWDLELLTGVELGLFWPPQAQFFGPRGQAQQAWSQCCQPGGSTGGDPEQPDLAQREERSEAEPETQKRKLTPGTPGPGDLPSQNLPSQDALEGLGSDPHLGQERAELQRPPRMDTPESERRTLRIRKRRPLSVREPRPPGARSKMLLRVRR

SEQ ID NO: 66395 - protein, 124 aa, Homo sapiens
  MOD_RES (1)..(1): Any amino acid
XAVMWRKKSSGHFLPIDRNRGSYSQAAAYSVVSGLLMITWWSSLFLLGVLFQGYLGCLRSHSVLGRRKVGDMWILFFLWLWTSFNTAFLALQSLRFGFGFRRGRSFLLRSWHHLMKRVQIKIFD

SEQ ID NO: 66396 - protein, 181 aa, Homo sapiens
  MOD_RES (1)..(1): Any amino acid
XNLTRLDSSMTQGTDSPEDFVIQAKADCYFTNGTEKVQFVVRFIFNLEEYVRFDSDVGMFVALTKLGQPDAEQWNSRLDLLERSRQAVDGVCRHNYRLGAPFTVGRKEVTVYPERTPLLHQHNLLHCSVTGFYPGDIKIKWFLNGQEERAGVMSTGPIRNGDWTFQTVVMLEMTPELGHVY

SEQ ID NO: 66397 - protein, 684 aa, Homo sapiens
  MOD_RES (1)..(1): Any amino acid
XCQHRGLIHPQSRAVGGDAMTPILTVLICLGLSLGPRTHVQAGHLPKPTLWAEPGSVITQGSPVTLRCQGGQETQEYRLYREKKTALWITRIPQELVKKGQFPIPSITWEHAGRYRCYYGSDTAGRSESSDPLELVVTGAYIKPTLSAQPSPVVNSGGNVILQCDSQVAFDGFSLCKEGEDEHPQCLNSQPHARGSSRAIFSVGPVSPSRRWWYRCYAYDSNSPYEWSLPSDLLELLVLGVSKKPSLSVQPGPIVAPEETLTLQCGSDAGYNRFVLYKDGERDFLQLAGAQPQAGLSQANFTLGPVSRSYGGQYRCYGAHNLSSEWSAPSDPLDILIAGQFYDRVSLSVQPGPTVASGENVTLLCQSQGWMQTFLLTKEGAADDPWRLRSTYQSQKYQAEFPMGPVTSAHAGTYRCYGSQSSKPYLLTHPSDPLELVVSGPSGGPSSPTTGPTSTSAGPEDQPLTPTGSDPQSAPGLGSGAGTRAAGLGRHLGVVIGILVAVILLLLLLLLLFLILRHRRQGKHWTSTQRKADFQHPAGAVGPEPTDRGLQWRSSPAADAQEENLYAAVKHTQPEDGVEMDTRQSPHDEDPQAVTYAEVKHSRPRREMASPPSPLSGEFLDTKDRQAEEDRQMDTEAAASEAPQDVTYAQLHSLTLRREATEPPPSQEGPSPAVPSIYATLAIH

SEQ ID NO: 66398 - protein, 63 aa, Homo sapiens
MEAQSHSSTTTEKKKVENSIVKCSTRTDVSEKAVASSTTSNGEQHRDYQQPSLESFLCSLHSL

SEQ ID NO: 66399 - protein, 58 aa, Homo sapiens
MVAGMLGLRTQEGEAAARGSLFVGGGQESKRSEQSHRSLLKPLLPPSHQHICCPRTPL

SEQ ID NO: 66400 - protein, 598 aa, Homo sapiens
  MOD_RES (1)..(1): Any amino acid
XQTPPKIDYLLPGPGPAHSPQPSKRAGPLTPPKPPRRSDSIKFQHRLETSSESEATLVGSSPSTSPPSALPPDVDPGEPMHASPPRKARVRIASSYYPEGDGDSSHLPAKKSCDEDLTSQKVDELGQKRRRPKSAPSFRPKLAPVVIPAQFLEEQKCVPASGELSPELQEWAPYSPGHSSRHSNPPLYPSRPSVGTVPRSLTPSTTVSSILRNPIYTVRSHRVGPCSSPPAARDAGPQGLHPSVQHQGRLSLDLSHRTCSDYSEMRATHGSNSLPSSARLGSSSNLQFKAERIKIPSTPRYPRSVVGSERGSVSHSECSTPPQSPLNIDTLSSCSQSQTSASTLPRIAVNPASLGERRKDRPYVEEPRHVKVQKGSEPLGISIVSGEKGGIYVSKVTVGSIAHQAGLEYGDQLLEFNGINLRSATEQQARLIIGQQCDTITILAQYNPHVHQLSSHSRSSSHLDPAGTHSTLQGSGTTTPEHPSVIDPLMEQDEGPSTPPAKQSSSRIAGDANKKTLEPRVVFIKKSQLELGVHLCGGNLHGVFVAEVEDDSPAKGPDGLVPGDLILEPGRAEQDSGGSLCGDAEAQGWRPPEGAVPP

SEQ ID NO: 66401 - protein, 458 aa, Homo sapiens
  MOD_RES (1)..(1): Any amino acid
XADKIPVMRGQWFIDGTWQPLEEEESNLIEQEHLNCFRGQQMQENFDIEVSKSIDGKDDTVDSITPDKVRGLRDMLNSSAMDIMYYTSPLYRDELVKGLQQELNRLYSLFCSRNPDFEEKGGKVSIVSHSLGCVITYDIMTGWNPVRLYEQLLQKEEELPDERWMSYEERHLLDELYITKRRLKEIEERLHGLKASSMTQTPALKFKVENFFCMGSPLAVFLALRGIRPGNTGSQDHILPREICNRLLNIFHPTDPVAYRLEPLILKHYSNISPVQIHWYNTSNPLPYEHMKPSFLNPAKEPTSVSENEGISTIPSPVTSPVLSRRHYGESITNIGKASILGAASIGKGLGGMLFSRFGRSSTTQSSETSKDSMEDEKKPVASPSATTVGTQTLPHSSSGFLDSALELDHRIDFELREGLVESRYWSAVTSHTAYWSSLDVALFLLTFMYKHEHDDDA

SEQ ID NO: 66402 - protein, 543 aa, Homo sapiens
MNSHSYNGSVGRPLGSGPGALGRDPPDPEAGHPPQPPHSPGLQVVVAKSEPARPSPGSPRGQPQDQDDDEDDEEDEAGRQRASGKPSNVGHRLGHRRALFEKRKRLSDYALIFGMFGIVVMVTETELSWGVYTKESLYSFALKCLISLSTAILLGLVVLYHAREIQLFMVDNGADDWRIAMTCERVFLISLELAVCAIHPVPGHYRFTWTARLAFTYAPSVAEADVDVLLSIPMFLRLYLLGRVMLLHSKIFTDASSRSIGALNKITFNTRFVMKTLMTICPGTVLLVFSISSWIIAAWTVRVCERENMYHDKQEVTSNFLGAMWLISITFLSIGYGDMVPHTYCGKGVCLLTGIMGAGCTALVVAVVARKLELTKAEKHVHNFMMDTQLTKRVKNAAANVLRETWLIYKHTRLVKKPDQARVRKHQRKFLQAIHQLRSVKIEQGKLNDQANTLTDLAKTQTVMYDLVSELHAQHEELEARLATLESRLDALGASLQALPGLIAQAIRPPPPPLPPRPGPGPQDQAARSSPCRWTPVAPSDCG

SEQ ID NO: 66403 - protein, 449 aa, Homo sapiens
MIPTFTALLCLGLSLGPRTHMQAGPLPKPTLWAEPGSVISWGNSVTIWCQGTLEAREYRLDKEESPAPWDRQNPLEPKNKARFSIPSMTEDYAGRYRCYYRSPVGWSQPSDPLELVMTGAYSKPTLSALPSPLVTSGKSVTLLCQSRSPMDTFLLIKERAAHPLLHLRSEHGAQQHQAEFPMSPVTSVHGGTYRCFSSHGFSHYLLSHPSDPLELIVSGSLEGPRPSPTRSVSTAAGPEDQPLMPTGSVPHSGLRRHWEVLIGVLVVSILLLSLLLFLLLQHWRQGKHRTLAQRQADFQRPPGAAEPEPKDGGLQRRSSPAADVQGENFSGAAVKDTQPEDGVEMDTRQSPHDEDPQAVTYAKVKHSRPRREMASPPSPLSGEFLDTKDRQAEEDRQMDTEAAASEAPQDVTYAQLHSFTLRQKATEPPPSQEGASPAEPSVYATLAIH

SEQ ID NO: 66404 - protein, 131 aa, Homo sapiens
MCFPKVLSDDMKKLKARMDDFKEGYLETVAAYYEEQHPELTPLLEKERDGLRCRGNRSPVPDVEDPATEEPGESFCDKVMRWFQAMLQRLQTWWHGVLAWVKEKVVALVHAVQALWKQFQSFCCSLSELFM

SEQ ID NO: 66405 - protein, 238 aa, Homo sapiens
MSPNFKLQCHFILIFLTALRGESRYLELREAADYDPFLLFSANLKRELAGEQPYRRALRCLDMLSLQGQFTFTADRPQLHCAAFFISEPEEFITIHYDQVSIDCQGGDFLKVFDGWILKGEKFPSSQDHPLPSAERYIDFCESGLSRRSIRSSQNVAMIFFRVHEPGNGFTLTIKTDPNLFPCNVISQTPNGKFTLVVPHQHRNCSFSIIYPVVIKISDLTLGHVNGLQLKVSCLLVS

SEQ ID NO: 66406 - protein, 712 aa, Homo sapiens
MEENPTLESEAWGSSREWLAPREARGAPCSSPGPSLSSVLNELPSAATLRYRDPGVLPWGALEEEEEDGGRSRKAFTEVTQTELQDPHPSRELPWPMQARRAHRQRNASRDQVVYGSGTKTDRWARLLRRSKEKTKEGLRSLQPWAWTLKRIGGQFGAGTESYFSLLRFLLLLNVLASVLMACMTLLPTWLGGAPPGPPGPDISSPCGSYNPHSQGLVTFATQLFNLLSGEGYLEWSPLFYGFYPPRPRLAVTYLCWAFAVGLICLLLILHRSVSGLKQTLLAESEALTSYSHRVFSAWDFGLCGDVHVRLRQRIILYELKVELEETVVRRQAAVRTLGQQARVWLVRVLLNLLVVALLGAAFYGVYWATGCTVELQEMPLVQELPLLKLGVNYLPSIFIAGVNFVLPPVFKLIAPLEGYTRSRQIVFILLRTVFLRLASLVVLLFSLWNQITCGGDSEAEDCKTCGYNYKQLPCWETVLGQEMYKLLLFDLLTVLAVALLIQFPRKLLCGLCPGALGRLAGTQEFQVPDEVLGLIYAQTVVWVGSFFCPLLPLLNTVKFLLLFYLKKLTLFSTCSPAARTFRASAANFFFPLVLLLGLAISSVPLLYSIFLIPPSKLCGPFRGQSSIWAQIPESISSLPETTQNFLFFLGTQAFAVPLLLISSILMAYTVALANSYGRLISELKRQRETEAQNKVFLARRAVALTSTKPAL

SEQ ID NO: 66407 - protein, 311 aa, Homo sapiens
  MOD_RES (1)..(1): Any amino acid
XFEGTKDSPLEHHLYVVSYVNPGEVTRLTDRGYSHSCCISQHCDFFISKYSNQKNPHCVSLYKLSSPEDDPTCKTKEFWATILDSAGPLPDYTPPEIFSFESTTGFTLYGMLYKPHDLQPGKKYPTVLFIYGGPQGQIEIDDQVEGLQYLASRYDFIDLDRVGIHGWSYGGYLSLMALMQRSDIFRVAIAGAPVTLWIFYDTGYTERYMGHPDQNEQGYYLGSVAMQAEKFPSEPNRLLLLHGFLDENVHFAHTSILLSFLVRAGKPYDLQIYPQERHSIRVPESGEHYELHLLHYLQENLGSRIAALKVI

SEQ ID NO: 66408 - protein, 163 aa, Homo sapiens
MADHNPDSDSTPRTLLRRVLDTADPRTPRRPRSARAGARRALLETASPRKLSGQTRTIARGRSHGARSVGRSAHIQASGHLEEQTPRTLLKNILLTAPESSILMPESVVKPVPAPQAVQPSRQESSCGRSAGPWQEETEAETVSVSAGSGPGAVSLPRASREC

SEQ ID NO: 66409 - protein, 1335 aa, Homo sapiens
MLQLLVLKIEDPGCFWVIIKGCSPFLDHDVDYQKLNSAMNDFYNSTCQDIEIKPLTLEEGQVCVVYCEELKCWCRAIVKSITSSADQYLAECFLVDFAKNIPVKSKNIRVVVESFMQLPYRAKKFSLYCTKPVTLHIDFCRDSTDIVPAKKWDNAAIQYFQNLLKATTQVEARLCAVEEDTFEVYLYVTIKDEKVCVNDDLVAKNYACYMSPTKNKNLDYLEKPRLNIKSAPSFNKLNPALTLWPMFLQGKDVQGMEDSHGVNFPAQSLQHTWCKGIVGDLRPTATAQDKAVKCNMDSLRDSPKDKSEKKHHCISLKDTNKRVESSVYWPAKRGITIYADPDVPEASALSQKSNEKPLRLTEKKEYDEKNSCVKLLQFLNPDPLRADGISDLQQLQKLKGLQPPVVVLRNKIKPCLTIDSSPLSADLKKALQRNKFPGPSHTESYSWPPIARGCDVVVISHCESNPLLYLLPVLTVLQTGACYKSLPSRNGPLAVIVCPGWKKAQFIFELLGEYSMSSRPLHPVLLTIGLHKEEAKNTKLPRGCDVIVTTPYSLLRLLACQSLLFLRLCHLILDEVEVLFLEANEQMFAILDNFKKNIEVEERESAPHQIVAVGVHWNKHIEHLIKEFMNDPYIVITAMEEAALYGNVQQVVHLCLECEKTSSLLQALDFIPSQAQKTLIFTCSVAETEIVCKVVESSSIFCLKMHKEMIFNLQNVLEQWKKKLSSGSQIILALTDDCVPLLAITDATCVIHFSFPASPKVFGGRLYCMSDHFHAEQGSPAEQGDKKAKSVLLLTEKDASHAVGVLRYLERADAKVPAELYEFTAGVLEAKEDKKAGRPLCPYLKAFGFCNHFIFRDKRICPDRHRINPETDLPRKLSSQALPSFGYIKIIPFYILNATNYFGRIVDKHMDLYATLNAEMNEYFKDSNKTTVEKVEKFGLYGLAEKTLFHRVQVLEVNQKEDAWALDDILVEFIDEGRTGLVTRDQLLHLPEHFHTLPPQAVEFIVCRVKPADNEIEWNPKVTRYIHHKIVGKLHDAKVILALGNTVWIDPMVHITNLSSLKTSVIDYNVRAEILSMGMGIDNPEHIEQLKKLREDAKIPACEESLSQTPPRVTGTSPAQDQDHPSEEQGGQGTPPAEDAACLQSPQPEDTGAEGGAESKTSSENQKPETLSGNTEGAFISRTAQPPLKSFHPQIKWFQKEDVVILKIRIRNVKDYKCQYLRDRVVFSAWVGDKFYLADLELRGNIRKDDCQCVIRNDEPVITLAKERREAWCHLLRQRNPNVAFDFDHWEDCEEDSHFPKVVNSKNLPYTVTEVVEDSSSTSEDDDSESEREGE

SEQ ID NO: 66410 - protein, 98 aa, Homo sapiens
  MOD_RES (1)..(1): Any amino acid
XNMGDLTTYDTVKHYLVLNTPLEDNIMTHGLSSLCSGLVASILGTPADVIKSRIMNQPRDKQGRGLLYKSSTDCLIQAVQGEGFMSLYKGFLPSWLRM

SEQ ID NO: 66411 - protein, 121 aa, Homo sapiens
MPDSPAEVKTQPRSTPPSMPPPPPAASQGATRPPSFTPHTLMNGSSHSPTAINGAPCTPNGFSNGPATSSTASLSTQHLPPACGARQLSKLKRFLTTLQQFGSDISPEIGERVRTLVLGLV

SEQ ID NO: 66412 - protein, 408 aa, Homo sapiens
MAPSGLKAVVGEKILSGVIRSVKKDGEWKVLIMDHPSMRILSSCCKMSDILAEGITIVEDINKRREPIPSLEAIYLLSPTEKSVQALIKDFQGTPTFTYKAAHIFFTDTCPEPLFSELGRSRLAKVVKTLKEIHLAFLPYEAQVFSLDAPHSTYNLYCPFRAEERTRQLEVLAQQIATLCATLQEYPAIRYRKGPEDTAQLAHAVLAKLNAFKADTPSLGEGPEKTRSQLLIMDRAADPVSPLLHELTFQAMAYDLLDIEQDTYRYETTGLSEAREKAVLLDEDDDLWVELRHMHIADVSKKVTELLRTFCESKRLTTDKANIKDLSQILKKMPQYQKELNKDLAMGSDAEGEKIKDSMKLIVPVLLDAAVPAYDKIRVLLLYILLRNATPLDPGTLLHWLGDSSTEV

SEQ ID NO: 66413 - protein, 49 aa, Homo sapiens
HQQATKKLDLWSLPPVLVVHLKRFSYSRYMRDKLDTLVDFPIKYCFCKK

SEQ ID NO: 66414 - protein, 300 aa, Homo sapiens
  MOD_RES (1)..(1): Any amino acid
XSLPHVSDVNECASQPCQNGGTCTHGINSFRCQCPAGFGGPTCETAQSPCDTKECQHGGQCQVENGSAVCVCQAGYTGAACEMDVDDCSPDPCLNGGSCVDLVGNYTCLCAEPFKGLRCETGDHPVPDACLSAPCHNGGTCVDADQGYVCECPEGFMGLDCRERVPDDCECRNGGRCLGANTTLCQCPLGFFGLLCEFEITAMPCNMNTQCPDGGYCMEHGGSYLCVCHTDHNASHSLPSPCDSDPCFNGGSCDAHDDSYTCECPRGFHGKHCEKARPHLCSSGPCRNGGTCKEAGGEYH

SEQ ID NO: 66415 - protein, 72 aa, Homo sapiens
FADEHVPGSPFTVKISGEGRVKESITRTSRAPSVATVGSICDLNLKIPGVRVMNCSAQILWGWRVQFHTGSR

SEQ ID NO: 66416 - protein, 64 aa, Homo sapiens
MEAVPRMPMIWLDLKEAGDFHFQPAVKKFVLKNYGENPEAYNEELKKLELLRQDRDLLRQVCGP

SEQ ID NO: 66417 - protein, 577 aa, Homo sapiens
MDRMTEDALRLNLLKRSLDPADERDDVLAKRLKMEGHEAMERLKMLALLKRKDLANLEVPHELPTKQDGSGVKGYEEKLNGNLRPHGDNRTAGRPGKENINDEPVDMSARRSEPERGRLTPSPDIIVLSDNEASSPRSSSRMEERLKAANLEMFKGKGIEERQQLIKQLRDELRLEEARLVLLKKLRQSQLQKENVVQKTPVVQNAASIVQPSPAHVGQQGLSKLPSRPGAQGVEPQNLRTLQGHSVIRSATNTTLPHMLMSQRVIAPNPAQLQGQRGPPKPGLQSSSSVPCQRTTSSAIYMNLASHIQPGTVNRVSSPLPSPSAMTDAANSQAAAKLALRKQLEKTLLEIPPPKPPAPLLHFLPSAANSEFIYMVGLEEVVQSVIDSQGKSCASLLRVEPFVCAQCRTDFTPHWKQEKNGKILCEQCMTSNQKKALKAEHTNRLKNAFVKALQQEQEIEQRLQQQAALSPTTAPAVSSVSKQETIMRHHTLRQAPQPQSSLQRGIPTSARSMLSNFAQAPQLSVPGGLLGMPGVNIAYLNTGIGGHKGPSLADRQREYLLDMIPPRSISQSISGQK

SEQ ID NO: 66418 - protein, 48 aa, Homo sapiens
MENGCLLNYLRENKGKLRKEMLLSVCQDICEGMEYLERNGYIHRDLEF

SEQ ID NO: 66419 - protein, 45 aa, Homo sapiens
SSDPPASASQSAGIRGVRHHPRPVCSLIETGFHRVSQDGLHLLTS

SEQ ID NO: 66420 - protein, 179 aa, Homo sapiens
MSSTQFNKGPSYGLSAEVKNRLLSKYDPQKEAELRTWIEGLTGLSIGPDFQKGLKDGTILCTLMNKLQPGSVPKINRSMQNWHQLENLSNFIKAMVSYGMNPVDLFEANDLFESGNMTQVQAKTKGLQSGVDIGVKYSEKQERNFDDATMKAGQCVIGLQMGTNKCASQSGMTAYGTRR

SEQ ID NO: 66421 - protein, 101 aa, Homo sapiens
METESGNQEKVMEEESTEKKKEVEKKKRSRVKQVLADIAKQVDFWFGDANLHKDRFLREQIEKSRDGCRNALAPCLLTPTSAPTSTPSAPPKRSSISLPSS

SEQ ID NO: 66422 - protein, 80 aa, Homo sapiens
MNKLRQSFRRKKDVYVPEASRPHQWQTDEEGVRTGKCSFPVKYLGHVEVDESRGMHICEDAVKRLKATGTLIEPFLTYAV

SEQ ID NO: 66423 - protein, 46 aa, Homo sapiens
MEAVLNELVSVEDLLSCCPKGARRNSGITSSTWPWGTTGSRNTRRP

SEQ ID NO: 66424 - protein, 67 aa, Homo sapiens
MDDDANGDVDVEESDEFLREDLNYHDPTVKHSTFHGEDKLISVEDLWKAWKSSEVYNWTVDEVVQWL

SEQ ID NO: 66425 - protein, 233 aa, Homo sapiens
  MOD_RES (1)..(1): Any amino acid
XDQAGVDKVLAQSRHELDSKTIDPKVAFPRRAQPKMVTRTKKIFVGGLSVNTTVEDVKQYFEQFGKVDDAMLMFDKTTNRHRGFGFVTFESEDIVEKVCEIHFHEINNKMVECKKAQPKEVMSPTGSARGRSRVMPYGMDAFMLGIGMLGYPGFQATTYASRSYTGLAPGYTYQFPAIPLTAYGPMAAAAAAAAVVRGTGSHPWTMAPPPGSTPSRTGGFLGTTSPGPMAELY

SEQ ID NO: 66426 - protein, 274 aa, Homo sapiens
MAAEPNKTEIQTLFKRLRAVPTNKACFDCGAKNPSWASITYGVFLCIDCSGVHRSLGVHLSFIRSTELDSNWNWFQLRCMQVGGNANALGAKKGLGAQKVSSQSFSEIERQAQVAEKLREQQAADAKKQAEESMVASMRLAYQELQIDRKKEEKKLQNLEGKKREQAERLGMGLVSRSSVSHSVLSEMQVIEQETPVSAKSSRSQLDLFDDVGTFASGPPKYKDNPFSLGESFGSRWDTDAAWGMDRVEEKEPEVTISSIRPISERATNRREVE

SEQ ID NO: 66427 - protein, 48 aa, Homo sapiens
  MOD_RES (1)..(1): Any amino acid
XTMSVLSCICEARQENEARSEDPPTTPIREKKSLICLSLHMAMSYIVT

SEQ ID NO: 66428 - protein, 62 aa, Homo sapiens
MDNYADLSDTELTTLLRRYNIPHGPVDQLVGFTRRRSSSTRPRGGGSRPPARPPPPLIASLT

SEQ ID NO: 66429 - protein, 1802 aa, Homo sapiens
MKSPALQPLSMAGLQLMTPASSPMGPFFGLPWQQEAIHDNIYTPRKYQVELLEAALDHNTIVCLNTGSGKTFIAVLLTKELSYQIRGDFSRNGKRTVFLVNSANQVAQQVSAVRTHSDLKVGEYSNLEVNASWTKERWNQEFTKHQVLIMTCYVALNVLKNGYLSLSDINLLVFDECHLAILDHPYREIMKLCENCPSCPRILGLTASILNGKCDPEELEEKIQKLEKILKSNAETATDLVVLDRYTSQPCEIVVDCGPFTDRSGLYERLLMELEEALNFINDCNISVHSKERDSTLISKQILSDCRAVLVVLGPWCADKVAGMMVRELQKYIKHEQEELHRKFLLFTDTFLRKIHALCEEHFSPASLDLKFVTPKVIKLLEILRKYKPYERQQFESVEWYNNRNQDNYVSWSDSEDDDEDEEIEEKEKPETNFPSPFTNILCGIIFVERRYTAVVLNRLIKEAGKQDPELAYISSNFITGHGIGKNQPRNKQMEAEFRKQEEVLRKFRAHETNLLIATSIVEEGVDIPKCNLVVRFDLPTEYRSYVQSKGRARAPISNYIMLADTDKIKSFEEDLKTYKAIEKILRNKCSKSVDTGETDIDPVMDDDDVFPPYVLRPDDGGPRVTINTAIGHINRYCARLPSDPFTHLAPKCRTRELPDGTFYSTLYLPINSPLRASIVGPPMSCVRLAERVVALICCEKLHKIGELDDHLMPVGKETVKYEEELDLHDEEETSVPGRPGSTKRRQCYPKAIPECLRDSYPRPDQPCYLYVIGMVLTTPLPDELNFRRRKLYPPEDTTRCFGILTAKPIPQIPHFPVYTRSGEVTISIELKKSGFMLSLQMLELITRLHQYIFSHILRLEKPALEFKPTDADSAYCVLPLNVVNDSSTLDIDFKFMEDIEKSEARIGIPSTKYTKETPFVFKLEDYQDAVIIPRYRNFDQPHRFYVADVYTDLTPLSKFPSPEYETFAEYYKTKYNLDLTNLNQPLLDVDHTSSRLNLLTPRHLNQKGKALPLSSAEKRKAKWESLQNKQILVPELCAIHPIPASLWRKAVCLPSILYRLHCLLTAEELRAQTASDAGVGVRSLPADFRYPNLDFGWKKSIDSKSFISISNSSSAENDNYCKHSTIVPENAAHQGANRTSSLENHDQMSVNCRTLLSESPGKLHVEVSADLTAINGLSYNQNLANGSYDLANRDFCQGNQLNYYKQEIPVQPTTSYSIQNLYSYENQPQPSDECTLLSNKYLDGNANKSTSDGSPVMAVMPGTTDTIQVLKGRMDSEQSPSIGYSSRTLGPNPGLILQALTLSNASDGFNLERLEMLGDSFLKHAITTYLFCTYPDAHEGRLSYMRSKKVSNCNLYRLGKKKGLPSRMVVSIFDPPVNWLPPGYVVNQDKSNTDKWEKDEMTKDCMLANGKLDEDYEEEDEEEESLMWRAPKEEADYEDDFLEYDQEHIRFIDNMLMGSGAFVKKISLSPFSTTDSAYEWKMPKKSSLGSMPFSSDFEDFDYSSWDAMCYLDPSKAVEEDDFVVGFWNPSEENCGVDTGKQSISYDLHTEQCIADKSIADCVEALLGCYLTSCGERAAQLFLCSLGLKVLPVIKRTDREKALCPTRENFNSQQKNLSVSCAAASVASSRSSVLKDSEYGCLKIPPRCMFDHPDADKTLNHLISGFENFEKKINYRFKNKAYLLQAFTHASYHYNTITDCYQRLEFLGDAILDYLITKHLYEDPRQHSPGVLTDLRSALVNNTIFASLAVKYDYHKYFKAVSPELFHVIDDFVQFQLEKNEMQGMDSEKLQELIGNVMVWHF

SEQ ID NO: 66430 - protein, 14 aa, Homo sapiens
MAQGFAVGFDPLGL

SEQ ID NO: 66431 - protein, 87 aa, Homo sapiens
MAAAALRDPAQVPVAADLLTDHEEGYVTFEDVAVYFSQEEWRLLDDAQRLLYRNVMLENFTLLASLGKVLTPHPSILSWARLFLLFL

SEQ ID NO: 66432 - protein, 23 aa, Homo sapiens
MAGKSSLFKVILLGDGGVGKSSL

SEQ ID NO: 66433 - protein, 272 aa, Homo sapiens
  MOD_RES (1)..(1): Any amino acid
XMIHIGIGDIEFQECFQESEHLKESLKCCLLHLFGAIVAGGQRNALQAISPATMEVLMRVLADCDSWEDGDPEEVGRKAELTLKCLTEVVHILLSSNSDQRQVETSTILENYFKLLNSDHSALPNQRRSRQWENRFIALQIKMLNTITAMLDCTDRPVLQAIFLNSNCFEHLIRLLQNCKVFQGQLDCLAISTIQALTAVMNKSPAAKEVFKERIGYTHMLEVLKSLGQPPLELLKELMNMAVEGDHTSVGILGISNVQPLLLLIQWLPELQ

SEQ ID NO: 66434 - protein, 150 aa, Homo sapiens
  MOD_RES (1)..(1): Any amino acid
XRESSVPVTPSVPPPASQHSTPAGLPPSRAKPPTEGAGSPAKASQASKLRASKEEKEDWLSHALSRKKSQGLAREQHAGTSEGLHLAGTAGHPPSGSLTWAFCHLHLERCLSSANLSPAHKGLSTQLLEGVLEQLHEKDRVSGLVSRGPL

SEQ ID NO: 66435 - protein, 142 aa, Homo sapiens
MTMTANKNSSITHGAGGTKAPRGTLSRSQSVSPPPVLSPPRSPIYPLSDSETSACRYPSHSSSRVLLKDRHPPAPSPQNPQDPSPDTSPPTCPFKTASFGYLDRSPSACKRDAQKESVQGAAQDVAGVAACLPLAQSTPFPG

SEQ ID NO: 66436 - protein, 214 aa, Homo sapiens
MSDHGDVSLPPEDRVRALSQLGSAVEVNEDIPPRRYFRSGVEIIRMASIYSEEGNIEHAFILYNKLFIEKLPKHRDYKSAVIPEKKDTVKKLKEIAFPKAEELKAELLKRYTKEYTEYNEEKKKEAEELARNMAIQQELEKEKQRVAQQKQQQLEQEQFHAFEEMIRNQELEKERLKIVQEFGKPSDCHTTVRPAKPPVVDRSLKPGALSNSES

SEQ ID NO: 66437 - protein, 135 aa, Homo sapiens
MSLVLNDLLICCRQLEHDRATERKKEVEKFKRLIRDPETIKHLDRHSDSKQGKYLNWDAVFRFLQKYIQKETECLRIAKPNVSASTQASRQKKMQEISSLVKYFIKCANRRAPRLKCQELLNYIMDTVKDSSNGA

SEQ ID NO: 66438 - protein, 280 aa, Homo sapiens [sequence omitted]

SEQ ID NO: 66439 - protein, 83 aa, Homo sapiens
MNMIWRNSISCLRLGKVPHRYQSGYHPVAPLGSRILTDPAKVFEHNMWDHMQWSKEEEAAARKKVKENSAVRVLLEEQVKYER

SEQ ID NO: 66440 - protein, 729 aa, Homo sapiens
METKENRWVPVTVLPGCVGCRTVAALASWTVRDVKERIFAETGFPVSEQRLWRGGRELSDWIKIGDLTSKNCHLFVNLQSKGLKGGGRFGQTTPPLVDFLKDILRRYPEGGQILKELIQNAEDAGATEVKFLYDETQYGTETLWSKDMAPYQGPALYVYNNAVFTPEDWHGIQEIARSRKKDDPLKVGRFGIGFNSVYHITDVPCIFSGDQIGMLDPHQTLFGPHESGQCWNLKDDSKEISELSDQFAPFVGIFGSTKETFINGNFPGTFFRFPLRLQPSQLSSNLYNKQKVLELFESFRADADTVLLFLKSVQDVSLYVREADGTEKLVFRVTSSESKALKHERPNSIKILGTAISNYCKKTPSNNITCVTYHVNIVLEEESTKDAQKTSWLVCNSVGGRGISSKLDSLADELKFVPIIGIAMPLSSRDDEAKGATSDFSGKAFCFLPLPPGEESSTGLPVHISGFFGLTDNRRSIKWRELDQWRDPAALWNEFLVMNVVPKAYATLILDSIKRLEMEKSSDFPLSVDVIYKLWPEASKVKVHWQPVLEPLFSELLQNAVIYSISCDWVRLEQVYFSELDENLEYTKTVLNYLQSSGKQIAKVPGNVDAAVQLTAASGTTPVRKVTPAWVRQVLRKCAHLGCAEEKLHLLEFVLSDQAYSELLGLELLPLQNGNFVPFSSSVSDQDVIYITSAEYPRSLFPSLEGRFILDNLKPHLVAALKEAAQTRA

SEQ ID NO: 66441 - protein, 620 aa, Homo sapiens
  MOD_RES (1)..(1): Any amino acid
XGLEVPRRPGARTGPATKDPTAVERANLLNMAKLSIKGLIESALSFGRTLDSDYPPLQQFFVVMEHCLKHGLKVRKSFLSYNKTIWGPLELVEKLYPEAEEIGASVRDLPGLKTPLGRARAWLRLALMQKKMADYLRCLIIQRDLLSEFYEYHALMMEEEGAVIVGLLVGLNVIDANLCVKGEDLDSQVGVIDFSMYLKNEEDIGNKERNVQIAAILDQKNYVEELNRQLNSTVSSLHSRVDSLEKSNTKLIEELAIAKNNIIKLQEENHQLRSENKLILMKTQQHLEVTKVDVETELQTYKHSRQGLDEMYNEARRQLRDESQLRQDVENELAVQVSMKHEIELAMKLLEKDIHEKQDTLIGLRQQLEEVKAINIEMYQKLQGSEDGLKEKNEIIARLEEKTNKITAAMRQLEQRLQQAEKAQMEAEDEDEKYLQECLSKSDSLQKQISQKEKQLVQLETDLKIEKEWRQTLQEDLQKEKDALSHLRNETQQIISLKKEFLNLQDENQQLKKIYHEQEQALQELGNKLSESKLKIEDIKEANKALQGLVWLKDKEATHCKLCEKEFSLSKRKHHCRNCGEIFCNACSDNELPLPSSPKPVRVCDSCHALLIQRCSSNLP

SEQ ID NO: 66442 - protein, 104 aa, Homo sapiens
MMEEEELEFVEELEAVLQLTPEVQLAIEQVFPSQDPLDRADFNAVEYINTLFPTEQSLANIDEVVNKIRLKIRRLDDNIRTVVRGQTNVGQDGRQMKRWPASVL

SEQ ID NO: 66443 - protein, 35 aa, Homo sapiens
MNPDLDTGHNTSAPAHWGELKNANFTGPNQTSSNS

SEQ ID NO: 66444 - protein, 65 aa, Homo sapiens
MGKQKKTRKYATMKRMLSLRDQRLKEKDRLKPKKKEKKDPSALKEREVWAHLTTSSLIPTLSTFP

SEQ ID NO: 66445 - protein, 84 aa, Homo sapiens
MERVVVSMQDPDQGVKMRSQRLLVTVIPHAVTGSDVVQWLAQKFCVSEEDPVLLDKYPEAGCRAGLCHLPGQEEHPKTGDPGGL

SEQ ID NO: 66446 - protein, 1006 aa, Homo sapiens
MLRTAGRDGLCRLSTYLEELEAVELKKFKLYLGTATELGEGKIPWGSMEKAGPLEMAQLLITHFGPEEAWRLALSTFERINRKDLWERGQREDLVRDTPPGGPSSLGNQSTCLLEVSLVTPRKDPQETYRDYVRRKFRLMEDRNARLGECVNLSHRYTRLLLVKEHSNPMQVQQQLLDTGRGHARTVGHQASPIKIETLFEPDEERPEPPRTVVMQGAAGIGKSMLAHKVMLDWADGKLFQGRFDYLFYINCREMNQSATECSMQDLIFSCWPEPSAPLQELIRVPERLLFIIDGFDELKPSFHDPQGPWCLCWEEKRPTELLLNSLIRKKLLPELSLLITTRPTALEKLHRLLEHPRHVEILGFSEAERKEYFYKYFHNAEQAGQVFNYVRDNEPLFTMCFVPLVCWVVCTCLQQQLEGGGLLRQTSRTTTAVYMLYLLSLMQPKPGAPRLQPPPNQRGLCSLAADGLWNQKILFEEQDLRKHGLDGEDVSAFLNMNIFQKDINCERYYSFIHLSFQEFFAAMYYILDEGEGGAGPDQDVTRLLTEYAFSERSFLALTSRFLFGLLNEETRSHLEKSLCWKVSPHIKMDLLQWIQSKAQSDGSTLQQGSLEFFSCLYEIQEEEFIQQALSHFQVIVVSNIASKMEHMVSSFCLKRCRSAQVLHLYGATYSADGEDRARCSAGAHTLLVQLRPERTVLLDAYSEHLAAALCTNPNLIELSLYRNALGSRGVKLLCQGLRHPNCKLQNLRLKRCRISSSACEDLSAALIANKNLTRMDLSGNGVGFPGMMLLCEGLRHPQCRLQMIQLRKCQLESGACQEMASVLGTNPHLVELDLTGNALEDLGLRLLCQGLRHPVCRLRTLWLKICRLTAAACDELASTLSVNQSLRELDLSLNELGDLGVLLLCEGLRHPTCKLQTLRLGICRLGSAACEGLSVVLQANHNLRELDLSFNDLGDWGLWLLAEGLQHPACRLQKLWWLFGMDLNKMTHSRLAALRVTKPYLDIGC

SEQ ID NO: 66447 - protein, 106 aa, Homo sapiens
MLENYGAVASLAAFPFPKPALISQLERGETPWCSVPRGALDGEAPRGISSGEILKLPGATIWSLRIKPIPKKTVTKQRETRSLVTSFEPLDQALPEAELPQNFSAM

SEQ ID NO: 66448 - protein, 305 aa, Homo sapiens
MHGSGVTFHTYSNSTIGYQQSTSFTDPFFIVETLCIIWFSFEFLVRFFACPSKAGFFTNIMNIIDIVAIIPYFITLGTELAEKPEDAQQGQQAMSLAILRVIRLVRVFRIFKLSRHSKGLQILGQTLKASMRELGLLIFFLFIGVILFSSAVYFAEADERESQFPSIPDAFWWAVVSMTTVGYGDMVPTTIGGKIVGSLCAIAGVLTIALPVPVIVSNFNYFYHRETEGEEQAQYLQVTSCPKIPSSPDLKKSRSASTISKSDYMEIQEGVNNSNEDFREENLKTANCTLANTNYVNITKMLTDV

SEQ ID NO: 66449 - protein, 112 aa, Homo sapiens
MVSALRGAPLIRVCLAYFTSGFNAAALDYEADGSTNNGIFQINSRRWCSNLTPNVPNVCRMYCSDLLNPNLKDTVICAMKITQEPQGLGYWEAWRHHCQGKDLTEWVDGCDF

SEQ ID NO: 66450 - protein, 39 aa, Homo sapiens
MLSRLSGLANVVLHELSGDDDTDQNMRAPLDPVSSSVLI

SEQ ID NO: 66451 - protein, 51 aa, Homo sapiens
MPSQNAVFSQEGNMEEEEMNDGSQMVRSQMWRSVCSPLDLGKAVTGGCKAL

SEQ ID NO: 66452 - protein, 226 aa, Homo sapiens
MSSGNYQQSEALSKPTFSEEQASALVESVFGLKVSKVRPLPSYDDQNFHVYVSKTKDGPTEYVLKISNTKASKNPDLIEVQNHIIMFLKAAGFPTASVCHTKGDNTASLVSVDSGSEIKSYLVRLLTYLPGRPIAELPVSPQLLYEIGKLAAKLDKTLQRFHHPKLSSLHRENFIWNLKNVPLLEKYLYALGQNRNREIVEHVIHLFKEEVMTKLSHFRECEYSPN

SEQ ID NO: 66453 - protein, 102 aa, Homo sapiens
MNENIDILETAIKQAAEQGARIIVTPEDALYGWKFTRETVFPYLEDIPDPQVNWIPCQDPHRFGHTPVQARLSCLAKDNSIYVLANLGDKKPCNSRDSTCPP

SEQ ID NO: 66454 - protein, 276 aa, Homo sapiens
MDYPTLLLALLHVYRALCEEVLWHTSVPFAENMSLECVYPSMGILTQVEWFKIGTQQDSIAIFSPTHGMVIRKPYAERVYFLNSTMASNNMTLFFRNASEDDVGYYSCSLYTYPQGTWQKVIQVVQSDSFEAAVPSNSHIVSEPGKNVTLTCQPQMTWPVQAVRWEKIQPRQIDLLTYCNLVHGRNFTSKFPRQIVSNCSHGRWSVIVIPDVTVSDSGLYRCYLQASAGENETFVMRLTVAEGKTDNQYTLFVAGGTVLLLLFVISITTIIVIFLN

SEQ ID NO: 66455 - protein, 142 aa, Homo sapiens
MSQVTFSDVAIDFSHEEWACLDSAQRDLYKDVMVQNYENLVSVGLSVTKPYVIMLLEDGKEPWMMEKKLSKDWESRWENKELSTKKDIYDEDSPQPVTMEKVVKQSYEFSNSNKNLEYTECDTFRSTFHSKSTLSEPQNNSA

SEQ ID NO: 66456 - protein, 100 aa, Homo sapiens
MASRGRRPEHGGPPELFYDETEARKYVRNSRMIDIQTRMAGRALELLYLPENKPCYLLDIGCGTGLSGSYLSDEGHYWVGLDISPAMLGPGIPSCPAAVP

SEQ ID NO: 66457 - protein, 208 aa, Homo sapiens
MGDHAWSFLKDFLAGGVAAAVSKTAVAPIERVKLLLQVQHASKQISAEKQYKGIIDCVVRIPKEQGFLSFWRGNLANVIRYFPTQALNFAFKDKYKQLFLGGVDRHKQFWRYFAGNLASGGAAGATSLCFVYPLDFARTRLAADVGKGAAQREFHGLGDCIIKIFKSDGLRGLYQGFNVSVQGIIIYRAAYFGVYDTAKVSGIIEASE

SEQ ID NO: 66458 - protein, 4459 aa, Homo sapiens
MSEPGGGGGEDGSAGLEVSAVQNVADVSVLQKHLRKLVPLLLEDGGEAPAALEAALEEKSALEQMRKFLSDPQVHTVLVERSTLKEDVGDEGEEEKEFISYNINIDIHYGVKSNSLAFIKRTPVIDADKPVSSQLRVLTLSEDSPYETLHSFISNAVAPFFKSYIRESGKADRDGDKMAPSVEKKIAELEMGLLHLQQNIEIPEISLPIHPMITNVAKQCYERGEKPKVTDFGDKVEDPTFLNQLQSGVNRWIREIQKVTKLDRDPASGTALQEISFWLNLERALYRIQEKRESPEVLLTLDILKHGKRFHATVSFDTDTGLKQALETVNDYNPLMKDFPLNDLLSATELDKIRQALVAIFTHLRKIRNTKYPIQRALRLVEAISRDLSSQLLKVLGTRKLMHVAYEEFEKVMVACFEVFQTWDDEYEKLQVLLRDIVKRKREENLKMVWRINPAHRKLQARLDQMRKFRRQHEQLRAVIVRVLRPQVTAVAQQNQGEVPEPQDMKVAEVLFDAADANAIEEVNLAYENVKEVDGLDVSKEGTEAWEAAMKRYDERIDRVETRITARLRDQLGTAKNANEMFRIFSRFNALFVRPHIRGAIREYQTQLIQRVKDDIESLHDKFKVQYPQSQACKMSHVRDLPPVSGSIIWAKQIDRQLTAYMKRVEDVLGKGWENHVEGQKLKQDGDSFRMKLNTQEIFDDWARKVQQRNLGVSGRIFTIESTRVRGRTGNVLKLKVNFLPEIITLSKEVRNLKWLGFRVPLAIVNKAHQANQLYPFAISLIESVRTYERTCEKVEERNTISLLVAGLKKEVQALIAEGIALVWESYKLDPYVQRLAETVFNFQEKVDDLLIIEEKIDLEVRSLETCMYDHKTFSEILNRVQKAVDDLNLHSYSNLPIWVNKLDMEIERILGVRLQAGLRAWTQVLLGQAEDKAEVDMDTDAPQVSHKPGGEPKIKNVVHELRITNQVIYLNPPIEECRYKLYQEMFAWKMVVLSLPRIQSQRYQVGVHYELTEEEKFYRNALTRMPDGPVALEESYSAVMGIVSEVEQYVKVWLQYQCLWDMQAENIYNRLGEDLNKWQALLVQIRKARGTFDNAETKKEFGPVVIDYGKVQSKVNLKYDSWHKEVLSKFGQMLGSNMTEFHSQISKSRQELEQHSVDTASTSDAVTFITYVQSLKRKIKQFEKQVELYRNGQRLLEKQRFQFPPSWLYIDNIEGEWGAFNDIMRRKDSAIQQQVANLQMKIVQEDRAVESRTTDLLTDWEKTKPVTGNLRPEEALQALTIYEGKFGRLKDDREKCAKAKEALELTDTGLLSGSEERVQVALEELQDLKGVWSELSKVWEQIDQMKEQPWVSVQPRKLRQNLDALLNQLKSFPARLRQYASYEFVQRLLKGYMKINMLVIELKSEALKDRHWKQLMKRLHVNWVVSELTLGQIWDVDLQKNEAIVKDVLLVAQGEMALEEFLKQIREVWNTYELDLVNYQNKCRLIRGWDDLFNKVKEHINSVSAMKLSPYYKVFEEDALSWEDKLNRIMALFDVWIDVQRRWVYLEGIFTGSADIKHLLPVETQRFQSISTEFLALMKKVSKSPLVMDVLNIQGVQRSLERLADLLGKIQKALGEYLERERSSFPRFYFVGDEDLLEIIGNSKNVAKLQKHFKKMFAGVSSIILNEDNSVVLGISSREGEEVMFKTPVSITEHPKINEWLTLVEKEMRVTLAKLLAESVTEVEIFGKATSIDPNTYITWIDKYQAQLVVLSAQIAWSENVETALSSMGGGGDAAPLHSVLSNVEVTLNVLADSVLMEQPPLRRRKLEHLITELVHQRDVTRSLIKSKIDNAKSFEWLSQMRFYFDPKQTDVLQQLSIQMANAKFNYGFEYLGVQDKLVQTPLTDRCYLTMTQALEARLGGSPFGPAGTGKTESVKALGHQLGRFVLVFNCDETFDFQAMGRIFVGLCQVGAWGCFDEFNRLEERMLSAVSQQVQCIQEALREHSNPNYDKTSAPITCELLNKQVKVSPDMAIFITMNPGYAGRSNLPDNLKKLFRSLAMTKPDRQLIAQVMLYSQGFRTAEVLANKIVPFFKLCDEQLSSQSHYDFGLRALKSVLVSAGNVKRERIQKIKREKEERGEAVDEGEIAENLPEQEILIQSVCETMVPKLVAEDIPLLFSLLSDVFPGVQYHRGEMTALREELKKVCQEMYLTYGDGEEVGGMWVEKVLQLYQITQINHGLMMVGPSGSGKSMAWRVLLKALERLEGVEGVAHIIDPKAISKDHLYGTLDPNTREWTDGLFTHVLRKIIDSVRGELQKRQWIVFDGDVDPEWVENLNSVLDDNKLLTLPNGERLSLPPNVRIMFEVQDLKYATLATVSRCGMVWFSEDVLSTDMIFNNFLARLRSIPLDEGEDEAQRRRKGKEDEGEEAASPMLQIQRDAATIMQPYFTSNGLVTKALEHAFQLEHIMDLTRLRCLGSLFSMLHQACRNVAQYNANHPDFPMQIEQLERYIQRYLVYAILWSLSGDSRLKMRAELGEYIRRITTVPLPTAPNIPIIDYEVSISGEWSPWQAKVPQIEVETHKVAAPDVVVPTLDTVRHEALLYTWLAEHKPLVLCGPPGSGKTMTLFSALRALPDMEVVGLNFSSATTPELLLKTFDHYCEYRRTPNGVVLAPVQLGKWLVLFCDEINLPDMDKYGTQRVISFIRQMVEHGGFYRTSDQTWVKLERIQFVGACNPPTDPGRKPLSHRFLRHVPVVYVDYPGPASLTQIYGTFNRAMLRLIPSLRTYAEPLTAAMVEFYTMSQERFTQDTQPHYIYSPREMTRWVRGIFEALRPLETLPVEGLIRIWAHEALRLFQDRLVEDEERRWTDENIDTVALKHFPNIDREKAMSRPILYSNWLSKDYIPVDQEELRDYVKARLKVFYEEELDVPLVLFNEVLDHVLRIDRIFRQPQGHLLLIGVSGAGKTTLSRFVAWMNGLSVYQIKVHRKYTGEDFDEDLRTVLRRSGCKNEKIAFIMDESNVLDSGFLERMNTLLANGEVPGLFEGDEYATLMTQCKEGAQKEGLMLDSHEELYKWFTSQVIRNLHVVFTMNPSSEGLKDRAATSPALFNRCVLNWFGDWSTEALYQVGKEFTSKMDLEKPNYIVPDYMPVVYDKLPQPPSHREAIVNSCVFVHQTLHQANARLAKRGGRTMAITPRHYLDFINHYANLFHEKRSELEEQQMHLNVGLRKIKETVDQVEELRRDLRIKSQELEVKNAAANDKLKKMVKDQQEAEKKKVMSQEIQEQLHKQQEVIADKQMSVKEDLDKVEPAVIEAQNAVKSIKKQHLVEVRSMANPPAAVKLALESICLLLGESTTDWKQIRSIIMRENFIPTIVNFSAEEISDAIREKMKKNYMSNPSYNYEIVNRASLACGPMVKWAIAQLNYADMLKRVEPLRNELQKLEDDAKDNQQKANEVEQMIRDLEASIARYKEEYAVLISEAQAIKADLAAVEAKVNRSTALLKSLSAERERWEKTSETFKNQMSTIAGDCLLSAAFIAYAGYFDQQMRQNLFTTWSHHLQQANIQFRTDIARTEYLSNADERLRWQASSLPADDLCTENAIMLKRFNRYPLIIDPSGQATEFIMNEYKDRKITRTSFLDDAFRKNLESALRFGNPLLVQDVESYDPVLNPVLNREVRRTGGRVLITLGDQDIDLSPSFVIFLSTRDPTVEFPPDLCSRVTFVNFTVTRSSLQSQCLNEVLKAERPDVDEKRSDLLKLQGEFQLRLRQLEKSLLQALNEVKGRILDDDTIITTLENLKREAAEVTRKVEETDIVMQEVETVSQQYLPLSTACSSIYFTMESLKQIHFLYQYSLQFFLDIYHNVLYENPNLKGVTDHTQRLSIITKDLFQVAFNRVARGMLHQDHITFAMLLARIKLKGTVGEPTYDAEFQHFLRGNEIVLSAGSTPRIQGLTVEQAEAVVRLSCLPAFKDLIAKVQADEQFGIWLDSSSPEQTVPYLWSEETPATPIGQAIHRLLLIQAFRPDRLLAMAHMFVSTNLGESFMSIMEQPLDLTHIVGTEVKPNTPVLMCSVPGYDASGHVEDLAAEQNTQITSIAIGSAEGFNQADKAINTAVKSGRWVMLKNVHLAPGWLMQLEKKLHSLQPHACFRLFLTMEINPKVPVNLLRAGRIFVFEPPPGVKANMLRTFSSIPVSRICKSPNERARLYFLLAWFHAIIQERLRYAPLGWSKKYEFGESDLRSACDTVDTWLDDTAKGRQNISPDKIPWSALKTLMAQSIYGGRVDNEFDQRLLNTFLERLFTTRSFDSEFKLACKVDGHKDIQMPDGIRREEFVQWVELLPDTQTPSWLGLPNNAERVLLTTQGVDMISKMLKMQMLEDEDDLAYAETEKKTRTDSTSDGRPAWMRTLHTTASNWLHLIPQTLSHLKRTVENIKDPLFRFFEREVKMGAKLLQDVRQDLADVVQVCEGKKKQTNYLRTLINELVKVF

SEQ ID NO: 66459 - protein, 660 aa, Homo sapiens
MSGCGLFLRTTAAARACRGLVVSTANRRLLRTSPPVRAFAKELFLGKIKKKEVFPFPEVSQDELNEINQFLGPVEKFFTEEVDSRKIDQEGKIPDETLEKLKSLGLFGLQVPEEYGGLGFSNTMYSRLGEIISMDGSITVTLAAHQAIGLKGIILAGTEEQKAKYLPKLASGEHIAAFCLTEPASGSDAASIRSRATLSEDKKHYILNGSKVWITNGGLANIFTVFAKTEVVDSDGSVKDKITAFIVERDFGGVTNGKPEDKLGIRGSNTCEVHFENTKIPVENILGEVGDGFKVAMNILNSGRFSMGSVVAGLLKRLIEMTAEYACTRKQFNKRLSEFGLIQEKFALMAQKAYVMESMTYLTAGMLDQPGFPDCSIEAAMVKVFSSEAAWQCVSEALQILGGLGYTRDYPYERILRDTRILLIFEGTNEILRMYIALTGLQHAGRILTTRIHELKQAKVSTVMDTVGRRLRDSLGRTVDLGLTGNHGVVHPSLADSANKFEENTYCFGRTVETLLLRFGKTIMEEQLVLKRVANILINLYGMTAVLSRASRSIRIGLRNHDHEQGTDPAHCPLCWREAGAVSEDPLYTRISACTFQSTCRYQDCDICLSEETGSEMLSHLLLGKGCWIRAGIRTQDGVTPVPGLVTPAMLPSLADRLGF

SEQ ID NO: 66460 - protein, 73 aa, Homo sapiens
  MOD_RES (1)..(1): Any amino acid
XAAAAPPPELPEWLRDLPREVCLCTSTVPGLAYGICAAQRIQQGTWIGPFQGVLLPPEKVQAGAVRNTQHLWE

SEQ ID NO: 66461 - protein, 164 aa, Homo sapiens
  MOD_RES (1)..(1): Any amino acid
XVMRGHPAALAPAWGALVISLEHRFYGLSIPAGGLEMAQLRFLSSRLALADVVSARLALSRLFNISSSSPWICFGGSYAGSLAAWARLKFPHLIFASVASSAPVRAVLDFSEYNDIVLHSLGQKCLSFSRAETVAQLRSTEPQLSGVGDRQWLYQTCTEFGFYV

SEQ ID NO: 66462 - protein, 307 aa, Homo sapiens
MAALTIATGTGNWFSALALGVTLLKCLLIPTYHSTDFEVHRNWLAITHSLPISQWYYEATSEWTLDYPPFFAWFEYILSHVAKYFDQEMLNVHNLNYSSSRTLLFQRFSVIFMDVLFVYAVRECCKCIDGKKVGKELTEKPKFILSVLLLWNFGLLIVDHIHFQYNGFLFGLMLLSIARLFQKRHMEGAFLFAVLLHFKHIYLYVAPAYGVYLLRSYCFTANKPDGSIRWKSFSFVRVISLGLVVFLVSALSLGPFLALNQLPQVFSRLFPFKRGLCHAYWAPNFWALYNALDKVLSVIALYFLSLV

SEQ ID NO: 66463 - protein, 457 aa, Homo sapiens
MYLWLKLLAFGFAFLDTEVFVTGQSPTPSPTGVSSVQTPHLPTHADSQTPSAGTDTQTFSGSAANAKLNPTPGSNAISDAYLNASETTTLSPSGSAVISTTTIATTPSKPTCDEKYANITVDYLYNKETKLFTAKLNVNENVECGNNTCTNNEVHNLTECKNASVSISHNSCTAPDKTLILDVPPGVEKFQLHDCTQVEKADTTICLKWKNIETFTCDTQNITYRFQCGNMIFDNKEIKLENLEPEHEYKCDSEILYNNHKFTNASKIIKTDFGSPGEPQIIFCRSEAAHQGVITWNPPQRSFHNFTLCYIKETEKDCLNLDKNLIKYDLQNLKPYTKYVLSLHAYIIAKVQRNGSAAMCHFTTKSAPPSQVWNMTVSMTSDNSMHVKCRPPRDRNGPHERYHLEVEAGNTLVRNESHKNCDFRVKDLQYSTDYTFKAYFHNGDYPGEPFILHHSTS

SEQ ID NO: 66464 - protein, 133 aa, Homo sapiens
MTGKKSSREKRRKRSSQEAAAALAAPDIVPALASGSSGSTSGCGSAGGCGSVSCCGNANFSGSVTGGGSGGSCWGGSSVERSERRKRRSTDSSSVSGSLQQVRARPSGRFLELLLFRKKSGFQRDGAQAGAHC

SEQ ID NO: 66465 - protein, 98 aa, Homo sapiens
MKGTPSSLDTLMWIYHFHSSTEVALQPPLLSSLELSVAAAHEYLEQRFRELKSLEPPEPKMQGMLPAPKPTLGLVLREATASLVSFGTTLLEVGYWGA

SEQ ID NO: 66466 - protein, 118 aa, Homo sapiens
LDPLAPLNPLIRGPRTPGLRRTEPRLTRSCRGAFRSPRPLPKSGQADGTSEESLHLDIQKLKEKRDMLDKEISQFVSEGYSVDELEDHITQLHEYNDIKDVGQMLMGKLASRPHGSHL

SEQ ID NO: 66467 - protein, 1754 aa, Homo sapiens
MPGRKFSCKHVFYLASLPQDTGATCEVVLAPCAPSPCRNGGECRQSEDYESFSCVCPTGWQGQTCEVDINECVLSPCRHGASCQNTHGGYRCHCQAGYSGRNCETDIDDCRPNPCHNGGSCTDGINTAFCDCLPGFRGTFCEEDINECASDPCRNGANCTDCVDSYTCTCPAGFSGIHCENNTPDCTESSCFNGGTCVDGINSFTCLCPPGFTGSYCQHDVNECDSQPCLHGGTCQDGCGSYRCTCPQGYTGPNCQNLVHWCDSSPCKNGGKCWQTHTQYRCECPSGWTGLYCDVPSVSCEVAAQRQGVDVARLCQHGGLCVDAGNTHHCRCQAGYTGSYCEDLVDECSPSPCQNGATCTDYLGGYSCKCVAGYHGVNCSEEIDECLSHPCQNGGTCLDLPNTYKCSCPRGTQGVHCEINVDDCNPPVDPVSRSPKCFNNGTCVDQVGGYSCTCPPGFVGERCEGDVNECLSNPCDARGTQNCVQRVNDFHCECRAGHTGRRCESVINGCKGKPCKNGGTCAVASNTARGFICKCPAGFEGATCENDARTCGSLRCLNGGTCISGPRSPTCLCLGPFTGPECQFPASSPCLGGNPCYNQGTCEPTSESPFYRCLCPAKFNGLLCHILDYSFGGGAGRDIPPPLIEEACELPECQEDAGNKVCSLQCNNHACGWDGGDCSLNFNDPWKNCTQSLQCWKYFSDGHCDSQCNSAGCLFDGFDCQRAEGQCNPLYDQYCKDHFSDGHCDQGCNSAECEWDGLDCAEHVPERLAAGTLVVVVLMPPEQLRNSSFHFLRELSRVLHTNVVFKRDAHGQQMIFPYYGREEELRKHPIKRAAEGWAAPDALLGQVKASLLPGGSEGGRRRRELDPMDVRGSIVYLEIDNRQCVQASSQCFQSATDVAAFLGALASLGSLNIPYKIEAVQSETVEPPPPAQLHFMYVAAAAFVLLFFVGCGVLLSRKRRRQHGQLWFPEGFKVSEASKKKRREPLGEDSVGLKPLKNASDGALMDDNQNEWGDEDLETKKFRFEEPVVLPDLDDQTDHRQWTQQHLDAADLRMSAMAPTPPQGEVDADCMDVNVRGPDGFTPLMIASCSGGGLETGNSEEEEDAPAVISDFIYQGASLHNQTDRTGETALHLAARYSRSDAAKRLLEASADANIQDNMGRTPLHAAVSADAQGVFQILIRNRATDLDARMHDGTTPLILAARLAVEGMLEDLINSHADVNAVDDLGKSALHWAAAVNNVDAAVVLLKNGANKDMQNNREETPLFLAAREGSYETAKVLLDHFANRDITDHMDRLPRDIAQERMHHDIVRLLDEYNLVRSPQLHGAPLGGTPTLSPPLCSPNGYLGSLKPGVQGKKVRKPSSKGLACGSKEAKDLKARRKKSQDGKGCLLDSSGMLSPVDSLESPHGYLSDVASPPLLPSPFQQSPSVPLNHLPGMPDTHLGIGHLNVAAKPEMAALGGGGRLAFETGPPRLSHLPVASGTSTVLGSSSGGALNFTVGGSTSLNGQCEWLSRLQSGMVPNQYNPLRGSVAPGPLSTQAPSLQHGMVGPLHSSLAASALSQMMSYQGLPSTRLATQPHLVQTQQVQPQNLQMQQQNLQPANIQQQQSLQPPPPPPQPHLGVSSAASGHLGRSFLSGEPSQADVQPLGPSSLAVHTILPQESPALPTSLPSSLVPPVTAAQFLTPPSQHSYSSPVDNTPSHQLQVPEHPFLTPSPESPDQWSSSSPHSNVSDWSEGVSSPPTSMQSQIARIPEAFK

SEQ ID NO: 66468 - protein, 192 aa, Homo sapiens
MAGNFWQSSHYPKRRDHFALLKSLEQSWSFLSGKGNECGRQDNSGKTNEKIMKGHCLSLQWILDKQDLLKERQKDLKFLSEEEYWKLQIFFTNVIQALGEHLKLRQQVIATATVYFKRFYARYSLKSIDPVLMAPTCVFLASKVEEFGVVSNTRLIAAATSVLKTRFSYAFPKEFPYRMNHILECEFYLLEL

SEQ ID NO: 66469 - protein, 95 aa, Homo sapiens
MDRLGSFSNDPSDKPPCRGCSSYLMEPYIKCAECGPPPFFLCLQCFTRGFEYKKHQSDHTYEIMTSDFPVLDPSWTAQEEMALLEAVMDCGFGNW

SEQ ID NO: 66470 - protein, 57 aa, Homo sapiens
QEQDLEKTRQYSQKLGLLTEQLQSLTLFLQTKLKEKTMFQESRNIAFFGLPAVCTKQ

SEQ ID NO: 66471 - protein, 490 aa, Homo sapiens
MNPAAEAEFNILLATDSYKVTHYKQYPPNTSKVYSYFECREKKTENSKLRKVKYEETVFYGLQYILNKYLKGKVVTKEKIQEAKDVYKEHFQDDVFNEKGWNYILEYDGHLPIEIKAVPEGFVIPRGNVLFTVENTDPECYWLTNWIETILVQSWYPITVATNSREQKKILAKYLLETSGNLDGLEYKLHDFGYRGVSSQETAGIGASAHLVNFKGTDTVAGLALIKKYYGTKDPVPGYSVPAAEHSTITAWGKDHEKDAFEHIVTQFSSVPVSVVSDSYDIYNACEKIWGEDLRHLIVSRSTQAPLIIRPDSGNPLDTVLKVLEILGKKFPVTENSKGYKLLPPYLRVIQGDGVDINTLQEIVEGMKQKMWSIENIAFGSGGGLLQKLTRDLLNCSFKCSYVVTNGLGINVFKDPVADPNKRSKKGRLSLHRTPAGNFVTLEEGKGDLEEYGQDLLHTVFKNGKVTKSYSFDEIRKNAQLNIELEAAHH

SEQ ID NO: 66472 - protein, 473 aa, Homo sapiens
MQLPRWWELGDPCAWTGQGRGTRRMSPATTGTFLLTVYSIFSKVHSDRNVYPSAGVLFVHVLEREYFKGEFPPYPKPGEISNDPITFNTNLMGYPDRPGWLRYIQRTPYSDGVLYGSPTAENVGKPTIIECHLQLQSLPEALSSHCPEKEYFITAYNRRTFETARHNLIINIMSAEDFPLPYQAEFFIKNMNVEEMLASEVLGDFLGAVKNVWQPERLNAINITSALDRGGRVPLPINDLKEGVYVMVGADVPFSSCLREVENPQNQLRCSQEMEPVITCDKKFRTQFYIDWCKISLVDKTKQVSTYQEVIRGEGILPDGGEYKPPSDSLKSRDYYTDFLITLAVPSAVALVLFLILAYIMCCRREGVIQLVHHSAIQKSTKELRDMSKNREIAWPLSTLPVFHPVTGEIIPPLHTDNYDSTNMPLMQTQQNLPHQTQIPQQQTTGDFRLTTFQRFEVNGIPEERKLTEAMNL

SEQ ID NO: 66473 - protein, 115 aa, Homo sapiens
MILNSLSLCYHNKLILAPMVRVGTLPMRLLALDYGADIVYCEELIDLKMIQCKRVVNEVLSTVDFVAPDDRVVFRTCEREQNRVVFQMGTSDAERALAVARLVENDVAGIDVNMG

SEQ ID NO: 66474 - protein, 1504 aa, Homo sapiens
MAGVGAAALSLLLHLGALALAAGAEGGAVPREPPGQQTTAHSSVLAGNSQEQWHPLREWLGRLEAAVMELREQNKDLQTRVRQLESCECHPASPQCWGLGRAWPEGARWEPDACTACVCQDGAAHCGPQAHLPHCRGCSQNGQTYGNGETFSPDACTTCRCLTGAVQCQGPSCSELNCLESCTPPGECCPICRCTEGGSHWEHGQEWTTPGDPCRICRCLEGHIQCRQRECASLCPYPARPLPGTCCPVCDGCFLNGREHRSGEPVGSGDPCSHCRCANGSVQCEPLPCPPVPCRHPGKIPGQCCPVCDGCEYQGHQYQSQETFRLQERGLCVRCSCQAGEVSCEEQECPVTPCALPASGRQLCPACELDGEEFAEGVQWEPDGRPCTACVCQDGVPKCGAVLCPPAPCQHPTQPPGACCPSCDSCTYHSQVYANGQNFTDADSPCHACHCQDGTVTCSLVDCPPTTCARPQSGPGQCCPRCPDCILEEEVFVDGESFSHPRDPCQECRCQEGHAHCQPRPCPRAPCAHPLPGTCCPNDCSGCAFGGKEYPSGADFPHPSDPCRLCRCLSGNVQCLARRCVPLPCPEPVLLPGECCPQCPAPAGCPRPGAAHARHQEYFSPPGDPCRRCLCLDGSVSCQRLPCPPAPCAHPRQGPCCPSCDGCLYQGKEFASGERFPSPTAACHLCLCWEGSVSCEPKACAPALCPFPARGDCCPDCDGCEYLGESYLSNQEFPDPREPCNLCTCLGGFVTCGRRPCEPPGCSHPLIPSGHCCPTCQGCRYHGVTTASGETLPDPLDPTCSLCTCQEGSMRCQKKPCPPALCPHPSPGPCFCPVCHSCLSQGREHQDGEEFEGPAGSCEWCRCQAGQVSCVRLQCPPLPCKLQVTERGSCCPRCRGCLAHGEEHPEGSRWVPPDSACSSCVCHEGVVTCARIQCISSCAQPRQGPHDCCPQCSDCEHEGRKYEPGESFQPGADPCEVCICEPQPEGPPSLRCHRRQCPSLVGCPPSQLLPPGPQHCCPTCAEALSNCSEGLLGSELAPPDPCYTCQCQDLTWLCIHQACPELSCPLSERHTPPGSCCPVCRAPTQSCVHQGREVASGERWTVDTCTSCSCMAGTVRCQSQRCSPLSCGPDKAPALSPGSCCPRCLPRPASCMAFGDPHYRTFDGRLLHFQGSCSYVLAKDCHSGDFSVHVTNDDRGRSGVAWTQEVAVLLGDMAVRLLQDGAVTVDGHPVALPFLQEPLLYVELRGHTVILHAQPGLQVLWDGQSQVEVSVPGSYQGRTCGLCGNFNGFAQDDLQGPEGLLLPSEAAFGNSWQVSEGLWPGRPCSAGREVDPCRAAGYRARREANARCGVLKSSPFSRCHAVVPPEPFFAACVYDLCACGPGSSADACLCDALEAYASHCRQAGVTPTWRGPTLCVVGCPLERGFVFDECGPPCPRTCFNQHIPLGELAAHCVRPCVPGCQCPAGLVEHEAHCIPPEACPQVLLTGDQPLGARPSPSREPQETP

SEQ ID NO: 66475 - protein, 417 aa, Homo sapiens
MKQRKGQGSGGSRGRKKRGLSDISPSTSLPPLVEGQLRCFLKLTVNRVIWKIAKPPTCVLVRVRWWGETSDGTLFCPRDALQTEPKAVRTTTRYAIRCGPKQFTSYLTDMAVLVLEVITKLDGLPIGRVQINGLAQLSPTHQINGFFTIVSSTSKKLGELQVSLALEPLSETYDSYHPLPTTDMTENVLLSKQGFRENTEPSSTQFQVPSRPRDIHTIKIDGKELAANSSRSTTPRGKDHVCFAENPDTIKDSSFGLQHSLNSGQSLESVTLKGRAPRKQMSLLNSSEFQPQIRTVAKSHSDSCILSSNNLPTKDLLSALLEQGNKLRNAMVISAMKSSPETSMLLDQVHPPINEDSLRASTQIRAFSRNRFKDHIEDHLLPSTENTFWRHDTKADTRAIQLLLGSAQWCPGWSAVA

SEQ ID NO: 66476 - protein, 160 aa, Homo sapiens
MAPFNMRCKTCGEYIYKGKKFNARKETVQNEVYLGLPIFRFYIKCTRCLAEITFKTDPENTDYTMEHGATRNFQAEKLLEEEEKRVQKEREDEELNNPMKVLENRTKDSKLEMEVLENLQELKDLNQRQAHVDFEAMLRQHRLSEEERRRQQQEEDEQET

SEQ ID NO: 66477 - protein, 60 aa, Homo sapiens
  MOD_RES (1)..(1): Any amino acid
XTRESIYPYLEDIPDPGVNWIPCRDPWRKSKKMNEPVSKELCYHCHSECNQYGQWKLYRT

SEQ ID NO: 66478 - protein, 97 aa, Homo sapiens
KSIQEEKRRPRKDSQGKLLDLEDFYYKEFLPSRSGPKEHSPSLRERRPQQELQNQCIKANERIHLNYDICPLPPKEDVLFHLGIQHCNMLELRDVLV

SEQ ID NO: 66479 - protein, 938 aa, Homo sapiens
MKQSPALAPEERCRRAGSPKPVLRADDNNMGNGCSQKLATANLLRFLLLVLIPCICALVLLLVILLSYVGACMNITHSQCQMLPYHATLTPLLSVVRNMEMEKFLKFFTYLHRLSCYQHIMLFGCTLAFPECIIDGDDSHGLLPCRSFCEAAKEGCESVLGMVNYSWPDFLRCSQFRNQTESSNVSRICFSPQQENGKQLLCGRGENFLCASGICIPGKLQCNGYNDCDDWSDEAHCNCSENLFHCHTGKCLNYSLVCDGYDDCGDLSDEQNCACHSQGLVECRNGQCIPSTFQCDGDEDCKDGSDEENCSVIQTSCQEGDQRCLYNPCLDSCGGSSLCDPNNSLNNCSQCEPITLELCMNLPYNSTSYPNYFGHRTQKEASISWESSLFPALVQTNCYKYLMFFSCTILVPKCDVNTGEHIPPCRALCEHSKERCESVLGIVGLQWPEDTDCSQFPEENSDNQTCLMPDEYVEECSPSHFKCRSGQCVLASRRCDGQADCDDDSDEENCGCKERDLWECPSNKQCLKHTVICDGFPDCPDYMDEKNCSFCQDDELECANHACVSRDLWCDGEADCSDSSDEWDCVTLSINVNSSSFLMVHRAATEHHVCADGWQEILSQLACKQMGLGEPSVTKLIQEQEKEPRWLTLHSNWESLNGTTLHELLVNGQSCESRSKISLLCTKQDCGRRPAARMNKRILGGRTSRPGRWPWQCSLQSEPSGHICGCVLIAKKWVLTVAHCFEGRENAAVWKVVLGINNLDHPSVFMQTRFVKTIILHPRYSRAVVDYDISIVELSEDISETGYVRPVCLPNPEQWLEPDTYCYITGWGHMGNKMPFKLQEGEVRIISLEHCQSYFDMKTITTRMICAGYESGTVDSCMGDSGGPLVCEKPGGRWTLFGLTSWGSVCFSKVLGPGVYSNVSYFVEWIKRQIYIQTFLLN

SEQ ID NO: 66480 - protein, 148 aa, Homo sapiens
MGVMYLQAKECQGFLKTAFHRSQTLSYRNGYAIVRRPTVGIGGDRLQFNQLSQAELDELASKAPVLTYGQPKQAPPADFIPAHVAFDKKVLKFDAYFQEDVPMSTEEQYRIRQVNIYYYLEDDSMSVIEPVVENSGILQGKLIKRQRL

SEQ ID NO: 66481 - protein, 104 aa, Homo sapiens
MTEEVDFLGQDSDGGSEEVVLTPAELIERLEQAWMNEKFAPELLESKPEIVECVMEQLEHMEENLRRAKREDLKVSIHQMEMERIRYVLSSYLRCRLMKFPNQI

SEQ ID NO: 66482 - protein, 85 aa, Homo sapiens
MLCDEEAQKRKAKESGMALPQGRLTFMDVAIEFSQEEWKSLDPGQRALYRDVMLENYRNLVFLGICLPDLSIISMLKQRREPLIL

SEQ ID NO: 66483 - protein, 143 aa, Homo sapiens
MATATEQWVLVEMVQALYEAPAYHLILEGILILWIIRLLFSKTYKLQERSDLTVKEKEELIEEWQPEPLVPPVPKDHPALNYNIVSGPPSHKTVVNGKECINFASFNFLGLLDNPRVKAAALASLKKYGVGTCGPRGFYGTFG

SEQ ID NO: 66484 - protein, 118 aa, Homo sapiens
MELDLSPPHLSSSPEDLCPAPGTPPGTPRPPDTPLPEEVKRSQPLLIPTTGRKLREEERRATSLPSIPNPFPELCSPPSQSPILGGPSSARGLLPRDASRPHSCAIPGAQVVKVYSED

SEQ ID NO: 66485 - protein, 11 aa, Homo sapiens
MLAGGVRSMPS

SEQ ID NO: 66486 - protein, 249 aa, Homo sapiens
  MOD_RES (1)..(1): Any amino acid
XELGRQFRDWCLRTYGDSAKTKTVTRSKYQRIAEVLQGGGGTGAGSGPAAGEKGKFQFWVRSKGFRLGSGREPKMGQVVYVPVKTGSGADGLSEPEGISLKRVAVVEDFFDIIYSMHVESSAEPGKAPKHAGQKKTYRAIAETYAFLPREAVTRFLMSCTECQKRMHFNSNGLEPKENEPPSPLVSGIIDYNMPLTSTYLKQMKLRVMNSQEQCLPSGAEDIMSGGPTLEAAEFDDLIGKCLPDRPIAE

SEQ ID NO: 66487 - protein, 69 aa, Homo sapiens
  MOD_RES (1)..(1): Any amino acid
XRPPHPAPQAPSPTRPHPPCPRPPSHPSTRACSPWGTMAWAPRTASVPGRSATAATWKYRSPRRCATSV

SEQ ID NO: 66488 - protein, 93 aa, Homo sapiens
MIDHLVTMKISHWDGVIRELAARALHNLAQQAPEFSATQVFPRLLSMTLSPDLHMRHGSILACAEVAYALYKLAAQENSSMIVSYTGVWEDSS

SEQ ID NO: 66489 - protein, 589 aa, Homo sapiens
MQRADSEQPSKRPRCDDSPRTPSNTPSAEADWSPGLELHPDYKTWGPEQVCSFLRRGGFEEPVLLKNIRENEITGALLPCLDESRFENLGVSSLGERKKLLSYIQRLVQIHVDTMKVINDPIHGHIELHPLLVRIIDTPQFQRLRYIKQLGGGYYVFPGASHNRFEHSLGVGYLAGCLVHALGEKQPELQISERDVLCVQIAGLCHDLGHGPFSHMFDGRFIPLARPEVKWTHEQGSVMMFEHLINSNGIKPVMEQYGLIPEEDICFIKEQIVGPLESPVEDSLWPYKGRPENKSFLYEIVSNKRNGIDVDKWDYFARDCHHLGIQNNFDYKRFIKFARVCEVDNELRICARDKEVGNLYDMFHTRNSLHRRAYQHKVGNIIDTMITDAFLKADDYIEITGAGGKKYRISTAIDDMEAYTKLTDNIFLEILYSTDPKLKDAREILKQIEYRNLFKYVGETQPTGQIKIKREDYESLPKEVASAKPKVLLDVKLKAEDFIVDVINMDYGMQEKNPIDHVSFYCKTAPNRAIRITKNQVSQLLPEKFAEQLIRVYCKKVDRKSLYAARQYFVQWCADRNFTKPQSPTRASH

SEQ ID NO: 66490 - protein, 288 aa, Homo sapiens
MDGTETRQRRLDSCGKPGELGLPHPLSTGGLPVASEDGALRAPESQSVTPKPLETEPSRETTWSIGLQVTVPFMFAGLGLSWAGMLLDYFQGKKLRGFSCELTRSPHGVLPESFFTIMCQVVVPILLSGLCMMTAGLVMNTIQHWPVFVEVKDLLTLVPPLVGLKGNLEMTLASRLSTAANTGQIDDPQEQHRVISSNLALIQVQATVVGLLAAVAALLLGVVSREEVDVAKVELLCASSVLTAFLAAFALGVLMVCIVIGARKLGVNPDNIATPIAASLGDLITLSI

SEQ ID NO: 66491 - protein, 58 aa, Homo sapiens
MAKERGLISPSDFAQLQKYMEYSTKKVSDVLKLFEDGEMAKYVQGDAIGYEGFQQFLK

SEQ ID NO: 66492 - protein, 196 aa, Homo sapiens
MFDRNIWPKRQRQNNFPMFPSPKAWNFRGRKRKQSTQDEDAVSLCSLDISEPSNKRVKPLSRVTSLANLIPPVKATPLKRFSQTLQRSISFRSESRPDILAPRPWSRNAAPSSTKRRDSKLWSETFDVCVNQMLTSKEIKRQEAIFELSQGEEDLIEDLKLAKKAYHDPMLKLSIMTEQELNQIFGTLDSLIPLHE

SEQ ID NO: 66493 - protein, 219 aa, Homo sapiens
MWWHQHNLCFRRPIEEDYSSGDVEEKVAAIAETDESAESEGVIDSHKRREILSRRPSYRKILNELSSDVPGVPKIEEERSEEEGTPPSIATMAVPTSIYQTSTGQYNEETELAPSHMAAATGDMPTYQIRAPTAALPQGVVMAASPGSLHSPQQLAEEATRKRELRLMKNREAAKECRRRKKEYVKCLESRVAVLEVQNKKLIEELETLKDICSPKTDY

SEQ ID NO: 66494 - protein, 88 aa, Homo sapiens
EVLAQTRLGNGWWMTPESIQEMYAAIKADPDGDGVLSLQEFSNMDLRDFHKYMRSHKAESSELVRNSHHTWLYQGEGAHHIMRAIRQR

SEQ ID NO: 66495 - protein, 847 aa, Homo sapiens; identical to SEQ ID NO: 30636

SEQ ID NO: 66496 - protein, 91 aa, Homo sapiens
MPVESLNTLLKQLEEEKKTLESQVKYYALKLEQESKAYQKINNERRTYLAEMSQGSGLHQVSKRQQVDQLPRMQENLVKTFKVTKSPKGRK

SEQ ID NO: 66497 - protein, 179 aa, Homo sapiens
METESEQNSNSTNGSSSSGGSSRPQIAQMSLYERQAVQALQALQRQPNAAQYFHQFMLQQQLSNAQLHSLAAVQQATIAASRQASSPNTSTTQQQTTTTQASINLATTSAAQLISRSQSVSSPSATTLTQSVLLGNTTSPPLNQSQAQMYLRLGNLLQVNRTLGRNVPLASQLILMPNG

SEQ ID NO: 66498 - protein, 115 aa, Homo sapiens
MAAPMLRWGCRGRRWAFARVDGGSCHRRGAPTGSTSNQIRGESSVAQQPLHTAQKTRKGEHKWAAVVGLEIHAQISSNSKLFSGSQVRFSAPPNSLVSFFDASLPGTLPSEDSPS

SEQ ID NO: 66499 - protein, 1553 aa, Homo sapiens
MSNITIDPDVKPGEYVIKSLFAEFAVQAEKKIEVVMAEPLEKLLSRSLQRGEDLQFDQLISSMSSVAEHCLPSLLRTLFDWYRRQNGTEDESYEYRPRSSTKSKGDEQQRERDYLLERRDLAVDFIFCLVLVEVLKQIPVHPVPDPLVHEVLNLAFKHFKHKEGYSGTNTGNVHIIADLYAEVIGVLAQSKFQAVRKKFVTELKELRQKEQSPHVVQSVISLIMGMKFFRVKMYPVEDFEASFQFMQECAQYFLEVKDKDIKHALAGLFVEILIPVAAAVKNEVNVPCLKNFVEMLYQTTFELSSRKKHSLALYPLITCLLCVSQKQFFLNNWHIFLQNCLSHLKNKDPKMSRVALESLYRLLWVYVIRIKCESNTVTQSRLMSIVSALFPKGSRSVVPRDTPLNIFVKIIQFIAQERLDFAMKEIIFDLLSVGKSTKTFTINPERMNIGLRVFLVIADSLQQKDGEPPMPTTGVILPSGNTLRVKKIFLNKTLTDEEAKVIGMSVYYPQVRKALDSILRHLDKEVGRPMCMTSVQMSNKEPEDMITGERKPKIDLFRTCIAAIPRLIPDGMSRTDLIELLARLTIHMDEELRALAFNTLQALMLDFPDWREDVLSGFVYFIVREVTDVHPTLLDNAVKMLVQLINQWKQAAQMHNKNQDTQHGVANGASHPPPLERSPYSNVFHVVEGFALVILCSSRPATRRLAVSVLREIRALFALLEIPKGDDELAIDVMDRLSPSILESFIHLTGADQTTLLYCPSSIDLQTLAEWNSSPISHQFDVISPSHIWIFAHVTQGQDPWIISLSSFLKQENLPKHCSTAVSYAWMFAYTRLQLLSPQVDINSPINAKKVNTTTSSDSYIGLWRNYLILCCSAATSSSSTSAGSVRCSPPETLASTPDSGYSIDSKIIGIPSPSSLFKHIVPMMRSESMEITESLVLGLGRTNPGAFRELIEELHPIIKEALERRPENMKRRRRRDILRVQLVRIFELLADAGVISHSASGGLDNETHFLNNTLLEYVDLTRQLLEAENEKDSDTLKDIRCHFSALVANIIQNVPVHQRRSIFPQQSLRHSLFMLFSHWAGPFSIMFTPLDRYSDRNMQINRHQYCALKAMSAVLCCGPVADNVGLSSDGYLYKWLDNILDSLDKKVHQLGCEAVTLLLELNPDQSNLMYWAVDRCYTGSGRVAAGCFKAIANVFQNRDYQCDTVMLLNLILFKAADSSRSIYEVAMQLLQILEPKMFRYAHKLEVQRTDGVLSQLSPLPHLYSVSYYQLSEELARAYPELTLAIFSEISQRIQTAHPAGRQVMLHYLLPWMNNIELVDLKPLPTARRHDEDEDDSLKDRELMVTSRRWLRGEGWGSPQATAMVLNNLMYMTAKYGDELAWSEVENVWTTLADGWPKNLKIILHFLISICGVNSEPSLLPYVKKVIVYLGRDKTMQLLEELVSELQLTDPVSSGVTHMDNPPYYRITSSYKIPSVTSGTTSSSNTMVAPTDGNPDNKPIKENIEESYVHLDIYSGLNSHLNRQHHRLESRYSSSSGGSYEEEKSNKFQMFLI

SEQ ID NO: 66500 - protein, 180 aa, Homo sapiens
MPSPSVSTSAASVLEGVCGRARSTYRTPEEGEEQSWSAIMAGEEINEDYPVEIHEYLSAFENSIGAVDEMLKTMMSVSRNELLQKLDPLEQAKVDLVSAYTLNSMFWVYLATQGVNPKEHPVKQELERIRVYMNRVKEITDKKKAGKLDRGAASRFVKNALWEPKSKNASKVANKGKSKS

SEQ ID NO: 66501 - protein, 145 aa, Homo sapiens
MAGSADSYTSRPSDSDVSLEEDREAIRQEREQQAAIQLERAKSKPVAFAVKTNVSYCGALDEDVPVPSTAISFDAKDFLHIKEKYNNDWWIGRLVKEGCEIGFIPSPLRLENIRIQQEQKRGRFHGGKCLMLYWMKISLRMHVNI

SEQ ID NO: 66502 - protein, 267 aa, Homo sapiens
MANVPWAEVCEKFQAALALSRVELHKNPEKEPYKSKYSARALLEEVKALLGPAPEDEDERPEAEDGPGAGDHALGLPAEVVEPEGPVAQRAVRLAVIEFHLGVNHIDTEELSAGEEHLVKCLRLLRRYRLSHDCISLCIQAQNNLGILWSEREEIETAQAYLESSEALYNQYMKEVGSPPLDPTERFLPEEEKLTEQERSKRFEKVYTHNLYYLAQVYQHLEMFEKAAHYCHSTLKRQLEHNAYHPIEWAINAATLSQFYINKMLLG

SEQ ID NO: 66503 - protein, 131 aa, Homo sapiens
FSQQIYGVVYGNVTFHVPSNVPLKEVLWKKQKDKVAELENSEFRAFSSFKNRVYLDTVSGSLTIYNLTSSDEDEYEMESPNITDTMKFFLYVLGHSRHRYALIPIPLAVITTCIVLYMNGILKCDRKPDRT

SEQ ID NO: 66504 - protein, 40 aa, Homo sapiens
  MOD_RES (1)..(1): Any amino acid
XLLPECFYSFFDLRKEFKKCCPGSPDIDKLDVATMTECIL

SEQ ID NO: 66505 - protein, 1205 aa, Homo sapiens
MAAQSSLYNDDRNLLRIREKERRNQEAHQEKEAFPEKIPLFGEPYKTAKGDELSSRIQNMLGNYEEVKEFLSTKSHTHRLDASENRLGKPKYPLIPDKGSSIPSSSFHTSVHHQSIHTPASGPLSVGNISHNPKMAQPRTEPMPSLHAKSCGPPDSQHLTQDRLGQEGFGSSHHKKGDRRADGDHCASVTDSAPERELSPLISLPSPVPPLSPIHSNQQTLPRTQGSSKVHGSSNNSKGYCPAKSPKDLAVKVHDKETPQDSLVAPAQPPSQTFPPPSLPSKSVAMQQKPTAYVRPMDGQDQAPSESPELKPLPEDYRQQTFEKTDLKVPAKAKLTKLKMPSQSVEQTYSNEVHCVEEILKEMTHSWPPPLTAIHTPSTAEPSKFPFPTKDSQHVSSVTQNQKQYDTSSKTHSNSQQGTSSMLEDDLQLSDSEDSDSEQTPEKPPSSSAPPSAPQSLPEPVASAHSSSAESESTSDSDSSSDSESESSSSDSEENEPLETPAPEPEPPTTNKWQLDNWLTKVSQPAAPPEGPRSTEPPRRHPESKGSSDSATSQEHSESKDPPPKSSSKAPRAPPEAPHPGKRSCQKSPAQQEPPQRQTVGTKQPKKPVKASARAGSRTSLQGEREPGLLPYGSRDQTSKDKPKVKTKGRPRAAASNEPKPAVPPSSEKKKHKSSLPAPSKALSGPEPAKDNVEDRTPEHFALVPLTESQGPPHSGSGSRTSGCRQAVVVQEDSRKDRLPLPLRDTKLLSPLRDTPPPQSLMVKITLDLLSRIPQPPGKGSRQRKAEDKQPPAGKKHSSEKRSSDSSSKLAKKRKGEAERDCDNKKIRLEKEIKSQSSSSSSSHKESSKTKPSRPSSQSSKKEMLPPPPVSSSSQKPAKPALKRSRREADTCGQDPPKVPAVPRATTDSSIPKQRRVEGKGSRSSSEHKGSSGDTANPFPVPSLPNGNSKPGKPQVKFDKQQADLHMREAKKMKQKAELMTDRVGKAFKYLEAVLSFIECGIATESESQSSKSAYSVYSETVDLIKFIMSLKSFSDATAPTQEKIFAVLCMRCQSILNMAMFRCKKDIAIKYSRTLNKHFESSSKVAQAPSPCIARSTGTPSPLSPMPSPASSVGSQSSAGSVGSSGVAATISTPVTIQNMTSSYVTITSHVLTAFDLWEQAEALTRKNKEFFARLSQMCAPWPSTAVWWTWCTIHDRVFSSYKN

SEQ ID NO: 66506 - protein, 230 aa, Homo sapiens
  MOD_RES (1)..(1): Any amino acid
XYFVLGSLIYSDAKSKKNRNCVFITDTDPRVLEKQELQQPTYVALSYINRFMTDAARREQESLKKKIQPKLSLTLSSSVSRGNVSTPPRHSSGSLTPPVTPPITPSSSFRSSTPTGSEYDEEEVDYEESDSDESWTTESAISSEAILSSMCMNGGEEKPFACPVPGCKKRYKNVNGIKYHAKNGHRTQIRVRKPFKCRCGKSYKTAQGLRHHTINFHPPVSAEIIRKMQQ

SEQ ID NO: 66507 - protein, 842 aa, Homo sapiens
MNSNLPAENLTIAVNMTKTLPTAVTHGFNSTNDPPSMSITRLFPALLECFGIVLCGYIAGRANVITSTQAKGLGNFVSRFALPALLFKNMVVLNFSNVDWSFLYSILIAKASVFFIVCVLTLLVASPDSRFSKAGLFPIFATQSNDFALGYPIVEALYQTTYPEYLQYIYLVAPISLMMLNPIGFIFCEIQKWKDTQNASQNKIKIVGLGLLRVLQNPIVFMVFIGIAFNFILDRKVPVYVENFLDGLGNSFSGSALFYLGLTMVGKIKRLKKSAFVVLILLITAKLLVLPLLCREMVELLDKGDSVVNHTSLSNYAFLYGVFPVAPGVAIFATQFNMEVEIITSGMVISTFVSAPIMYVSAWLLTFPTMDPKPLAYAIQNVSFDISIVSLISLSIVCAGMMIWNFVKEKNFVGQILVFVLLYSSLYSTYLWTGLLAISLFLLKKRERVQIPVGIIIISGWGIPALLVGVLLITGKHNGDSIDSAFFYGKEQMITTAVTLFCSILIAGISLMCMNQTAQAGSYEGFDQSQSHKVVEPGNTAFEESPAPVNEPELFTSSIPETSCCSCSMGNGELHCPSIEPIANTSTSEPVIPSFEKNNHCVSRCNSQSCILAQEEEQYLQSGDQQLTRHVLLCLLLIIGLFANLSSCLWWLFNQEPGRLYVELQFFCAVFNFGQGFISFGIFGLDKHLIILPFKRRLEFLWNNKDTAENRDSPVSEEIKMTCQQFIHYHRDLCIRNIVKERRCGAKTSAGTFCGCDLVSWLIEVGLASDRGEAVIYGDRLVQGGVIQHITNEYEFRDEYLFYRFLQKSPEQSPPAINANTLQQERYKEIEHSSPPSHSPKT

SEQ ID NO: 66508 - protein, 94 aa, Homo sapiens
MARGSLRRLLRLLVLGLWLALLRSVAGEQAPASDPRPPPQAPPPAPAAAPGARTWTSAWTARLAGRDRTATSAWAALQHLLPPSGCFGPSLGAL

SEQ ID NO: 66509 - protein, 334 aa, Homo sapiens
MDPRGILKAFPKRQKIHADASSKPSCASALRCLCPESDIGADSACPGPAEWLSSLRAHVVRTGIGRARAELFEKQIVQHGGQLCPAQGPGVTHIVVDEGMDYERALRLLRLPQLPPGAQLVKSAWLSLCLQERRLVDVAGFSIFIPSRYLDHPQPSKAEQDASIPPGTHEALLQTALSPPPPPTRPVSPPQKAKEAPNTQAQPISDDEASDGEETQVSAADLEALISGHYPTSLEGDCEPSPAPAVLDKWVCAQPSSQKATNHNLHITEKLEVLAKAYSVQGDKWRALGYAKAINALKSFHKPVTSYQEACSIPGIGKRMAEKIIEILESGHLR

SEQ ID NO: 66510 - protein, 189 aa, Homo sapiens
  MOD_RES (1)..(1): Any amino acid
XKKMGGHLRLLNIACAAKAKRRLMTLTKPSREAPLPFILLGGSEKGFGIFVDSVDSGSKATEAGLKRGDQILEVNGQNFENIQLSKAMEILRNNTHLSITVKTNLFVFKELLTRLSEEKRNGAPHLPKIGDIKKASRYSIPDLAVDVEQVIGLEKVNKKSKANTVGGRNKLKKILDKTRISILPQKPYK

SEQ ID NO: 66511 - protein, 89 aa, Homo sapiens
  MOD_RES (1)..(1): Any amino acid
XCDPLVLEALGHLRSALIPSRFQLEQLQARAGAVLMGMEGPFFRDYALNVFVGKVETNQLDLVASFVKNQTQHLMGNSLKAAGHGGSCL

SEQ ID NO: 66512 - protein, 527 aa, Homo sapiens
MGSLKEELLKAIWHAFTALDQDHSGKVSKSQLKVLSHNLCTVLKVPHDPVALEEHFRDDDEGPVSNQGYMPYLNRFILEKIEYLLKKLTEAMGGGWQQEQFEHYKINFDDSKNGLSAWELIELIGNGQFSKGMDRQTVSMAINEVFNELILDVLKQGYMMKKGHRRKNWTERWFVLKPNIISYYVSEDLKDKKGDILLDENCCVESLPDKDGKKCLFLVKCFDKTFEISASDKKKKQEWIQAIHSTIHLLKLGSPPPHKEARQRRKELRKKQLAEQEELERQMKELQAANESKQQELEAVRKKLEEAASRAAEEEKKRLQTQVELQARFSTELEREKLIRQQMEEQVAQKSSELEQYLQRVRELEDMYLKLQEALEDERQARQDEETVRKLQARLLEEESSKRAELEKWHLEQQQAIQTTEAEKQELENQRVLKEQALQEAMEQLEQLELERKQALEQYEEVKKKLEMATNKTKSWKDKVAHHEGLIRLIEPGSKNPHLITNWGPAAFTEAELEEREKNWKEKKTTE

SEQ ID NO: 66513 - protein, 75 aa, Homo sapiens
MVQIVISSARAGGLAEWVLMELQGEIEARYSTGLAGNLLGDLHYTTELHQAHWLQIQHLSRLVLVTQVWLLFQEG

SEQ ID NO: 66514 - protein, 1028 aa, Homo sapiens
MADKTPGGSQKASSKTRSSDVHSSGSSDAHMDASGPSDSDMPSRTRPKSPRKHNYRNESARESLCDSPHQNLSRPLLENKLKAFSIGKMSTAKRTLSKKEQEELKKKEDEKAAAEIYEEFLAAFEGSDGNKVKTFVRGGVVNAAKEEHETDEKRGKIYKPSSRFADQKNPPNQSSNERPPSLLVIETKKPPLKKGEKEKKKSNLELFKEELKQIQEERDERHKTKGRLSRFEPPQSDSDGQRRSMDAPSRRNRSSVLDDYAPGSHDVGDPSTTNLYLGNINPQMNEEMLCQEFGRFGPLASVKIMWPRTDEERARERNCGFVAFMNRRDAERALKNLNGKMIMSFEMKLGWGKAVPIPPHPIYIPPSMMEHTLPPPPSGLPFNAQPRERLKNPNAPMLPPPKNKEDFEKTLSQAIVKVVIPTERNLLALIHRMIEFVVREGPMFEAMIMNREINNPMFRFLFENQTPAHVYYRWKLYSILQANSPTKWRTEDFRMFKNGSFWRPPPLNPYLHGMSEEQETEAFVEEPSKKGALKEEQRDKLEEILRGLTPRKNDIGDAMVFCLNNAEAAEEIVDCITESLSILKTPLPKKIARLYLVSDVLYNSSAKVANASYYRKFFETKLCQIFSDLNATYRTIQGHLQSENFKQRVMTCFRAWEDWAIYPEPFLIKLQNIFLGLVNIIEEKETEDVPDDLDGAPIEEELDGAPLEDVDGIPIDATPIDDLDGVPIKSLDDDLDGVPLDATEDSKKNEPIFKVAPSKWEAVDESELEAQAVTTSKWELFDQHEESEEEENQNQEEESEDEEDTQSSKSEEHHLYSNPIKEEMTESKFSKYSEMSEEKRAKLREIELKVMKFQDELESGKRPKKPGQSFQEQVEHYRDKLLQREKEKELERERERDKKDKEKLESRSKDKKEKDECTPTRKERKRRHSTSPSPSRSSSGRRVKSPSPKSERSERSERSHKESSRSRSSHKDSPRDVSKKAKRSPSGSRTPKRSRRSRSRSPKKSGKKSRSQSRSPHRSHKKSKKNKH

SEQ ID NO: 66515 - protein, 101 aa, Homo sapiens
MADHNPDSDSTPRTLLRRVLDTADPRTPRRPRSARAGARRALLETASPRKLSGQTRTIARGRSHGARTDRLVAWCFADSLLADRPIFRPVGTWRNRHLGRC

SEQ ID NO: 66516 - protein, 421 aa, Homo sapiens
MATITCTRFTEEYQLFEELGKGAFSVVRRCVKVLAGQEYAAKIINTKKLSARDHQKLEREARICRLLKHPNIVRLHDSISEEGHHYLIFDLVTGGELFEDIVAREYYSEADASHCIQQILEAVLHCHQMGVVHRDLKPENLLLASKLKGAAVKLADFGLAIEVEGEQQAWFGFAGTPGYLSPEVLRKDPYGKPVDLWACGVILYILLVGYPPFWDEDQHRLYQQIKAGAYDFPSPEWDTVTPEAKDLINKMLTINPSKRITAAEALKHPWISHRSTVASCMHRQETVDCLKKFNARRKLKGAILTTMLATRNFSGGKSGGNKKSDGVKESSESTNTTIEDEDTKVWSRNSKPVHTTILNPHIHLMGDESACIAYIRITQYLDAGGIPRTAQSEETRVWHRRDGKWQIVHFHRSGAPSVLPH

SEQ ID NO: 66517 - protein, 40 aa, Homo sapiens
MSSPTTSSLDTPLPGNGPPQPGAPSSSPTVKEEGPEPWPG

SEQ ID NO: 66518 - protein, 1256 aa, Homo sapiens
MKSCGVSLATAAAAAAAFGDEEKKMAAGKASGESEEASPSLTAEEREALGGLDSRLFGFVRFHEDGARTKALLGKAVRCYESLILKAEGKVESDFFCQLGHFNLLLEDYPKALSAYQRYYSLQSDYWKNAAFLYGLGLVYFHYNAFQWAIKAFQEVLYVDPSFCRAKEIHLRLGLMFKVNTDYESSLKHFQLALVDCNPCTLSNAEIQFHIAHLYETQRKYHSAKEAYEQLLQTENLSAQVKATVLQQLGWMHHTVDLLGDKATKESYAIQYLQKSLEADPNSGQSWYFLGRCYSSIGKVQDAFISYRQSIDKSEASADTWCSIGVLYQQQNQPMDALQAYICAVQLDHGHAAAWMDLGTLYESCNQPQDAIKCYLNATRSKSCSNTSALAARIKYLQACKPHHPNTEPVLGLSQTPISQQSLPLHMIPSSQVDDLSSPAKRKRTSSPTKNTSDNWSGGHAVSHPPVQQQAHSWCLTPQKLQHLEQLRANRNNLNPAQKLMLEQLESQFVLMQQHQMRPTGVAQVRSTGIPNGPTADSSLPTNSVSGQQPQLALTRVPSVSQPGVRPACPGQPLANGPFSAGHVPCSTSRTLGSTDTILIGNNHITGSGSNGNVPYLQRNALTLPHNRTNLTSSAEEPWKNQLSNSTQGLHKGQSSHSAGPNGERPLSSTGPSQHLQAAGSGIQNQNGHPTLPSNSVTQGAALNHLSSHTATSGGQQGITLTKESKPSGNILTVPETSRHTGETPNSTASVEGLPNHVHQMTADAVCSPSHGDSKSPGLLSSDNPQLSALLMGKANNNVGTGTCDKVNNIHPAVHTKTDNSVASSPSSAISTATPSPKSTEQTTTNSVTSLNSPHSGLHTINGEGMEESQSPMKTDLLLVNHKPSPQIIPSMSVSIYPSSAEVLKACRNLGKNGLSNSSILLDKCPPPRPPSSPYPPLPKDKLNPPTPSIYLENKRDAFFPPLHQFCTNPNNPVTVIRGLAGALKLDLGLFSTKTLVEANNEHMVEVRTQLLQPADENWDPTGTKKIWHCESNRSHTTIAKYAQYQASSFQESLREENEKRSHHKDHSDSESTSSDNSGRRRKGPFKTIKFGTNIDLSDDKKWKLQLHELTKLPAFVRVVSAGNLLSHVGHTILGMNTVQLYMKVPGSRTPGHQENNNFCSVNINIGPGDCEWFVVPEGYWGVLNDFCEKNNLNFLMGSWWPNLEDLYEANVPVYRFIQRPGDLVWINAGTVHWVQAIGWCNNIAWNVGPLTGIVF

SEQ ID NO: 66519 - protein, 141 aa, Homo sapiens
MDLRVGQRPPVEPPPEPTLLALQRPQRLHHHLFLAGLQQQRSVEPMRLSMDTPMPELQVGPQEQELRQLLHKDKSKRSAVASSVVKQKLAEVILKKQQAALERTVHPNSPGIPYSLPSDPPEHFPLRKTVSEPNLKLRYKP

SEQ ID NO: 66520 - protein, 40 aa, Homo sapiens
HAALDSPRIRRTVHGEWTTTFYRKHSVSKGIWEELQSLYL

SEQ ID NO: 66521 - protein, 220 aa, Homo sapiens
MASKQTKKKEVHRINSAHGSDKSKDFYPFGSNVQSGSTEQKKGKFPLWPEWSEADINSEKWDAGKGAKEKDKTGKSPVFHFFEDPEGKIELPPSLKIYSWKRPQDILFSQTPVVVKNEITFDLFSANEHLLCSELMRWIISEIYAVWKIFNGGILSNYFKGTSGEPPLLPWKPWEHIYSLCKAVKGHMPLFNSYGKYVVKLYWMPGIYGQSLGAPERNIA

SEQ ID NO: 66522 - protein, 772 aa, Homo sapiens
MEGEQGLTDEKVKAYLSLHPQVLDEFVSESVSAETVEKWLKRKNNKSEDESAPKEVSRYQDTNMQGVVYELNSYIEQRLDTGGDNQLLLYELSSIIKIATKADGFALYFLGECNNSLCIFTPPGIKEGKPRLIPAGPITQGTTVSAYVAKSRKTLLVEDILGDERFPRGTGLESGTRIQSVLCLPIVTAIGDLIGILELYRHWGKEAFCLSHQEVATANLAWASVAIHQVQVCRGLAKQTELNDFLLDVSKTYFDNIVAIDSLLEHIMIYAKNLVNADRCALFQVDHKNKELYSDLFDIGEEKEGKPVFKKTKEIRFSIEKGIAGQVARTGEVLNIPDAYADPRFNREVDLYTGYTTRNILCMPIVSRGSVIGVVQMVNKISGSAFSKTDENNFKMFAVFCALALHCANMYHRIRHSECIYRVTMEKLSYHSICTSEEWQGLMQFTLPVRLCKEIELFHFDIGPFENMWPGIFVYMVHRSCGTSCFELEKLCRFIMSVKKNYRRVPYHNWKHAVTVAHCMYAILQNNHTLFTDLERKGLLIACLCHDLDHRGFSNSYLQKFDHPLAALYSTSTMEQHHFSQTVSILQLEGHNIFSTLSSSEYEQVLEIIRKAIIATDLALYFGNRKQLEEMYQTGSLNLNNQSHRDRVIGLMMTACDLCSVTKLWPVTKLTANDIYAEFWAEGDEMKKLGIQPIPMMDRDKKDEVPQGQLGFYNAVAIPCYTTLTQILPPTEPLLKACRDNLSQWEKVIRGEETATWISSPSVAQKAAASED

SEQ ID NO: 66523 - protein, 48 aa, Homo sapiens
MALVIQVGKLRPREVRTPQTINPSLFPSLPVKLSSIIEVPSALALLDE

SEQ ID NO: 66524 - protein, 121 aa, Homo sapiens
MATRVRTASIWGPLSFMDVFVDFTWEEWQLLDPAQKCLYRSVMLENYSNLVSLGYQHTKPDIIFKLEQGEELCMVQAQVPNQTCPILKAGKSKAKVLAGLVSGEGLLCASKMTPCCCILWR

SEQ ID NO: 66525 - protein, 515 aa, Homo sapiens
MDSLEEPQKKVFKARKTMRVSDRQQLEAVYKVKEELLKTDVKLLNGNHENGDLDPTSPLENMDYIKDKEEVNGIEEICFDPEGSKAEWKETPCILSVNVKNKQDDDLNCEPLSPHNITPEPVSKLPAEPVSGDPAPGDLDAGDPASGVLASGDSTSGDPTSSEPSSSDAASGDATSGDAPSGDVSPGDATSGDATADDLSSGDPTSSDPIPGEPVPVEPISGDCAADDIASSEITSVDLASGAPASTDPASDDLASGDLSSSELASDDLATGELASDELTSESTFDRTFEPKSVPVCEPVPEIDNIEPSSNKDDDFLEKNGADEKLEQIQSKDSLDEKNKADNNIDANEETLETDDTTICSDRPPENEKKVEEDIITELALGEDAISSSMEIDQGEKNEDETSADLVETINENVIEDNKSENILENTDSMETDEIIPILEKLAPSEDELTCFSKTSLLPIDETNPDLEEKMESSFGSPSKQESSESLPKEAFLVLSDEEDISGEKDESEVISQNE

SEQ ID NO: 66526 - protein, 384 aa, Homo sapiens
MGSKCSNSGIECDSSGTCINPSNWCDGVSHCPGGEDENRCVRLYGPNFILQVYSSQRKSWHPVCQDDWNENYGRAACRDMGYKNNFYSSQGIVDDSGSTSFMKLNTSAGNVDIYKKLYHSDACSSKAVVSLRCIACGVNLNSSRQSRIVGGESALPGAWPWQVSLHVQNVHVCGGSIITPEWIVTAAHCVEKPLNNPWHWTAFAGILRQSFMFYGAGYQVEKVISHPNYDSKTKNNDIALMKLQKPLTFNDLVKPVCLPNPGMMLQPEQLCWISGWGATEEKGKTSEVLNAAKVLLIETQRCNSRYVYDNLITPAMICAGFLQGNVDSCQGDSGGPLVTSKNNIWWLIGDTSWGSGCAKAYRPGVYGNVMVFTDWIYRQMRADG

SEQ ID NO: 66527 - protein, 201 aa, Homo sapiens
MDGTETRQRRLDSCGKPGELGLPHPLSTGGLPVASEDGALRAPESQSVTPKPLETEPSRETTWSIGLQVTVPFMFAGLGLSWAGMLLDYFQHWPVFVEVKDLLTLVPPLVGLKGNLEMTLASRLSTAANTGQIDDPQEQHRVISSNLALIQVQATVVGLLAAVAALLLGVVSREEVDVAKVELLCASSVLTAFLAAFALGE

SEQ ID NO: 66528 - protein, 96 aa, Homo sapiens
MERIEGASVGRCAASPYLRPLTLHYRQNGAQKSWDFMKTHDSHPASAASTLTYSAARVSFPAPRLPSCQLEYSRSGSWPDCDPGKLWSRLGLSHPI

SEQ ID NO: 66529 - protein, 636 aa, Homo sapiens
MREAAAALVPPPAFAVTPAAAMEEPPPPPPPPPPPPEPETESEPECCLAARQEGTLGDSACKSPESDLEDFSDETNTENLYGTSPPSTPRQMKRMSTKHQRNNVGRPASRSNLKEKMNAPNQPPHKDTGKTVENVEEYSYKQEKKIRAALRTTERDRKKNVQCSFMLDSVGGSLPKKSIPDVDLNKPYLSLGCSNAKLPVSVPMPIARPARQTSRTDCPADRLKFFETLRLLLKLTSVSKKKDREQRGQENTSGFWLNRSNELIWLELQAWHAGRTINDQDFFLYTARQAIPDIINEILTFKVDYGSFAFVRDRAGFNGTSVEGQCKATPGTKIVGYSTHHEHLQRQRVSFEQVKRIMELLEYIEALYPSLQALQKDYEKYAAKDFQDRVQALCLWLNITKDLNQKLRIMGTVLGIKNLSDIGWPVFEIPSPRPSKGNEPEYEGDDTEGELKELESSTDESEEEQISDPRVPEIRQPIDNSFDIQSRDCISKKLERLESEDDSLGWGAPDWSTEAGFSRHCLTSIYRPFVDKALKQMGLRKLILRLHKLMDGSLQRARIALVKNDRPVEGDMRHQSIYVRCTLVPSRKTGQLEAGMGLAGHSFLNFQIPCGVQIMCSCQGHHLHLRRNAVLCRGRS

SEQ ID NO: 66530 - protein, 86 aa, Homo sapiens
MARELRALLLWGRRLRPLLRAPALAAVPGGKPILCPRRTTAQLGPRRNPAWSLQAGRLFSTQTAEDKEEPLHSIISSTESVQGRVL

SEQ ID NO: 66531 - protein, 61 aa, Homo sapiens
  MOD_RES (1)..(1): Any amino acid
XGYMTSRTVREASGLLSLTSTLYLRLRKDDRDASFHCAAHYSLPEGRHGRLDSPTFHLTLH

SEQ ID NO: 66532 - protein, 40 aa, Homo sapiens
MSSKGSSTDGRTDLANGSLSSSPEEMSGAEEGRETSSGIE

SEQ ID NO: 66533 - protein, 82 aa, Homo sapiens
MGPLTIRDVTVEFSLEEWHCLDTAQQNLYRDVMLENYRNLVFLGIAVSKPDLITCLEQGKEPCNMKRHEMVAKPPAFYLMGE

SEQ ID NO: 66534 - protein, 91 aa, Homo sapiens
  MOD_RES (1)..(1): Any amino acid
XAADGQCSLPASWRPVTLTHVEYPAGDLSGHLLAYLSLSPVFVIVGFVTLIIFKRELHTAPTQQWAPSTGCPPAIPSLCGSSPSIPSFSCI

SEQ ID NO: 66535 - protein, 113 aa, Homo sapiens
MISTRYRRRRDAPRGPGRCPPHPTRPRGPGRKRGAAGSPGAAPSASRRPEFPKPLRVLPWRERGRGGREWPMSLRSPLPTSACGWGESGRRAGPGSLRSSDRTERARCSLRPR

SEQ ID NO: 66536 - protein, 52 aa, Homo sapiens
MAEISRIQYEMEYTEGISQRMRVPEKLKVAPPNADLEQGFQEGVPNASVIMQ

SEQ ID NO: 66537 - protein, 522 aa, Homo sapiens
GTDSIKMENGQSTAAKLGLPPLTPEQQEALQKAKKYAMEQSIKSVLVKQTIAHQQQQLTNLQMAAVTMGFGDPLSPLQSMAAQRQRALAIMCRVYVGSIYYELGEDTIRQAFAPFGPIKSIDMSWDSVTMKHKGFAFVEYEVPEAAQLALEQMNSVMLGGRNIKVGRPSNIGQAQPIIDQLAEEARAFNRIYVASVHQDLSDDDIKSVFEAFGKIKSCTLARDPTTGKHKGYGFIEYEKAQSSQDAVSSMNLFDLGGQYLRVGKAVTPPMPLLTPATPGGLPPAAAVAAAAATAKITAQEAVAGAAVLGTLGTPGLVSPALTLAQPLGTLPQAVMAAQAPGVITGVTPARPPIPVTIPSVGVVNPILASPPTLGLLEPKKEKEEEELFPESERPEMLSEQEHMSISGSSARHMVMQKLLRKQESTVMVLRNMVDPKDIDDDLEGEVTEECGKFGAVNRVIIYQEKQGEEEDAEIIVKIFVEFSIASETHKAIQALNGRWFAGRKVVAEVYDQERFDNSDLSA

SEQ ID NO: 66538 - protein, 56 aa, Homo sapiens
MAFMEKPPAGKVLLDDTVPLTAAIEASQSLQSHTRLPCNRFPCSSDQNQSGRWWNL

SEQ ID NO: 66539 - protein, 27118 aa, Homo sapiens
MTTQAPTFTQPLQSVVVLEGSTATFEAHISGFPVPEVSWFRDGQVISTSTLPGVQISFSDGRAKLTIPAVTKANSGRYSLKATNGSGQATSTAELLVKAETAPPNFVQRLQSMTVRQGSQVRLQVRVTGIPTPVVKFYRDGAEIQSSLDFQISQEGDLYSLLIAEAYPEDSGTYSVNATNSVGRATSTAELLVQGEEEVPAKKTKTIVSTAQISESRQTRIEKKIEAHFDARSIATVEMVIDGAAGQQLPHKTPPRIPPKPKSRSPTPPSIAAKAQLARQQSPSPIRHSPSPVRHVRAPTPSPVRSVSPAARISTSPIRSVRSPLLMRKTQASTVATGPEVPPPWKQEGYVASSSEAEMRETTLTTSTQIRTEERWEGRYGVQEQVTISGAAGAAASVSASASYAAEAVATGAKEVKQDADKSAAVATVVAAVDMARVREPVISAVEQTAQRTTTTAVHIQPAQEQVRKEAEKTAVTKVVVAADKAKEQELKSRTKEVITTKQEQMHVTHEQIRKETEKTFVPKVVISAAKAKEQETRISEEITKKQKQVTQEAIMKETRKTVVPKVIVATPKVKEQDLVSRGREGITTKREQVQITQEKMRKEAEKTALSTIAVATAKAKEQETILRTRETMATRQEQIQVTHGKVDVGKKAEAVATVVAAVDQARVREPREPGHLEESYAQQTTLEYGYKERISAAKVAEPPQRPASEPHVVPKAVKPRVIQAPSETHIKTTDQKGMHISSQIKKTTDLTTERLVHVDKRPRTASPHFTVSKISVPKTEHGYEASIAGSAIATLQKELSATSSAQKITKSVKAPTVKPSETRVRAEPTPLPQFPFADTPDTYKSEAGVEVKKEVGVSITGTTVREERFEVLHGREAKVTETARVPAPVEIPVTPPTLVSGLKNVTVIEGESVTLECHISGYPSPTVTWYREDYQIESSIDFQITFQSGIARLMIREAFAEDSGRFTCSAVNEAGTVSTSCYLAVQVSEEFEKETTAVTEKFTTEEKRFVESRDVVMTDTSLTEEQAGPGEPAAPYFITKPVVQKLVEGGSVVFGCQVGGNPKPHVYWKKSGVPLTTGYRYKVSYNKQTGECKLVISMTFADDAGEYTIVVRNKHGETSASASLLEEADYELLMKSQQEMLYQTQVTAFVQEPKVGETAPGFVYSEYEKEYEKEQALIRKKMAKDTVVVRTYVEDQEFHISSFEERLIKEIEYRIIKTTLEELLEEDGEEKMAVDISESEAVESGFDSRIKNYRILEGMGVTFHCKMSGYPLPKIAWYKDGKRIKHGERYQMDFLQDGRASLRIPVVLPEDEGIYTAFASNIKGNAICSGKLYVEPAAPLGAPTYIPTLEPVSRIRSLSPRSVSRSPIRMSPARMSPARMSPARMSPARMSPGRRLEETDESQLERLYKPVFVLKPVSFKCLEGQTARFDLKVVGRPMPETFWFHDGQQIVNDYTHKVVIKEDGTQSLIIVPATPSDSGEWTVVAQNRAGRSSISVILTVEAVEHQVKPMFVEKLKNVNIKEGSRLEMKVRATGNPNPDIVWLKNSDIIVPHKYPKIRIEGTKGEAALKIDSTVSQDSAWYTATAINKAGRDTTRCKVNVEVEFAEPEPERKLIIPRGTYRAKEIAAPELEPLHLRYGQEQWEEGDLYDKEKQQKPFFKKKLTSLRLKRFGPAHFECRLTPIGDPTMVVEWLHDGKPLEAANRLRMINEFGYCSLDYGVAYSRDSGIITCRATNKYGTDHTSATLIVKDEKSLVEESQLPEGRKGLQRIEELERMAHEGALTGVTTDQKEKQKPDIVLYPEPVRVLEGETARFRCRVTGYPQPKVNWYLNGQLIRKSKRFRVRYDGIHYLDIVDCKSYDTGEVKVTAENPEGVIEHKVKLEIQQREDFRSVLRRAPEPRPEFHVHEPGKLQFEVQKVDRPVDTTETKEVVKLKRAERITHEKVPEESEELRSKFKRRTEEGYYEAITAVELKSRKKDESYEELLRKTKDELLHWTKELTEEEKKALAEEGKITIPTFKPDKIELSPSMEAPKIFERIQSQTVGQGSDAHFRVRVVGKPDPECEWYKNGVKIERSDRIYWYWPEDNVCELVIRDVTAEDSASIMVKAINIAGETSSHAFLLVQAKQLITFTQELQDVVAKEKDTMATFECETSEPFVKVKWYKDGMEVHEGDKYRMHSDRKVHFLSILTIDTSDAEDYSCVLVEDENVKTTAKLIVEGAVVEFVKELQDIEVPESYSGELECIVSPENIEGKWYHNDVELKSNGKYTITSRRGRQNLTVKDVTKEDQGEYSFVIDGKKTTCKLKMKPRPIAILQGLSDQKVCEGDIVQLEVKVSLESVEGVWMKDGQEVQPSDRVHIVIDKQSHMLLIEDMTKEDAGNYSFTIPALGLSTSGRVSVYSVDVITPLKDVNVIEGTKAVLECKVSVPDVTSVKWYLNDEQIKPDDRVQAIVKGTKQRLVINRTHASDEGPYKLIVGRVETNCNLSVEKIKIIRGLRDLTCTETQNVVFEVELSHSGIDVLWNFKDKEIKPSSKYKIEAHGKIYKLTVLNMMKDDEGKYTFYAGENMTSGKLTVAGGAISKPLTDQTVAESQEAVFECEVANPDSKGEWLRDGKHLPLTNNIRSESDGHKRRLIIAATKLDDIGEYTYKVATSKTSAKLKVEAVKIKKTLKNLTVTETQDAVFTVELTHPNVKGVQWIKNGVVLESNEKYAISVKGTIYSLRIKNCAIVDESVYGFRLGRLGASARLHVETVKIIKKPKDVTALENATVAFEVSVSHDTVPVKWFHKSVEIKPSDKHRLVSERKVHKLMLQNISPSDAGEYTAVVGQLECKAKLFVETLHITKTMKNIEVPETKTASFECEVSHFNVPSMWLKNGVEIEMSEKFKIVVQGKLHQLIIMNTSTEDSAEYTFVCGNDQVSATLTVTPIMITSMLKDINAEEKDTITFEVTVNYEGISYKWLKNGVEIKSTDKCQMRTKKLTHSLNIRNVHFGDAADYTFVAGKATSTATLYVEARHIEFRKHIKDIKVLEKKRAMFECEVSEPDITVQWMKDDQELQITDRIKIQKEKYVHRLLIPSTRMSDAGKYTVVAGGNVSTAKLFVEGRDVRIRSIKKEVQVIEKQRAVVEFEVNEDDVDAHWYKDGIEINFQVQERHKYVVERRIHRMFISETRQSDAGEYTFVAGRNRSSVTLYVNAPEPPQVLQELQPVTVQSGKPARFCAVISGRPQPKISWYKEEQLLSTGFKCKFLHDGQEYTLLLIEAFPEDAAVYTCEAKNDYGVATTSASLSVEVPEVVSPDQEMPVYPPAIITPLQDTVTSEGQPARFQCRVSGTDLKVSWYSKDKKIKPSRFFRMTQFEDTYQLEIAEAYPEDEGTYTFVASNAVGQVSSTANLSLEVQALDRQSSGKDVRESTKSQAVADSSFTKEESKISQKEIKSFQGSSYEYEVQVFESVSQSSIHTAASVQDTQLCHTASLSQIAESTELSKECAKESTGEAPKIFLHLQDVTVKCGDTAQFLCVLKDDSFIDVTWTHEGAKIEESERLKQSQNGNIQFLTICNVQLVDQGLYSCIVHNDCGERTTSAVLSVEGAPESILHERIEQEIEMEMKEFSSSFLSAEEEGLHSAELQLSKINETLELLSESPVYPTKFDSEKEGTGPIFIKEVSNADISMGDVATLSVTVIGIPKPKIQWFFNGVLLTPSADYKFVFDGDDHSLIILFTKLEDEGEYTCMASNDYGKTICSAYLKINSKGEGHKDTETESAVAKSLEKLGGPCPPHFLKELKPIRCAQGLPAIFEYTVVGEPAPTVTWFKENKQLCTSVYYTIIHNPNGSGTFIVNDPQREDSGLYICKAENMLGESTCAAELLVLLEDTDMTDTPCKAKSTPEAPEDFPQTPLKGPAVEALDSEQEIATFVKDTILKAALITEENQQLSYEHIAKANELSSQLPLGAQELQSILEQDKLTPESTREFLCINGSIHFQPLKEPSPNLQLQIVQSQKTFSKEGILMPEEPETQAVLSDTEKIFPSAMSIEQINSLTVEPLKTLLAEPEGNYPQSSIEPPMHSYLTSVAEEVLSPKEKTVSDTNREQRVTLQKQEAQSALILSQSLAEGHVESLQSPDVMISQVNYEPLVPSEHSCTEGGKILIESANPLENAGQDSAVRIEEGKSLRFPLALEEKQVLLKEEHSDNVVMPPDQIIESKREPVAIKKVQEVQGRDLLSKESLLSGIPEEQRLNLKIQICRALQAAVASEQPGLFSEWLRNIEKVEVEAVNITQEPRHIMCMYLVTSAKSVTEEVTIIIEDVDPQMANLKMELRDALCAIIYEEIDILTAEGPRIQQGAKTSLQEEMDSFSGSQKVEPITEPEVESKYLISTEEVSYFNVQSRVKYLDATPVTKGVASAVVSDEKQDESLKPSEEKEESSSESGTEEVATVKIQEAEGGLIKEDGPMIHTPLVDTVSEEGDIVHLTTSITNAKEVNWYFENKLVPSDEKFKCLQDQNTYTLVIDKVNTEDHQGEYVCEALNDSGKTATSAKLTVVKRAAPVIKRKIEPLEVALGHLAKFTCEIQSAPNVRFQWFKAGREIYESDKCSIRSSKYISSLEILRTQVVDCGEYTCKASNEYGSVSCTATLTVTVPGGEKKVRKLLPERKPEPKEEVVLKSVLRKRPEEEEPKVEPKKLEKVKKPAVPEPPPPKPVEEVEVPTVTKRERKIPEPTKVPEIKPAIPLPAPEPKPKPEAEVKTIKPPPVEPEPTPIAAPVTVPVVGKKAEAKAPKEEAAKPKGPIKGVPKKTPSPIEAERRKLRPGSGGEKPPDEAPFTYQLKAVPLKFVKEIKDIILTESEFVGSSAIFECLVSPSTAITTWMKDGSNIRESPKHRFIADGKDRKLHIIDVQLSDAGEYTCVLRLGNKEKTSTAKLVVEELPVRFVKTLEEEVTVVKGQPLYLSCELNKERDVVWRKDGKIVVEKPGRIVPGVIGLMRALTINDADDTDAGTYTVTVENANNLECSSCVKVVEVIRDWLVKPIRDQHVKPKGTAIFACDIAKDTPNIKWFKGYDEIPAEPNDKTEILRDGNHLYLKIKNAMPEDIAEYAVEIEGKRYPAKLTLGEREVELLKPIEDVTIYEKESASFDAEISEADIPGQWKLKGELLRPSPTCEIKAEGGKRFLTLHKVKLDQAGEVLYQALNAITTAILTVKEIELDFAVPLKDVTVPERRQARFECVLTREANVIWSKGPDIIKSSDKFDIIADGKKHILVINDSQFDDEGVYTAEVEGKKTSARLFVTGIRLKFMSPLEDQTVKEGETATFVCELSHEKMHVVWFKNDAKLHTSRTVLISSEGKTHKLEMKEVTLDDISQIKAQVKELSSTAQLKVLEADPYFTVKLHDKTAVEKDEITLKCEVSKDVPVKWFKDGEEIVPSPKYSIKADGLRRILKIKKADLKDKGEYVCDCGTDKTKANVTVEARLIKVEKPLYGVEVFVGETAHFEIELSEPDVHGQWKLKGQPLTASPDCEIIEDGKKHILILHNCQLGMTGEVSFQAANAKSAANLKVKELPLIFITPLSDVKVFEKDEAKFECEVSREPKTFRWLKGTQEITGDDRFELIKDGTKHSMVIKSAAFEDEAKYMFEAEDKHTSGKLIIEGIRLKFLTPLKDVTAKEKESAVFTVELSHDNIRVKWFKNDQRLHTTRSVSMQDEGKTHSITFKDLSIDDTSQIRVEAMGMSSEAKLTVLEGDPYFTGKLQDYTGVEKDEVILQCEISKADAPVKWFKDGKEIKPSKNAVIKADGKKRMLILKKALKSDIGQYTCDCGTDKTSGKLDIEDREIKLVRPLHSVEVMETETARFETEISEDDIHANWKLKGEALLQTPDCEIKEEGKIHSLVLHNCRLDQTGGVDFQAANVKSSAHLRVKPRVIGLLRPLKDVTVTAGETATFDCELSYEDIPVEWYLKGKKLEPSDKVVPRSEGKVHTLTLRDVKLEDAGEVQLTAKDFKTHANLFVKEPPVEFTKPLEDQTVEEGATAVLECEVSRENAKVKWFKNGTEILKSKKYEIVADGRVRKLVIHDCTPEDIKTYTCDAKDFKTSCNLNVVPPHVEFLRPLTDLQVREKEMARFECELSRENAKVKWFKDGAEIKKGKKYDIISKGAVRILVINKCLLDDEAEYSCEVRTARTSGMLTVLEEEAVFTKNLANIEVSETDTIKLVCEVSKPGAEVIWYKGDEEIIETGRYEILTEGRKRILVIQNAHLEDAGNYNCRLPSSRTDGKVKVHELAAEFISKPQNLEILEGEKAEFVCSISKESFPVQWKRDDKTLESGDKYDVIADGKKRVLVVKDATLQDMGTYVVMVGAARAAAHLTVIEKLRIVVPLKDTRVKEQQEVVFNCEVNTEGAKAKWFRNEEAIFDSSKYIILQKDLVYTLRIRDAHLDDQANYNVSLTNHRGENVKSAANLIVEEEDLRIVEPLKDIETMEKKSVTFWCKVNRLNVTLKWTKNGEEVPFDNRVSYRVDKYKHMLTIKDCGFPDEGEYIVTAGQDKSVAELLIIEAPTEFVEHLEDQTVTEFDDAVFSCQLSREKANVKWYRNGREIKEGKKYKFEKDGSIHRLIIKDCRLDDECEYACGVEDRKSRARLFVEEIPVEIIRPPQDILEAPGADVVFLAELNKDKVEVQWLRNNMVVVQGDKHQMMSEGKIHRLQICDIKPRDQGEYRFIAKDKEARAKLELAAAPKIKTADQDLVVDVGKPLTMVVPYDAYPKAEAEWFKENEPLSTKTIDTTAEQTSFRILEAKKGDKGRYKIVLQNKHGKAEGFINLKVIDVPGPVRNLEVTETFDGEVSLAWEEPLTDGGSKIIGYVVERRDIKRKTWVLATDRAESCEFTVTGLQKGGVEYLFRVSARNRVGTGEPVETDNPVEARSKYDVPGPPLNVTITDVNRFGVSLTWEPPEYDGGAEITNYVIELRDKTSIRWDTAMTVRAEDLSATVTDVVEGQEYSFRVRAQNRIGVGKPSAATPFVKVADPIERPSPPVNLTSSDQTQSSVQLKWEPPLKDGGSPILGYIIERCEEGKDNWIRCNMKLVPELTYKVTGLEKGNKYLYRVSAENKAGVSDPSEILGPLTADDAFVEPTMDLSAFKDGLEVIVPNPITILVPSTGYPRPTATWCFGDKVLETGDRVKMKTLSAYAELVISPSERSDKGIYTLKLENRVKTISGEIDVNVIARPSAPKELKFGDITKDSVHLTWEPPDDDGGSPLTGYVVEKREVSRKTWTKVMDFVTDLEFTVPDLVQGKEYLFKVCARNKCGPGEPAYVDEPVNMSTPATVPDPPENVKWRDRTANSIFLTWDPPKNDGGSRIKGYIVERCPRGSDKWVACGEPVAETKMEVTGLEEGKWYAYRVKALNRQGASKPSRPTEEIQAVDTQEAPEIFLDVKLLAGLTVKAGTKIELPATVTGKPEPKITWTKADMILKQDKRITIENVPKKSTVTIVDSKRSDTGTYIIEAVNVCGRATAVVEVNVLDKPGPPAAFDITDVTNESCLLTWNPPRDDGGSKITNYVVERRATDSEVWHKLSSTVKDTNFKATKLIPNKEYIFRVAAENMYGVGEPVQASPITAKYQFDPPGPPTRLEPSDITKDAVTLTWCEPDDDGGSPITGYWVERLDPDTDKWVRCNKMPVKDTTYRVKGLTNKKKYRFRVLAENLAGPGKPSKSTEPILIKDPIDPPWPPGKPTVKDVGKTSVRLNWTKPEHDGGAKIESYVIEMLKTGTDEWVRVAEGVPTTQHLLPGLMEGQEYSFRVRAVNKAGESEPSEPSDPVLCREKLYPPSPPRWLEVINITKNTADLKWTVPEKDGGSPITNYIVEKRDVRRKGWQTVDTTVKDTKCTVTPLTEGSLYVFRVAAENAIGQSDYTEIEDSVLAKDTFTTPGPPYALAVVDVTKRHVDLKWEPPKNDGGRPIQRYVIEKKERLGTRWVKAGKTAGPDCNFRVTDVIEGTEVQFQVRAENEAGVGHPSEPTEILSIEDPTSPPSPPLDLHVTDAGRKHIAIAWKPPEKNGGSPIIGYHVEMCPVGTEKWMRVNSRPIKDLKFKVEEGVVPDKEYVLRVRAVNAIGVSEPSEISENVVAKDPDCKPTIDLETHDIIVIEGEKLSIPVPFRAVPVPTVSWHKDGKEVKASDRLTMKNDHISAHLEVPKSVRADAGIYTITLENKLGSATASINVKVIGLPGPCKDIKASDITKSSCKLTWEPPEFDGGTPILHYVLERREAGRRTYIPVMSGENKLSWTVKDLIPNGEYFFRVKAVNKVGGGEYIELKNPVIAQDPKQPPDPPVDVEVHNPTAEAMTITWKPPLYDGGSKIMGYIIEKIAKGEERWKRCNEHLVPILTYTAKGLEEGKEYQFRVRAENAAGISEPSRATPPTKAVDPIDAPKVILRTSLEVKRGDEIALDASISGSPYPTITWIKDENVIVPEEIKKRAAPLVRRRKGEVQEEEPFVLPLTQRLSIDNSKKGESQLRVRDSLRPDHGLYMIKVENDHGIAKAPCTVSVLDTPGPPINFVFEDIRKTSVLCKWEPPLDDGGSEIINYTLEKKDKTKPDSEWIVVTSTLRHCKYSVTKLIEGKEYLFRVRAENRFGPGPPCVSKPLVAKDPFGPPDAPDKPIVEDVTSNSMLVKWNEPKDNGSPILGYWLEKREVNSTHWSRVNKSLLNALKANVDGLLEGLTYVFRVCAENAAGPGKFSPPSDPKTAHDPISPPGPPIPRVTDTSSTTIELEWEPPAFNGGGEIVGYFVDKQLVGTNEWSRCTEKMIKVRQYTVKEIREGADYKLRVSAVNAAGEGPPGETQPVTVAEPQEPPAVELDVSVKGGIQIMAGKTLRIPAVVTGRPVPTKVWTKEEGELDKDRVVIDNVGTKSELIIKDALRKDHGRYVITATNSCGSKFAAARVEVFDVPGPVLDLKPVVTNRKMCLLNWSDPEDDGGSEITGFIIERKDAKMHTWRQPIETERSKCDITGLLEGQEYKFRVIAKNKFGCGPPVEIGPILAVDPLGPPTSPERLTYTERTKSTITLDWKEPRSNGGSPIQGYIIEKRRHDKPDFERVNKRLCPTTSFLVENLDEHQMYEFRVKAVNEIGESEPSLPLNVVIQDDEVPPTIKLRLSVRGDTIKVKAGEPVHIPADVTGLPMPKIEWSKNETVIEKPTDALQITKEEVSRSEAKTELSIPKAVREDKGTYTVTASNRLGSVFRNVHVEVYDRPSPPRNLAVTDIKAESCYLTWDAPLDNGGSEITHYVIDKRDASRKKAEWEEVTNTAVEKRYGIWKLIPNGQYEFRVRAVNKYGISDECKSDKVVIQDPYRLPGPPGKPKVLARTKGSMLVSWTPPLDNGGSPITGYWLEKREEGSPYWSRVSRAPITKVGLKGVEFNVPRLLEGVKYQFRAMAINAAGIGPPSEPSDPEVAGDPIFPPGPPSCPEVKDKTKSSISLGWKPPAKDGGSPIKGYIVEMQEEGTTDWKRVNEPDKLITTCECVVPNLKELRKYRFRVKAVNEAGESEPSDTTGEIPATDIQEEPEVFIDIGAQDCLVCKAGSQIRIPAVIKGRPTPKSSWEFDGKAKKAMKDGVHDIPEDAQLETAENSSVIIIPECKRSHTGKYSITAKNKAGQKTANCRVKVMDVPGPPKDLKVSDITRGSCRLSWKMPDDDGGDRIKGYVIEKRTIDGKAWTKVNPDCGSTTFVVPDLLSEQQYFFRVRAENRFGIGPPVETIQRTTARDPIYPPDPPIKLKIGLITKNTVHLSWKPPKNDGGSPVTHYIVECLAWDPTGTKKEAWRQCNKRDVEELQFTVEDLVEGGEYEFRVKAVNAAGVSKPSATVGPVTVKDQTCPPSIDLKEFMEVEEGTNVNIVAKIKGVPFPTLTWFKAPPKKPDNKEPVLYDTHVNKLVVDDTCTLVIPQSRRSDTGLYTITAVNNLGTASKEMRLNVLGRPGPPVGPIKFESVSADQMTLSWFPPKDDGGSKITNYVIEKREANRKTWVHVSSEPKECTYTIPKLLEGHEYVFRIMAQNKYGIGEPLDSEPETARNLFSVPGAPDKPTVSSVTRNSMTVNWEEPEYDGGSPVTGYWLEMKDTTSKRWKRVNRDPIKAMTLGVSYKVTGLIEGSDYQFRVYAINAAGVGPASLPSDPATARDPIAPPGPPFPKVTDWTKSSADLEWSPPLKDGGSKVTGYIVEYKEEGKEEWEKGKDKEVRGTKLVVTGLKEGAFYKFRVRAVNIAGIGEPGEVTDVIEMKDRLVSPDLQLDASVRDRIVVHAGGVIRIIAYVSGKPPPTVTWNMNERTLPQEATIETTAISSSMVIKNCQRSHQGVYSLLAKNEAGERKKTIIVDVLDVPGPVGTPFLAHNLTNESCKLTWFSPEDDGGSPITNYVIEKRESDRRAWTPVTYTVTRQNATVQGLIQGKAYFFRIAAENSIGMGPFVETSEALVIREPITVPERPEDLEVKEVTKNTVTLTWNPPKYDGGSEIINYVLESRLIGTEKFHKVTNDNLLSRKYTVKGLKEGDTYEYRVSAVNIVGQGKPSFCTKPITCKDELAPPTLHLDFRDKLTIRVGEAFALTGRYSGKPKPKVSWFKDEADVLEDDRTHIKTTPATLALEKIKAKRSDSGKYCVVVENSTGSRKGFCQVNVVDRPGPPVGPVSFDEVTKDYMVISWKPPLDDGGSKITNYIIEKKEVGKDVWMPVTSASAKTTCKVSKLLEGKDYIFRIHAENLYGISDPLVSDSMKAKDRFRVPDAPDQPIVTEVTKDSALVTWNKPHDGGKPITNYILEKRETMSKRWARVTKDPIHPYTKFRVPDLLEGCQYEFRVSAENEIGIGDPSPPSKPVFAKDPIAKPSPPVNPEAIDTTCNSVDLTWQPPRHDGGSKILGYIVEYQKVGDEEWRRANHTPESCPETKYKVTGLRDGQTYKFRVLAVNAAGESDPAHVPEPVLVKDRLEPPELILDANMAREQHIKVGDTLRLSAIIKGVPFPKVTWKKEDRDAPTKARIDVTPVGSKLEIRNAAHEDGGIYSLTVENPAGSKTVSVKVLVLDKPGPPRDLEVSEIRKDSCYLTWKEPLDDGGSVITNYVVERRDVASAQWSPLSATSKKKSHFAKHLNEGNQYLFRVAAENQYGRGPFVETPKPIKALDPLHPPGPPKDLHHVDVDKTEVSLVWNKPDRDGGSPITGYLVEYQEEGTQDWIKFKTVTNLECVVTGLQQGKTYRFRVKAENIVGLGLPDTTIPIECQEKLVPPSVELDVKLIEGLVVKAGTTVRFPAIIRGVPVPTAKWTTDGSEIKTDEHYTVETDNFSSVLTIKNCLRRDTGEYQITVSNAAGSKTVAVHLTVLDVPGPPTGPINILDVTPEHMTISWQPPKDDGGSPVINYIVEKQDTRKDTWGVVSSGSSKTKLKIPHLQKGCEYVFRVRAENKIGVGPPLDSTPTVAKHKFSPPSPPGKPVVTDITENAATVSWTLPKSDGGSPITGYYMERREVTGKWVRVNKTPIADLKFRVTGLYEGNTYEFRVFAENLAGLSKPSPSSDPIKACRPIKPPGPPINPKLKDKSRETADLVWTKPLSDGGSPILGYVVECQKPGTAQWNRINKDELIRQCAFRVPGLIEGNEYRFRIKAANIVGEGEPRELAESVIAKDILHPPEVELDVTCRDVITVRVGQTIRILARVKGRPEPDITWTKEGKVLVREKRVDLIQDLPRVELQIKEAVRADHGKYIISAKNSSGHAQGSAIVNVLDRPGPCQNLKVTNVTKENCTISWENPLDNGGSEITNFIVEYRKPNQKGWSIVASDVTKRLIKANLLANNEYYFRVCAENKVGVGPTIETKTPILAINPIDRPGEPENLHIADKGKTFVYLKWRRPDYDGGSPNLSYHVERRLKGSDDWERVHKGSIKETHYMVDRCVENQIYEFRVQTKNEGGESDWVKTEEVVVKEDLQKPVLDLKLSGVLTVKAGDTIRLEAGVRGKPFPEVAWTKDKDATDLTRSPRVKIDTRADSSKFSLTKAKRSDGGKYVVTATNTAGSFVAYATVNVLDKPGPVRNLKIVDVSSDRCTVCWDPPEDDGGCEIQNYILEKCETKRMVWSTYSATVLTPGTTVTRLIEGNEYIFRVRAENKIGTGPPTESKPVIAKTKYDKPGRPDPPEVTKVSKEEMTVVWNPPEYDGGKSITGYFLEKKEKHSTRWVPVNKSAIPERRMKVQNLLPDHEYQFRVKAENEIGIGEPSLPSRPVVAKDPIEPPGPPTNFRVVDTTKHSITLGWGKPVYDGGAPIIGYVVEMRPKIADASPDEGWKRCNAAAQLVRKEFTVTSLDENQEYEFRVCAQNQVGIGRPAELKEAIKPKEILEPPEIDLDASMRKLVIVRAGCPIRLFAIVRGRPAPKVTWRKVGIDNVVRKGQVDLVDTMAFLVIPNSTRDDSGKYSLTLVNPAGEKAVFVNVRVLDTPGPVSDLKVSDVTKTSCHVSWAPPENDGGSQVTHYIVEKREADRKTWSTVTPEVKKTSFHVTNLVPGNEYYFRVTAVNEYGPGVPTDVPKPVLASDPLSEPDPPRKLEVTEMTKNSATLAWLPPLRDGGAKIDGYITSYREEEQPADRWTEYSVVKDLSLVVTGLKEGKKYKFRVAARNAVGVSLPREAEGVYEAKEQLLPPKILMPEQITIKAGKKLRIEAHVYGKPHPTCKWKKGEDEVVTSSHLAVHKADSSSILIIKDVTRKDSGYYSLTAENSSGTDTQKIKVVVMDAPGPPQPPFDISDIDADACSLSWHIPLEDGGSNITNYIVEKCDVSRGDWVTALASVTKTSCRVGKLIPGQEYIFRVRAENRFGISEPLTSPKMVAQFPFGVPSEPKNARVTKVNKDCIFVAWDRPDSDGGSPIIGYLIERKERNSLLWVKANDTLVRSTEYPCAGLVEGLEYSFRIYALNKAGSSPPSKPTEYVTARMPVDPPGKPEVIDVTKSTVSLIWARPKHDGGSKIIGYFVEACKLPGDKWVRCNTAPHQIPQEEYTATGLEEKAQYQFRAIARTAVNISPPSEPSDPVTILAENVPPRIDLSVAMKSLLTVKAGTNVCLDATVFGKPMPTVSWKKDGTLLKPAEGIKMAMQRNLCTLELFSVNRKDSGDYTITAENSSGSKSATIKLKVLDKPGPPASVKINKMYSDRAMLSWEPPLEDGGSEITNYIVDKRETSRPNWAQVSATVPITSCSVEKLIEGHEYQFRICAENKYGVGDPVFTEPAIAKNPYDPPGRCDPPVISNITKDHMTVSWKPPADDGGSPITGYLLEKRETQAVNWTKVNRKPIIERTLKATGLQEGTEYEFRVTAINKAGPGKPSDASKAAYARDPQYPPGPPAFPKVYDTTRSSVSLSWGKPAYDGGSPIIGYLVEVKRADSDNWVRCNLPQNLQKTRFEVTGLMEDTQYQFRVYAVNKIGYSDPSDVPDKHYPKDILIPPEGELDADLRKTLILRAGVTMRLYVPVKGRPPPKITWSKPNVNLRDRIGLDIKSTDFDTFLRCENVNKYDAGKYILTLENSCGKKEYTIVVKVLDTPGPPVNVTVKEISKDSAYVTWEPPIIDGGSPIINYVVQKRDAERKSWSTVTTECSKTSFRVANLEEGKSYFFRVFAENEYGIGDPGETRDAVKASQTPGPVVDLKVRSVSKSSCSIGWKKPHSDGGSRIIGYVVDFLTEENKWQRVMKSLSLQYSAKDLTEGKEYTFRVSAENENGEGTPSEITVVARDDVVAPDLDLKGLPDLCYLAKENSNFRLKIPIKGKPAPSVSWKKGEDPLATDTRVSVESSAVNTTLIVYDCQKSDAGKYTITLKNVAGTKEGTISIKVVGKPGIPTGPIKFDEVTAEAMTLKWAPPKDDGGSEITNYILEKRDSVNNKWVTCASAVQKTTFRVTRLHEGMEYTFRVSAENKYGVGEGLKSEPIVARHPFDVPDAPPPPNIVDVRHDSVSLTWTDPKKTGGSPITGYHLEFKERNSLLWKRANKTPIRMRDFKVTGLTEGLEYEFRVMAINLAGVGKPSLPSEPVVALDPIDPPGKPEVINITRNSVTLIWTEPKYDGGHKLTGYIVEKRDLPSKSWMKANHVNVPECAFTVTDLVEGGKYEFRIRAKNTAGAISAPSESTETIICKDEYEAPTIVLDPTIKDGLTIKAGDTIVLNAISILGKPLPKSSWSKAGKDIRPSDITQITSTPTSSMLTIKYATRKDAGEYTITATNPFGTKVEHVKVTVLDVPGPPGPVEISNVSAEKATLTWTPPLEDGGSPIKSYILEKRETSRLLWTVVSEDIQSCRHVATKLIQGNEYIFRVSAVNHYGKGEPVQSEPVKMVDRFGPPGPPEKPEVSNVTKNTATVSWKRPVDDGGSEITGYHVERREKKSLRWVRAIKTPVSDLRCKVTGLQEGSTYEFRVSAENRAGIGPPSEASDSVLMKDAAYPPGPPSNPHVTDTTKKSASLAWGKPHYDGGLEITGYVVEHQKVGDEAWIKDTTGTALRITQFVVPDLQTKEKYNFRISAINDAGVGEPAVIPDVEIVEREMAPDFELDAELRRTLVVRAGLSIRIFVPIKGRPAPEVTWTKDNINLKNRANIENTESFTLLIIPECNRYDTGKFVMTIENPAGKKSGFVNVRVLDTPGPVLNLRPTDITKDSVTLHWDLPLIDGGSRITNYIVEKREATRKSYSTATTKCHKCTYKVTGLSEGCEYFFRVMAENEYGIGEPTETTEPVKASEAPSPPDSLNIMDITKSTVSLAWPKPKHDGGSKITGYVIEAQRKGSDQWTHITTVKGLECVVRNLTEGEEYTFQVMAVNSAGRSAPRESRPVIVKEQTMLPELDLRGIYQKLVIAKAGDNIKVEIPVLGRPKPTVTWKKGDQILKQTQRVNFETTATSTILNINECVRSDSGPYPLTARNIVGEVGDVITIQVHDIPGPPTGPIKFDEVSSDFVTFSWDPPENDGGVPISNYVVEMRQTDSTTWVELATTVIRTTYKATRLTTGLEYQFRVKAQNRYGVGPGITSACIVANYPFKVPGPPGTPQVTAVTKDSMTISWHEPLSDGGSPILGYHVERKERNGILWQTVSKALVPGNIFKSSGLTDGIAYEFRVIAENMAGKSKPSKPSEPMLALDPIDPPGKPVPLNITRHTVTLKWAKPEYTGGFKITSYIVEKRDLPNGRWLKANFSNILENEFTVSGLTEDAAYEFRVIAKNAAGAISPPSEPSDAITCRDDVEAPKIKVDVKFKDTVILKAGEAFRLEADVSGRPPPTMEWSKDGKELEGTAKLEIKIADFSTNLVNKDSTRRDSGAYTLTATNPGGFAKHIFNVKVLDRPGPPEGPLAVTEVTSEKCVLSWFPPLDDGGAKIDHYIVQKRETSRLAWTNVASEVQVTKLKVTKLLKGNEYIFRVMAVNKYGVGEPLESEPVLAVNPYGPPDPPKNPEVTTITKDSMVVCWGHPDSDGGSEIINYIVERRDKAGQRWIKCNKKTLTDLRYKVSGLTEGHEYEFRIMAENAAGISAPSPTSPFYKACDTVFKPGPPGNPRVLDTSRSSISIAWNKPIYDGGSEITGYMVEIALPEEDEWQIVTPPAGLKATSYTITGLTENQEYKIRIYAMNSEGLGEPALVPGTPKAEDRMLPPEIELDADLRKVVTIRACCTLRLFVPIKGRPAPEVKWARDHGESLDKASIESTSSYTLLIVGNVNRFDSGKYILTVENSSGSKSAFVNVRVLDTPGPPQDLKVKEVTKTSVTLTWDPPLLDGGSKIKNYIVEKRESTRKAYSTVATNCHKTSWKVDQLQEGCSYYFRVLAENEYGIGLPAETAESVKASERPLPPGKITLMDVTRNSVSLSWEKPEHDGGSRILGYIVEMQTKGSDKWATCATVKVTEATITGLIQGEEYSFRVSAQNEKGISDPRQLSVPVIAKDLVIPPAFKLLFNTFTVLAGEDLKVDVPFIGRPTPAVTWHKDNVPLKQTTRVNAESTENNSLLTIKDACREDVGHYVVKLTNSAGEAIETLNVIVLDKPGPPTGPVKMDEVTADSITLSWGPPKYDGGSSINNYIVEKRDTSTTTWQIVSATVARTTIKACRLKTGCEYQFRIAAENRYGKSTYLNSEPTVAQYPFKVPGPPGTPVVTLSSRDSMEVQWNEPISDGGSRVIGYHLERKERNSILWVKLNKTPIPQTKFKTTGLEEGVEYEFRVSAENIVGIGKPSKVSECYVARDPCDPPGRPEAIIVTRNSVTLQWKKPTYDGGSKITGYIVEKKELPEGRWMKASFTNIIDTHFEVTGLVEDHRYEFRVIARNAAGVFSEPSESTGAITARDEVDPPRISMDPKYKDTIVVHAGESFKVDADIYGKPIPTIQWIKGDQELSNTARLEIKSTDFATSLSVKDAVRVDSGNYILKAKNVAGERSVTVNVKVLDRPGPPEGPVVISGVTAEKCTLAWKPPLQDGGSDIINYIVERRETSRLVWTVVDANVQTLSCKVTKLLEGNEYTFRIMAVNKYGVGEPLESEPVVAKNPFVVPDAPKAPEVTTVTKDSMIVVWERPASDGGSEILGYVLEKRDKEGIRWTRCHKRLIGELRLRVTGLIENHDYEFRVSAENAAGLSEPSPPSAYQKACDPIYKPGPPNNPKVIDITRSSVFLSWSKPIYDGGCEIQGYIVEKCDVSVGEWTMCTPPTGINKTNIEVEKLLEKHEYNFRICAINKAGVGEHADVPGPIIVEEKLEAPDIDLDLELRKIINIRAGGSLRLFVPIKGRPTPEVKWGKVDGEIRDAAIIDVTSSFTSLVLDNVNRYDSGKYTLTLENSSGTKSAFVTVRVLDTPSPPVNLKVTEITKDSVSITWEPPLLDGGSKIKNYIVEKREATRKSYAAVVTNCHKNSWKIDQLQEGCSYYFRVTAENEYGIGLPAQTADPIKVAEVPQPPGKITVDDVTRNSVSLSWTKPEHDGGSKIIQYIVEMQAKHSEKWSECARVKSLQAVITNLTQGEEYLFRVVAVNEKGRSDPRSLAVPIVAKDLVIEPDVKPAFSSYSVQVGQDLKIEVPISGRPKPTITWTKDGLPLKQTTRINVTDSLDLTTLSIKETHKDDGGQYGITVANVVGQKTASIEIVTLDKPDPPKGPVKFDDVSAESITLSWNPPLYTGGCQITNYIVQKRDTTTTVWDVVSATVARTTLKVTKLKTGTEYQFRIFAENRYGQSFALESDPIVAQYPYKEPGPPGTPFATAISKDSMVIQWHEPVNNGGSPVIGYHLERKERNSILWTKVNKTIIHDTQFKAQNLEEGIEYEFRVYAENIVGVGKASKNSECYVARDPCDPPGTPEPIMVKRNEITLQWTKPVYDGGSMITGYIVEKRDLPDGRWMKASFTNVIETQFTVSGLTEDQRYEFRVIAKNAAGAISKPSDSTGPITAKDEVELPRISMDPKFRDTIVVNAGETFRLEADVHGKPLPTIEWLRGDKEIEESARCEIKNTDFKALLIVKDAIRIDGGQYILRASNVAGSKSFPVNVKVLDRPGPPEGPVQVTGVTSEKCSLTWSPPLQDGGSDISHYVVEKRETSRLAWTVVASEVVTNSLKVTKLLEGNEYVFRIMAVNKYGVGEPLESAPVLMKNPFVLPGPPKSLEVTNIAKDSMTVCWNRPDSDGGSEIIGYIVEKRDRSGIRWIKCNKRRITDLRLRVTGLTEDHEYEFRVSAENAAGVGEPSPATVYYKACDPVFKPGPPTNAHIVDTTKNSITLAWGKPIYDGGSEILGYVVEICKADEEEWQIVTPQTGLRVTRFEISKLTEHQEYKIRVCALNKVGLGEATSVPGTVKPEDKLEAPELDLDSELRKGIVVRAGGSARIHIPFKGRPTPEITWSREEGEFTDKVQIEKGVNYTQLSIDNCDRNDAGKYILKLENSSGSKSAFVTVKVLDTPGPPQNLAVKEVRKDSAFLVWEPPIIDGGAKVKNYVIDKRESTRKAYANVSSKCSKTSFKVENLTEGAIYYFRVMAENEFGVGVPVETVDAVKAAEPPSPPGKVTLTDVSQTSASLMWEKPEHDGGSRVLGYVVEMQPKGTEKWSIVAESKVCNAVVTGLSSGQEYQFRVKAYNEKGKSDPRVLGVPVIAKDLTIQPSLKLPFNTYSIQAGEDLKIEIPVIGRPRPNISWVKDGEPLKQTTRVNVEETATSTVLHIKEGNKDDFGKYTVTATNSAGTATENLSVIVLEKPGPPVGPVRFDEVSADFVVISWEPPAYTGGCQISNYIVEKRDTTTTTWHMVSATVARTTIKITKLKTGTEYQFRIFAENRYGKSAPLDSKAVIVQYPFKEPGPPGTPFVTSISKDQMLVQWHEPVNDGGTKIIGYHLEQKEKNSILWVKLNKTPIQDTKFKTTGLDEGLEYEFKVSAENIVGIGKPSKVSECFVARDPCDPPGRPEAIVITRNNVTLKWKKPAYDGGSKITGYIVEKKDLPDGRWMKASFTNVLETEFTVSGLVEDQRYEFRVIARNAAGNFSEPSDSSGAITARDEIDAPNASLDPKYKDVIVVHAGETFVLEADIRGKPIPDVVWSKDGKELEETAARMEIKSTIQKTTLVVKDCIRTDGGQYILKLSNVGGTKSIPITVKVLDRPGPPEGPLKVTGVTAEKCYLAWNPPLQDGGANISHYIIEKRETSRLSWTQVSTEVQALNYKVTKLLPGNEYIFRVMAVNKYGIGEPLESGPVTACNPYKPPGPPSTPEVSAITKDSMVVTWARPVDDGGTEIEGYILEKRDKEGVRWTKCNKKTLTDLRLRVTGLTEGHSYEFRVAAENAAGVGEPSEPSVFYRACDALYPPGPPSNPKVTDTSRSSVSLAWSKPIYDGGAPVKGYVVEVKEAAADEWTTCTPPTGLQGKQFTVTKLKENTEYNFRICAINSEGVGEPATLPGSVVAQERIEPPEIELDADLRKVVVLRASATLRLFVTIKGRPEPEVKWEKAEGILTDRAQIEVTSSFTMLVIDNVTRFDSGRYNLTLENNSGSKTAFVNVRVLDSPSAPVNLTIREVKKDSVTLSWEPPLIDGGAKITNYIVEKRETTRKAYATITNNCTKTTFRIENLQEGCSYYFRVLASNEYGIGLPAETTEPVKVSEPPLPPGRVTLVDVTRNTATIKWEKPESDGGSKITGYVVEMQTKGSEKWSTCTQVKTLEATISGLTAGEEYVFRVAAVNEKGRSDPRQLGVPVIARDIEIKPSVELPFHTFNVKAREQLKIDVPFKGRPQATVNWRKDGQTLKETTRVNVSSSKTVTSLSIKEASKEDVGTYELCVSNSAGSITVPITIIVLDRPGPPGPIRIDEVSCDSITISWNPPEYDGGCQISNYIVEKKETTSTTWHIVSQAVARTSIKIVRLTTGSEYQFRVCAENRYGKSSYSESSAVVAEYPFSPPGPPGTPKVVHATKSTMLVTWQVPVNDGGSRVIGYHLEYKERSSILWSKANKILIADTQMKVSGLDEGLMYEYRVYAENIAGIGKCSKSCEPVPARDPCDPPGQPEVTNITRKSVSLKWSKPHYDGGAKITGYIVERRELPDGRWLKCNYTNIQETYFEVTELTEDQRYEFRVFARNAADSVSEPSESTGPIIVKDDVEPPRVMMDVKFRDVIVVKAGEVLKINADIAGRPLPVISWAKDGIEIEERARTEIISTDNHTLLTVKDCIRRDTGQYVLTLKNVAGTRSVAVNCKVLDKPGPPAGPLEINGLTAEKCSLSWGRPQEDGGADIDYYIVEKRETSHLAWTICEGELQMTSCKVTKLLKGNEYIFRVTGVNKYGVGEPLESVAIKALDPFTVPSPPTSLEITSVTKESMTLCWSRPESDGGSEISGYIIERREKNSLRWVRVNKKPVYDLRVKSTGLREGCEYEYRVYAENAAGLSLPSETSPLIRAEDPVFLPSPPSKPKIVDSGKTTITIAWVKPLFDGGAPITGYTVEYKKSDDTDWKTSIQSLRGTEYTISGLTTGAEYVFRVKSVNKVGASDPSDSSDPQIAKEREEEPLFDIDSEMRKTLIVKAGASFTMTVPFRGRPVPNVLWSKPDTDLRTRAYVDTTDSRTSLTIENANRNDSGKYTLTIQNVLSAASLTLVVKVLDTPGPPTNITVQDVTKESAVLSWDVPENDGGAPVKNYHIEKREASKKAWVSVTNNCNRLSYKVTNLQEGAIYYFRVSGENEFGVGIPAETKEGVKITEKPSPPEKLGVTSISKDSVSLTWLKPEHDGGSRIVHYVVEALEKGQKNWVKCAVAKSTHHVVSGLRENSEYFFRVFAENQAGLSDPRELLLPVLIKEQLEPPEIDMKNFPSHTVYVRAGSNLKVDIPISGKPLPKVTLSRDGVPLKATMRFNTEITAENLTINLKESVTADAGRYEITAANSSGTTKAFINIVVLDRPGPPTGPVVISDITEESVTLKWEPPKYDGGSQVTNYILLKRETSTAVWTEVSATVARTMMKVMKLTTGEEYQFRIKAENRFGISDHIDSACVTVKLPYTTPGPPSTPWVTNVTRESITVGWHEPVSNGGSAVVGYHLEMKDRNSILWQKANKLVIRTTHFKVTTISAGLIYEFRVYAENAAGVGKPSHPSEPVLAIDACEPPRNVRITDISKNSVSLSWQQPAFDGGSKITGYIVERRDLPDGRWTKASFTNVTETQFIISGLTQNSQYEFRVFARNAVGSISNPSEVVGPITCIDSYGGPVIDLPLEYTEVVKYRAGTSVKLRAGISGKPAPTIEWYKDDKELQTNALVCVENTTDLASILIKDADRLNSGCYELKLRNAMGSASATIRVQILDKPGPPGGPIEFKTVTAEKITLLWRPPADDGGAKITHYIVEKRETSRVVWSMVSEHLEECIITTTKIIKGNEYIFRVRAVNKYGIGEPLESDSVVAKNAFVTPGPPGIPEVTKITKNSMTVVWSRPIADGGSDISGYFLEKRDKKSLGWFKVLKETIRDTRQKVTGLTENSDYQYRVCAVNAAGQGPFSEPSEFYKAADPIDPPGPPAKIRIADSTKSSITLGWSKPVYDGGSAVTGYVVEIRQGEEEEWTTVSTKGEVRTTEYVVSNLKPGVNYYFRVSAVNCAGQGEPIEMNEPVQAKDILEAPEIDLDVALRTSVIAKAGEDVQVLIPFKGRPPPTVTWRKDEKNLGSDARYSIENTDSSSLLTIPQVTRNDTGKYILTIENGVGEPKSSTVSVKVLDTPAACQKLQVKHVSRGTVTLLWDPPLIDGGSPIINYVIEKRDATKRTWSVVSHKCSSTSFKLIDLSEKTPFFFRVLAENEIGIGEPCETTEPVKAAEVPAPIRDLSMKDSTKTSVILSWTKPDFDGGSVITEYVVERKGKGEQTWSHAGISKTCEIEVSQLKEQSVLEFRVFAKNEKGLSDPVTIGPITVKELIITPEVDLSDIPGAQVTVRIGHNVHLELPYKGKPKPSISWLKDGLPLKESEFVRFSKTENKITLSIKNAKKEHGGKYTVILDNAVCRIAVPITVITLGPPSKPKGPIRFDEIKADSVILSWDVPEDNGGGEITCYSIEKRETSQTNWKMVCSSVARTTFKVPNLVKDAEYQFRVRAENRYGVSQPLVSSIIVAKHQFRIPGPPGKPVIYNVTSDGMSLTWDAPVYDGGSEVTGFHVEKKERNSILWQKVNTSPISGREYRATGLVEGLDYQFRVYAENSAGLSSPSDPSKFTLAVSPVDPPGTPDYIDVTRETITLKWNPPLRDGGSKIVGYSIEKRQGNERWVRCNFTDVSECQYTVTGLSPGDRYEFRIIARNAVGTISPPSQSSGIIMTRDENVPPIVEFGPEYFDGLIIKSGESLRIKALVQGRPVPRVTWFKDGVEIEKRMNMEITDVLGSTSLFVRDATRDHRGVYTVEAKNASGSAKAEIKVKVQDTPGKVVGPIRFTNITGEKMTLWWDAPLNDGCAPITHYIIEKRETSRLAWALIEDKCEAQSYTAIKLINGNEYQFRVSAVNKFGVGRPLDSDPVVAQIQYTVPDAPGIPEPSNITGNSITLTWARPESDGGSEIQQYILERREKKSTRWVKVISKRPISETRFKVTGLTEGNEYEFHVMAENAAGVGPASGISRLIKCREPVNPPGPPTVVKVTDTSKTTVSLEWSKPVFDGGMEIIGYIIEMCKADLGDWHKVNAEACVKTRYTVTDLQAGEEYKFRVSAINGAGKGDSCEVTGTIKAVDRLTAPELDIDANFKQTHVVRAGASIRLFIAYQGRPTPTAVWSKPDSNLSLRADIHTTDSFSTLTVENCNRNDAGKYTLTVENNSGSKSITFTVKVLDTPGPPGPITFKDVTRGSATLMWDAPLLDGGARIHHYVVEKREASRRSWQVISEKCTRQIFKVNDLAEGVPYYFRVSAVNEYGVGEPYEMPEPIVATEQPAPPRRLDVVDTSKSSAVLAWLKPDHDGGSRITGYLLEMRQKGSDFWVEAGHTKQLTFTVERLVEKTEYEFRVKAKNDAGYSEPREAFSSVIIKEPQIEPTADLTGITNQLITCKAGSPFTIDVPISGRPAPKVTWKLEEMRLKETDRVSITTTKDRTTLTVKDSMRGDSGRYFLTLENTAGVKTFSVTVVVIGRPGPVTGPIEVSSVSAESCVLSWGEPKDGGGTEITNYIVEKRESGTTAWQLVNSSVKRTQIKVTHLTKYMEYSFRVSSENRFGVSKPLESAPIIAEHPFVPPSAPTRPEVYHVSANAMSIRWEEPYHDGGSKIIGYWVEKKERNTILWVKENKVPCLECNYKVTGLVEGLEYQFRTYALNAAGVSKASEASRPIMAQNPVDAPGRPEVTDVTRSTVSLIWSAPAYDGGSKVVGYIIERKPVSEVGDGRWLKCNYTIVSDNFFTVTALSEGDTYEFRVLAKNAAGVISKGSESTGPVTCRDEYAPPKAELDARLHGDLVTIRAGSDLVLDAAVGGKPEPKIIWTKGDKELDLCEKVSLQYTGKRATAVIKFCDRSDSGKYTLTVKNASGTKAVSVMVKVLDSPGPCGKLTVSRVTQEKCTLAWSLPQEDGGAEITHYIVERRETSRLNWVIVEGECPTLSYVVTRLIKNNEYIFRVRAVNKYGPGVPVESEPIVARNSFTIPSPPGIPEEVGTGKEHIIIQWTKPESDGGNEISNYLVDKREKKSLRWTRVNKDYVVYDTRLKVTSLMEGCDYQFRVTAVNAAGNSEPSEASNFISCREPSYTPGPPSAPRVVDTTKHSISLAWTKPMYDGGTDIVGYVLEMQEKDTDQWYRVHTNATIRNTEFTVPDLKMGQKYSFRVAAVNVKGMSEYSESIAEIEPVERIEIPDLELADDLKKTVTIRAGASLRLMVSVSGRPPPVITWSKQGIDLASRAIIDTTESYSLLIVDKVNRYDAGKYTIEAENQSGKKSATVLVKVYDTPGPCPSVKVKEVSRDSVTITWEIPTIDGGAPVNNYIVEKREAAMRAFKTVTTKCSKTLYRISGLVEGTMYYFRVLPENIYGIGEPCETSDAVLVSEVPLVPAKLEVVDVTKSTVTLAWEKPLYDGGSRLTGYVLEACKAGTERWMKVVTLKPTVLEHTVTSLNEGEQYLFRIRAQNEKGVSEPRETVTAVTVQDLRVLPTIDLSTMPQKTIHVPAGRPVELVIPIAGRPPPAASWFFAGSKLRESERVTVETHTKVAKLTIRETTIRDTGEYTLELKNVTGTTSETIKVIILDKPGPPTGPIKIDEIDATSITISWEPPELDGGAPLSGYVVEQRDAHRPGWLPVSESVTRSTFKFTRLTEGNEYVFRVAATNRFGIGSYLQSEVIECRSSIRIPGPPETLQIFDVSRDGMTLTWYPPEDDGGSQVTGYIVERKEVRADRWVRVNKVPVTMTRYRSTGLTEGLEYEHRVTAINARGSGKPSRPSKPIVAMDPIAPPGKPQNPRVTDTTRTSVSLAWSVPEDEGGSKVTGYLIEMQKVDQHEWTKCNTTPTKIREYTLTHLPQGAEYRFRVLACNAGGPGEPAEVPGTVKVTEMLEYPDYELDERYQEGIFVRQGGVIRLTIPIKGKPFPICKWTKEGQDISKRAMIATSETHTELVIKEADRGDSGTYDLVLENKCGKKAVYIKVRVIGSPNSPEGPLEYDDIQVRSVRVSWRPPADDGGADILGYILERREVPKAAWYTIDSRVRGTSLVVKGLKENVEYHFRVSAENQFGISKPLKSEEPVTPKTPLNPPEPPSNPPEVLDVTKSSVSLSWSRPKDDGGSRVTGYYIERKETSTDKWVRHNKTQITTTMYTVTGLVPDAEYQFRIIAQNDVGLSETSPASEPVVCKDPFDKPSQPGELEILSISKDSVTLQWEKPECDGGKEILGYWVEYRQSGDSAWKKSNKERIKDKQFTIGGLLEATEYEFRVFAENETGLSRPRRTAMSIKTKLTSGEAPGIRKEMKDVTTKLGEAAQLSCQIVGRPLPDIKWYRFGKELIQSRKYKMSSDGRTHTLTVMTEEQEDEGVYTCIATNEVGEVETSSKLLLQATPQFHPGYPLKEKYYGAVGSTLRLHVMYIGRPVPAMTWFHGQKLLQNSENITIENTEHYTHLVMKNVQRKTHAGKYKVQLSNVFGTVDAILDVEIQDKPDKPTGPIVIEALLKNSAVISWKPPADDGGSWITNYVVEKCEAKEGAEWQLVSSAISVTTCRIVNLTENAGYYFRVSAQNTFGISDPLEVSSVVIIKSPFEKPGAPGKPTITAVTKDSCVVAWKPPASDGGAKIRNYYLEKREKKQNKWISVTTEEIRETVFSVKNLIEGLEYEFRVKCENLGGESEWSEISEPITPKSDVPIQAPHFKEELRNLNVRYQSNATLVCKVTGHPKPIVKWYRQGKEIIADGLKYRIQEFKGGYHQLIIASVTDDDATVYQVRATNQGGSVSGTASLEVEVPAKIHLPKTLEGMGAVHALRGEVVSIKIPFSGKPDPVITWQKGQDLIDNNGHYQVIVTRSFTSLVFPNGVERKDAGFYVVCAKNRFGIDQKTVELDVADVPDPPRGVKVSDVSRDSVNLTWTEPASDGGSKITNYIVEKCATTAERWLRVGQARETRYTVINLFGKTSYQFRVIAENKFGLSKPSEPSEPTITKEDKTRAMNYDEEVDETREVSMTKASHSSTKELYEKYMIAEDLGRGEFGIVHRCVETSSKKTYMAKFVKVKGTDQVLVKKEISILNIARHRNILHLHESFESMEELVMIFEFISGLDIFERINTSAFELNEREIVSYVHQVCEALQFLHSHNIGHFDIRPENIIYQTRRSSTIKIIEFGQARQLKPGDNFRLLFTAPEYYAPEVHQHDVVSTATDMWSLGTLVYVLLSGINPFLAETNQQIIENIMNAEYTFDEEAFKEISIEAMDFVDRLLVKERKSRMTASEALQHPWLKQKIERVSTKVIRTLKHRRYYHTLIKKDLNMVVSAARISCGGAIRSQKGVSVAKVKVASIEIGPVSGQIMHAVGEEGGHVKYVCKIENYDQSTQVTWYFGVRQLENSEKYEITYEDGVAILYVKDITKLDDGTYRCKVVNDYGEDSSYAELFVKGVREVYDYYCRRTMKKIKRRTDTMRLLERPPEFTLPLYNKTAYVGENVRFGVTITVHPEPHVTWYKSGQKIKPGDNDKKYTFESDKGLYQLTINSVTTDDDAEYTVVARNKYGEDSCKAKLTVTLHPPPTDSTLRPMFKRLLANAECQEGQSVCFEIRVSGIPPPTLKWEKDGQPLSLGPNIEIIHEGLDYYALHIRDTLPEDTGYYRVTATNTAGSTSCQAHLQVERLRYKKQEFKSKEEHERHVQKQIDKTLRMAEILSGTESVPLTQVAKEALREAAVLYKPAVSTKTVKGEFRLEIEEKKEERKLRMPYDVPEPRKYKQTTIEEDQRIKQFVPMSDMKWYKKIRDQYEMPGKLDRVVQKRPKRIRLSRWEQFYVMPLPRITDQYRPKWRIPKLSQDDLEIVRPARRRTPSPDYDFYYRPRRRSLGDISDEELLLPIDDYLAMKRTEEERLRLEEELELGFSASPPSRSPPHFELSSLRYSSPQAHVKVEETRKDFRYSTYHIPTKAEASTSYAELRERHAQAAYRQPKQRQRIMAEREDEELLRPVTTTQHLSEYKSELDFMSKEEKSRKKSRRQREVTEITEIEEEYEISKHAQRESSSSASRLLRRRRSLSPTYIELMRPVSELIRSRPQPAEEYEDDTERRSPTPERTRPRSPSPVSSERSLSRFERSARFDIFSRYESMKAALKTQKTSERKYEVLSQQPFTLDHAPRITLRMRSHRVPCGQNTRFILNVQSKPTAEVKWYHNGVELQESSKIHYTNTSGVLTLEILDCHTDDSGTYRAVCTNYKGEASDYATLDVTGGDYTTYASQRRDEEVPRSVFPELTRTEAYAVSSFKKTSEMEASSSVREVKSQMTETRESLSSYEHSASAEMKSAALEEKSLEEKSTTRKIKTTLAARILTKPRSMTVYEGESARFSCDTDGEPVPTVTWLRKGQVLSTSARHQVTTTKYKSTFEISSVQASDEGNYSVVVENSEGKQEAEFTLTIQKARVTEKAVTSPPRVKSPEPRVKSPEAVKSPKRVKSPEPSHPKAVSPTETKPTPTEKVQHLPVSAPPKITQFLKAEASKEIAKLTCVVESSVLRAKEVTWYKDGKKLKENGHFQFHYSADGTYELKINNLTESDQGEYVCEISGEGGTSKTNLQFMGQAFKSIHEKVSKISETKKSDQKTTESTVTRKTEPKAPEPISSKPVIVTGLQDTTVSSDSVAKFAVKATGEPRPTAIWTKDGKAITQGGKYKLSEDKGGFFLEIHKTDTSDSGLYTCTVKNSAGSVSSSCKLTIKAIKDTEAQKVSTQKTSEITPQKKAVVQEEISQKALRSEEIKMSEAKSQEKLALKEEASKVLISEEVKKSAATSLEKSIVHEEITKTSQASEEVRTHAEIKAFSTQMSINEGQRLVLKANIAGATDVKWVLNGVELTNSEEYRYGVSGSDQTLTIKQASHRDEGILTCISKTKEGIVKCQYDLTLSKELSDAPAFISQPRSQNINEGQNVLFTCEISGEPSPEIEWFKNNLPISISSNVSISRSRNVYSLEIRNASVSDSGKYTIKAKNFRGQCSATASLMVLPLVEEPSREVVLRTSGDTSLQGSFSSQSVQMSASKQEASFSSFSSSSASSMTEMKFASMSAQSMSSMQESFVEMSSSSFMGISNMTQLESSTSKMLKAGIRGIPPKIEALPSDISIDEGKVLTVACAFTGEPTPEVTWSCGGRKIHSQEQGRFHIENTDDLTTLIIMDVQKQDGGLYTLSLGNEFGSDSATVNIHIRSI

SEQ ID NO: 66540 - protein, 131 aa, Homo sapiens
MDVGFTMSNSIPGIESPFEQAKKVITMFVQRQVFAENKDEIALVLFGTDGTDNPLSGGDQYQNITVHRHLMLPDFDLLEDIESKIQPGSQQADFLDALIVSMDVIQHETIGKKFEKRHIEIFTDLSSRFSK

SEQ ID NO: 66541 - protein, 1526 aa, Homo sapiens
YIRVSYDTKPDSLLHLMVKDWQLELPKLLISVHGGLQNFEMQPKLKQVFGKGLIKAAMTTGAWIFTGGVSTGVISHVGDALKDHSSKSRGRVCAIGIAPWGIVENKEDLVGKDVTRVYQTMSNPLSKLSVLNNSHTHFILADNGTLGKYGAEVKLRRLLEKHISLQKINTRLGQGVPLVGLVVEGGPNVVSIVLEYLQEEPPIPVVICDGSGRASDILSFAHKIINESLREQLLVTIQKTFNYNKAQSHQLFAIIMECMKKKELVTVFRMGSEGQQDIEMAILTALLKGTNVSAPDQLSLALAWNRVDIARSQIFVFGPHWPPLGSLAPPTDSKATEKEKKPPMATTKGGRGKGKGKKKGKVKEEVEEETDPRKIELLNWVNALEQAMLDALVLDRVDFVKLLIENGVNMQHFLTIPRLEELYNTRLGPPNTLHLLVRDVKKSNLPPDYHISLIDIGLVLEYLMGGAYRCNYTRKNFRTLYNNLFGPKRPKALKLLGMEDDEPPAKGKKKKKKKKEEEIDIDVDDPAVSRFQYPFHELMVWAVLMKRQKMAVFLWQRGEESMAKALVACKLYKAMAHESSESDLVDDISQDLDNNSKDFGQLALELLDQSYKHDEQIAMKLLTYELKNWSNSTCLKLAVAAKHRDFIAHTCSQMLLTDMWMGRLRMRKNPGLKVIMGILLPPTILFLEFRTYDDFSYQTSKENEDGKEKEEENTDANADAGSRKGDEENEHKKQRSIPIGTKICEFYNAPIVKFWFYTISYLGYLLLFNYVILVRMDGWPSLQEWIVISYIVSLALEKIREILMSEPGKLSQKIKVWLQEYWNITDLVAISTFMIGAILRLQNQPYMGYGRVIYCVDIIFWYIRVLDIFGVNKYLGPYVMMIGKMMIDMLYFVVIMLVVLMSFGVARQAILHPEEKPSWKLARNIFYMPYWMIYGEVFADQIDLYAMEINPPCGENLYDEEGKRLPPCIPGAWLTPALMACYLLVANILLVNLLIAVFNNTFFEVKSISNQVWKFQRYQLIMTFHDRPVLPPPMIILSHIYIIIMRLSGRCRKKREGDQEERDRGLKLFLSDEELKRLHEFEEQCVQEHFREKEDEQQSSSDERIRVTSERVENMSMRLEEINERETFMKTSLQTVDLRLAQLEELSNRMVNALENLAGIDRSDLIQARSRASSECEATYLLRQSSINSADGYSLYRYHFNGEELLFEDTSLSTSPGTGVRKKTCSFRIKEEKDVKTHLVPECQNSLHLSLGTSTSATPDGSHLAVDDLKNAEESKLGPDIGISKEDDERQTDSKKEETISPSLNKTDVIHGQDKSDVQNTQLTVETTNIEGTISYPLEETKITRYFPDETINACKTMKSRSFVYSRGRKLVGGVNQDVEYSSITDQQLTTEWQCQVQKITRSHSTDIPYIVSEAAVQAEHKEQFADMQDEHHVAEAIPRIPRLSLTITDRNGMENLLSVKPDQTLGFPSLRSKSLHGHPRNVKSIQGKLDRSGHASSVSSLVIVSGMTAEEKKVKKEKASTETEC

SEQ ID NO: 66542 - protein, 205 aa, Homo sapiens
MDTGLSSQPSEEDQSTMPEVKDLSEALPETSMDPITGVGVVASRNRAPTGYDVVAQTADGVDADLWKDGLFKSKVTRYLCFTRSFSKENSHLGNVLVDMKLIDIKDTLPVGFIPIQETVDTQEVAFRKKRLCIKFIPRDSTEAAICDIRIMGRTKQAPPQYTFIGELNSMGIWYRMGRVPRNHDSSQPTTPSQSSAASTPAPNLP

SEQ ID NO: 66543 - protein, 792 aa, Homo sapiens
MVACRAIGILSRFSAFRILRSRGYICRNFTGSSALLTRTHINYGVKGDVAVVRINSPNSKVNTLSKELHSEFSEVMNEIWASDQIRSAVLISSKPGCFIAGADINMLAACKTLQEVTQLSQEAQRIVEKLEKSTKPIVAAINGSCLGGGLEVAISCQYRIATKDRKTVLGTPEVLLGALPGAGGTQRLPKMVGVPAALDMMLTGRSIRADRAKKMGLVDQLVEPLGPGLKPPEERTIEYLEEVAITFAKGLADKKISPKRDKGLVEKLTAYAMTIPFVRQQVYKKVEEKVRKQTKGLYPAPLKIIDVVKTGIEQGSDAGYLCESQKFGELVMTKESKALMGLYHGQVLCKKNKFGAPQKDVKHLAILGAGLMGAGIAQVSVDKGLKTILKDATLTALDRGQQQVFKGLNDKVKKKALTSFERDSIFSNLTGQLDYQGFEKADMVIEAVFEDLSLKHRVLKEVEAVIPDHCIFASNTSALPISEIAAVSKRPEKVIGMHYFSPVDKMQLLEIITTEKTSKDTSASAVAVGLKQGKVIIVVKDGPGFYTTRCLAPMMSEVIRILQEGVDPKKLDSLTTSFGFPVGAATLVDEVGVDVAKHVAEDLGKVFGERFGGGNPELLTQMVSKGFLGRKSGKGFYIYQEGVKRKDLNSDMDSILASLKLPPKSEVSSDEDIQFRLVTRFVNEAVMCLQEGILATPAEGDIGAVFGLGFPPCLGGWSRRLGRKLTLAWSPCCVSFNEVLFLYSGPFRFVDLYGAQKIVDRLKKYEAAYGKQFTPCQLLADHANSPNKKFYQ

SEQ ID NO: 66544 - protein, 40 aa, Homo sapiens
MLALRLLNVVAPAYFLCISLVTFVLQLFLFLPSMREDPAA

SEQ ID NO: 66545 - protein, 148 aa, Homo sapiens
MKRSLQALYCQLLSFLLILALTEALAFAIQEPSPRESLQVLPSGTPPGTMVTAPHSSTRHTSVVMLTPNPDGPPSQAAAPMATPTPRAEGHPPTHTISTIAATVTAPHSESSLSTGPAPAAMATTSSKPEGRPRGQAAPTILLTKPPG

SEQ ID NO: 66546 - protein, 963 aa, Homo sapiens
  MOD_RES (1)..(1): Any amino acid
XPQEKLCKNPCAMFAAGEIKTPTGEGLLDSPSKTMSIKERLALLKKSGEEDWRNRLSRRQEGGKAPASSLHTQEAGRSLIKKEEGGVADDSAISNLLWRVTESRESQMTIEERKQLITVREEAWKTRGRGAANDSTQFTVAGRMVKKGLASPTAITPVASPICGKTRGTTPVSKPLEDIEARPDMQLESDLKLDRLETFLRRLNNKVGGMHETVLTVTGKSVKEVMKPDDDETFAKFYRSVDYNMPRSPVEMDEDFDVIFDPYAPKLTSSVAEHKRAVRPKRRVQASKNPLKMLAAREDLLQEYTEQRLNVAFMESKRMKVEKMSSNSNFSEVTLAGLASKENFSNVSLRSVNLTEQNSNNSAVPYKRLMLLQIKGRRHVQTRLVEPRASALNSGDCFLLLSPHCCFLWVGEFANVIEKAKASELATLIQTKRELGCRATYIQTIEEGINTHTHAAKDFWKLLGGQTSYQSAGDPKEDELYEAAIIETNCIYRLMDDKLVPDDDYWGKIPKCSLLQPKEVLVFDFGSEVYVWHGKEVTLAQRKIAFQLAKHLWNGTFDYENCDINPLDPGECNPLIPRKGQGRPDWAIFGRLTEHNETILFKEKFLDWTELKRSNEKNPGELAQHKEDPRTDVKAYDVTRMVSMPQTTAGTILDGVNVGRGYGLVEGHDRRQFEITSVSVDVWHILEFDYSRLPKQSIGQFHEGDAYVVKWKFMVSTAVGSRQKGEHSVRAAGKEKCVYFFWQGRHSTVSEKGTSALMTVELDEERGAQVQVLQGKEPPCFLQCFQGGMVVHSGRREEEEENVQSEWRLYCVRGEVPVEGNLLEVACHCSSLRSRTSMVVLNVNKALIYLWHGCKAQAHTKEVGRTAANKIKEQCPLEAGLHSSSKVTIHECDEGSEPLGFWDALGRRDRKAYDCMLQDPGSFNFAPRLFILSSSSGDFAATEFVYPARAPSVVSSMPFLQED

SEQ ID NO: 66547 - protein, 875 aa, Homo sapiens
MPVRKQDTQRALHLLEEYRSKLSQTEDRQLRSSIERVINIFQSNLFQALIDIQEFYEVTLLDNPKCIDRSKPSEPIQPVNTWEISSLPSSTVTSETLPSSLSPSVEKYRYQDEDTPPQEHISPQITNEVIGPELVHVSEKNLSEIENVHGFVSHSHISPIKVNGTDADYEYEEITLERGNSGLGFSIAGGTDNPHIGDDSSIFITKIITGGAAAQDGRLRVNDCILRVNEVDVRDVTHSKAVEALKEAGSIVRLYVKRRKPVSEKIMEIKLIKGPKGLGFSIAGGVGNQHIPGDNSIYVTKIIEGGAAHKDGKLQIGDKLLAVNNVCLEEVTHEEAVTALKNTSDFVYLKVAKPTSMYMNDGYAPPDITNSSSQPVDNHVSPSSFLGQTPASPARYSPVSKAVLGDDEITREPRKVVLHRGSTGLGFNIVGGEDGEGIFISFILAGGPADLSGELRKGDRIISVNSVDLRAASHEQAAAALKNAGQAVTIVAQYRPEEYSRFEAKIHDLREQMMNSSISSGSGSLRTSQKRSLYVRALFDYDKTKDSGLPSQGLNFKFGDILHVINASDDEWWQARQVTPDGESDEVGVIPSKRRVEKKERARLKTVKFNSKTRDKGQSFNDKRKKNLFSRKFPFYKNKDQSEQETSDADQHVTSNASDSESSYRGQEEYVLSYEPVNQQEVNYTRPVIILGPMKDRINDDLISEFPDKFGSCVPHTTRPKRDYEVDGRDYHFVTSREQMEKDIQEHKFIEAGQYNNHLYGTSVQSVREVAEKGKHCILDVSGNAIKRLQIAQLYPISIFIKPKSMENIMEMNKRLTEEQARKTFERAMKLEQEFTEHFTAIVQGDTLEDIYNQVKQIIEEQSGSYIWVPAKEKL

SEQ ID NO: 66548 - protein, 165 aa, Homo sapiens
MYGKIAVMELFRPKGESKDLLFILTAKYNACILEYKQSGESIDIITRAHGNVQDRIGRPSETGIIGIIDPECRMIGLRLYDGLFKVIPLDRDNKELKAFNIRLEELHVIDVKFLYGCQAPTICFVYQDPQGRHVKTYEVSLREKEFNKGPWKQENVEAEASMVIA

SEQ ID NO: 66549 - protein, 52 aa, Homo sapiens
MAGCCAALAAFLFEYDTPRIVLIRSRKVGLMNRAVQLLILAYVIGRKTPSSS

SEQ ID NO: 66550 - protein, 190 aa, Homo sapiens
MTESASSTSGQEFDVFSVMDWKDGVGTLPGSDLKFRVNEFGALEVITDENEMENVKKATATTTWMVPTAQEAPTSPPSSRPVFPPAYWTSPPGCPTVFSEKTGMPFRLKDPVKVEGLQFCENCCQYGNVDECLSGGNYCSQNCARHIKDKDQKEERDVEEDNEEEDPKCSRKKKPKLSLKADTKEDGEER

SEQ ID NO: 66551 - protein, 228 aa, Homo sapiens
  MOD_RES (1)..(1): Any amino acid
XSLQKPWFYDMKKVWEGYPIQSTIPSQYWYYMIELSFYWSLLFSIASDVKRKDFKEQIIHHVATIILISFSWFANYIRAGTLIMALHDSSDYLLESAKMFNYAGWKNTCNNIFIVFAIVFIITRLVILPFWILHCTLVYPLELYPAFFGYYFFNSMMGVLQLLHIFWAYLILRMAHKFITGKLVEDERSDREETESSEGEEAAAGGGAKSRPLANGHPILNNNHRKND

SEQ ID NO: 66552 - protein, 115 aa, Homo sapiens
MEVIHGRPYCCRELEGADILSNTFYSNELHNPLQTVTRPTASEDRYQELRESLQQCRLPWGAEREYGGIIPISLPEDHRPKYEPPRVMGKGHQHYGFGGETWPRKLPVEQFYYLT

SEQ ID NO: 66553 - protein, 222 aa, Homo sapiens
MVISFYYGGKLVGQATTTCPEGCRLSLSQPGLPGTKLYGPEGLELVRFPPADAIPSERQRQVTRKLFGHLERGVLLHSSRQGVFVKRLCQGRVFCSGNAVVCKGRPNKLERDEVVQVFDTSQFFRELQQFYNSQGRLPDGRVVLCFGEEFPDMAPLRSKLILVQIEQLYVRQLAEEAGKSCGAGSVMQAPEEPPPDQVFRMFPDICASHQRSFFRENQQITV

SEQ ID NO: 66554 - protein, 113 aa, Homo sapiens
MKTRSPKPLLTGLMWAQQGTTPGTPKLRHTCEQGDGVGPYGWEFHDGLSFGRQHIQDGALRLTTEFVKRPGGQHGGDWSWRVTVEPQDSVQGIQPPSMAATMSSGPPTQDCPC

SEQ ID NO: 66555 - protein, 86 aa, Homo sapiens
MLLAQINRDSQGMTEFPGGGMEAQHVTLCLTEAVTVADGDNLENMEGVSLQAVTLADGSTAYIQHNSKGSLDVLLNCLRTLREESR

SEQ ID NO: 66556 - protein, 94 aa, Homo sapiens
MFNFDTFWKNFKSKLGFINWDAINKNQVPPPSTRALLYFSRLWEDFKQNTPFLNWKAIIEGADASSLQKRAGRDDQNYNYNQHAYPTAYGGKYS

SEQ ID NO: 66557 - protein, 21 aa, Homo sapiens
MEPDVPLPQTLLSHPSYLKVF

SEQ ID NO: 66558 - protein, 190 aa, Homo sapiens
  MOD_RES (1)..(1): Any amino acid
XPQGVDIRHNKDRKVRRKEPKSQDIYLRLLVKLYRFLARRTNSTFNQVVLKRLFMSRTNRPPLSLSRMIRKMKLPGRENKTAVVVGTITDDVRVQEVPKLKVCALRVTSRARSRILRAGGKILTFDQLALDSPKGCGTVLLSGPRKGREVYRHFGKAPGTPHSHTKPYVRSKGRKFERARGRRASRGYKN

SEQ ID NO: 66559 - protein, 169 aa, Homo sapiens
MAANWTLSWGQGGPCNSPGSDTPRSVASPETQLGNHDRNPETWHMNFRMFSCPEESDPIQALRKLTELCHLWLRPDLHTKEQILDMLVMEQFMISMPQELQVLVKVNGVQSCKDLEDLLRNNRRPKKWSIVNLLGKEYLMLNSDVEMAEAPASVRDDPRDVSSQWASSV

SEQ ID NO: 66560 - protein, 114 aa, Homo sapiens
MDSFDLALLQEWDLESLCVYEPDRNALRRKERERRNQETQQDDGTFNSSYSLFSEPYKTNKGDELSNRIQNTLGNYDEMKDFLTDRSNQSHLVGVPKPGVPQTPVNKIDEHFVA

SEQ ID NO: 66561 - protein, 97 aa, Homo sapiens
MEALIPVINKLQDVFNTVGADIIQLPQIVVVGTQSSGKSSVLESLVGRDLLPRGTGIVTRRPLILQLVHVSQEDKRKTTGEENVPRENSLDPGGKSP

SEQ ID NO: 66562 - protein, 15 aa, Homo sapiens
  MOD_RES (1)..(1): Any amino acid
XEQETKDAAEECKEP

SEQ ID NO: 66563 - protein, 439 aa, Homo sapiens
MPDVVQTRQQAFREKLAQQQASAAAAAAAATAAATAATTTSAGVSHQNPSKNREATVNGEENRAHSVNNHAKPMEIDGEVEIPSSKATVLRGHESEVFICAWNPVSDLLASGSGDSTARIWNLNENSNGGSTQLVLRHCIREGGHDVPSNKDVTSLDWNTNGTLLATGSYDGFARIWTEDGNLASTLGQHKGPIFALKWNRKGNYILSAGVDKTTIIWDAHTGEAKQQFPFHSAPALDVDWQNNTTFASCSTDMCIHVCRLGCDRPVKTFQGHTNEVNAIKWDPSGMLLASCSDDMTLKIWSMKQEVCIHDLQAHNKEIYTIKWSPTGPATSNPNSNIMLASASFDSTVRLWDIERGVCTHTLTKHQEPVYSVAFSPDGKYLASGSFDKCVHIWNTQSGNLVHSYRGTGGIFEVCWNARGDKVGASASDGSVCVLDLRK

SEQ ID NO: 66564 - protein, 69 aa, Homo sapiens
GCAVCSKRDFMLITNKSLKEEDGEEIVTYDRKSRRKDPRGLQFLQVQPPCTKCLDASRPWLCYWILHSL

SEQ ID NO: 66565 - protein, 232 aa, Homo sapiens
MKATWIRLLKRAKGGRLKNSDICGSADSYTSRPSDSDVSLEEDREAVRREAERQAQAQLEKAKTKPVAFAVRTNVSYSAAHEDDVPVPGMAISFEAKDFLHVKEKFNNDWWIGRLVKEGCEIGFIPSPVKLENMRLQHEQRAKQGKFYSSKSGGNSSSSLGDIVPSSRKSTPPSSAIDIDATGLDAEENDIPANHRSPKPSANSVTSPHSKEKRMPFFKKLSRSRNRCKICR

SEQ ID NO: 66566 - protein, 163 aa, Homo sapiens
MGCTASIVLLQAFRSVVQRSCPHICRRRQEEPSHEILPLESDDEMNRPRTLIIMQEKPRLLEPLDYETVIEELEKTYRNDPLQDLLFFPSDDFSAATVSWDIRTLYSTVPEDAEHKAENLLVKEACKFYSSQWHVVNYKYEQYSGDIRQLPRIQTREASFTFL

SEQ ID NO: 66567 - protein, 153 aa, Homo sapiens
MSQLSLSWLGLWPVAASPWLLLLLVGASWLLAHVLAWTYAFYDNCRRLRCFPQPPRRNWFWGHQGMVNPTEEGMRVLTQLVATYPQGFKVWMGPISPLLSLCHPDIIRSVINASAAIAPKDKFFYSFLEPWLGDGLLLSAGDKWSRHRRMLTP

SEQ ID NO: 66568 - protein, 97 aa, Homo sapiens
VKEITRDIKQLDHAKRHLTTSITTLNHLHMLAGGVDSLEAMTRRRQYGEVANLLQGVMNVLEHFHKYMGIPQIRQLSERDQEDPAMFYEMHVWLLIF

SEQ ID NO: 66569 - protein, 12 aa, Homo sapiens
MPQEELHMKECP

SEQ ID NO: 66570 - protein, 152 aa, Homo sapiens
MPLEQRSQHCKPEEGLEARGEALGLVGAQAPATEEQQTASSSSTLVEVTLGEVPAADSPSPPHSPQGASSFSTTINYTLWRQSDEGSSNQEEEGPRMFPDLESEFQAAISRKMVELVHFLLLKYRAREPVTKAEMLESVLRNCQDFFPVIFS

SEQ ID NO: 66571 - protein, 152 aa, Homo sapiens
MEEYHRHCDEVGFNAEEAHNIVKECVDGVLGGEDYNHNNINQWTASIVEQSLTHLVKLGKAYKYIVTCAVVQKSAYGFHTASSCFWDTTSDGTCTVRWENRTMNCGVLLCRPGWSAVMQFRLTATSASQVQVILLPQPPEYLELQAHAITPG

SEQ ID NO: 66572 - protein, 66 aa, Homo sapiens
MSNSRPRSRRDAGGGAGAAGRDELVSRSLQSAEHCLGVQDFGTAYAHYLLVLSLAPELKHDVKNGL

SEQ ID NO: 66573 - protein, 43 aa, Homo sapiens
  MOD_RES (1)..(1): Any amino acid
XSEWRERAEWLCGRVSETGSACSMADQLTEEQIAETSPKDFLF

SEQ ID NO: 66574 - protein, 757 aa, Homo sapiens
MPINGVNLAWKYRYQDEDTPPLEHSPAHLPNQVNAPELVHVAERNLSHLEAGHGVVGHAHLSPFKANSPPVIVNTDTLEAPGYELQVNGTEGEMEYEEITLERGNSGLGFSIAGGTDNPHIGDDPSIFITKIIPGGAAAQDGRLRVNDSILFVNEVDVREVTHSAAVEALKEAGSIVRLYVMRRKPPAEKVMEIKLIKGPKGLGFSIAGGVGNQHIPGDNSIYVTKIIEGGAAHKDGRLQIGDKILAVNSVGLEDVMHEDAVAALKNTYDVVYLKVAKPSNAYLSDSYAPPDITTSYSQHLDNEISHSSYLGTDYPTAMTPTSPRRYSPVAKDLLGEEDIPREPRRIVIHRGSTGLGFNIVGGEDGEGIFISFILAGGPADLSGELRKGDQILSVNGVDLRNASHEQAAIALKNAGQTVTIIAQYKPEEYSRFEAKIHDLREQLMNSSLGSGTASLRSNPKRGFYIRALFDYDKTKDCGFLSQALSFRFGDVLHVIDASDEEWWQARRVHSDSETDDIGFIPSKRRVERREWSRLKAKDWGSSSGSQGREDSVLSYETVTQMEVHYARPIIILGPTKDRANDDLLSEFPDKFGSCVPHTTRPKREYEIDGRDYHFVSSREKMEKDIQAHKFIEAGQYNSHLYGTSVQSVREVAEQGKHCILDVSANAVRRLQAAHLHPIAIFIRPRSLENVLEINKRITEEQARKAFDRATKLEQEFTECFSAIVEGDSFEEIYHKVKRVIEDLSGPYIWVPARERL

SEQ ID NO: 66575 - protein, 849 aa, Homo sapiens
MTKTYNDIDAVTRLLEEKERDLELAARIGQSLLKKNKTLTERNELLEEQVEHIREEVSQLRHELSMKDELLQFYTSAAEESEPESVCSTPLKRNESSSSVQNYFHLDSLQKKLKDLEEENVVLRSEASQLKTETITYEEKEQQLVNDCVKELRDANVQIASISEELAKKTEDAARQQEEITHLLSQIVDLQKKAKACAVENEELVQHLGAAKDAQRQLTAELRELEDKYAECMEMLHEAQEELKNLRNKTMPNTTSRRYHSLGLFPMDSLAAEIEGTMRKELQLEEAESPDITHQKRVFETVRNINQVVKQRSLTPSPMNIPGSNQSSAMNSLLSSCVSTPRSSFYGSDIGNVVLDNKTNSIILETEAADLGNDERSKKPGTPGTPGSHDLETALRRLSLRRENYLSERRFFEEEQERKLQELAEKGELRSGSLTPTESIMSLGTHSRFSEFTGFSGMSFSSRSYLPEKLQIVKPLEGSATLHHWQQLAQPHLGGILDPRPGVVTKGFRTLDVDLDEVYCLNDFEEDDTGDHISLPRLATSTPVQHPETSAHHPGKCMSQTNSTFTFTTCRILHPSDELTRVTPSLNSAPTPACGSTSHLKSTPVATPCTPRRLSLAESFTNTRESTTTMSTSLGLVWLLKERGISAAVYDPQSWDRAGRGSLLHSYTPKMAVIPSTPPNSPMQTPTSSPPSFEFKCTSPPYDNFLASKPASSILREVREKNVRSSESQTDVSVSNLNLVDKVRRFGVAKVVNSGRAHVPTLTEEQGPLLCGPPGPAPALVPRGLVPEGLPLRCPTVTSAIGGLQLNSGIRRNRSFPTMVGSSMQMKAPVTLTSGILMGAKLSKQTSLR

SEQ ID NO: 66576 - protein, 114 aa, Homo sapiens
MELIPTITSWRVLILVVALTQFCGFLCRGFHLQNHELWLLIKREFGFYSKSQYRTWQKKLAEDSTWPPINRTDYSGDGKNGFYINGGYESHEQIPKRKLKLGGQPTEQHFWARL

SEQ ID NO: 66577 - protein, 86 aa, Homo sapiens
MSSNKEQRSAVFVILFALITILILYSSNSANEVFHYGSLRGRSRRPVNLKKWSITDGYVPILGNKGEVSFVVEHRLVYHGDRGGVV

SEQ ID NO: 66578 - protein, 27 aa, Homo sapiens
MLVGSQSFSPGGPNGIIRSQSFAGFSG

SEQ ID NO: 66579 - protein, 218 aa, Homo sapiens
MSKEERPGREEILECQVMWEPDSKKNTQMDRFRAAVGAACGLALESYDDLYHWSVESYSDFWAEFWKFSGIVFSRVYDEVVDTSKGIADVPEWFKGSRLNYAENLLRHKENDRVALYIANQHKKPNHWKQAVSGPAQATEQGLPSAIVGRTSSPCAVGKDHGSPVPTETYWDTSSGAGAQASMYFQSPWALLMHIPGEEPWSNVSTYHMGLGKAKRKL

SEQ ID NO: 66580 - protein, 277 aa, Homo sapiens
MADHNPDSDSTPRTLLRRVLDTADPRTPRRPRSARAGARRALLETASPRKLSGQTRTIARGRSHGARSVGRSAHIQASGHLEEQTPRTLLKNILLTAPESSILMPESVVKPVPAPQAVQPSRQESSCGRSLNLTFATPLQPQSVQRPGLARRPPARRAVDVGAFLRDLRDTSLAPPNIVLEDTQPFSQPMVGSPNVYHSLPCTPHTGAEDAEQAAGRKTQSSGPGLQKNSPGKPAQFLAGEAEEVNAFALGFLSTSSGVSGEDEVEPLHDGVEEAEK

SEQ ID NO: 66581 - protein, 716 aa, Homo sapiens
SNSASEEESGKPFQCPICGLVIKRKSYWKRHMVIHTGLKSHQCPLCPFRCARKDNLKSHMKVHQHQDRGETFQCQLCPFTSSRHFSLKLHMRCHQHFLRTEAKVKEEIPDPDVKGSPHLSDSACLGQQREGGGTELVGTMMTSNTPERTSQGGAGVSPLLVKEEPKEDNGLPTSFTLNAADRPANHTKLKDPSEYVANSASALFSQDISVKMASDFLMKLSAANQKEPMNLNFKVKEEPKEGESLSTTLPRSSYVFSPESEVSAPGVSEDALKPQEGKGSVLRRDVSVKAASELLMKLSAESYKETQMVKIKEEPMEVDIQDSHVSISPSRNVGYSTLIGREKTEPLQKMPEGRVPPERNLFSQDISVKMASELLFQLSEKVSKEHNHTKENTIRTTTSPFFSEDTFRQSPFTSNSKELLPSDSVLHGRISAPETEKIVLEAGNGLPSWKFNDQLFPCDVCGKVFGRQQTLSRHLSLHTEERKYKCHLCPYAAKCRANLNQHLTVHSVKLVSTDTEDIVSAVTSEGSDGKKHPYYYSCHVCGFETELNVQFVSHMSLHVDKEQWMFSICCTACDFVTMEEAEIKTHIGTKHTGEDRKTPSESNSPSSSSLSALSDSANSKDDSDGSQKNKGGNNLLVISVMPGSQPSLNSEEKPEKGFECVFCNFVCKTKNMFERHLQIHLITRMFECDVCHKFMKTPEQLLEHKKCHTVPTGGLK

SEQ ID NO: 66582 - protein, 1175 aa, Homo sapiens
MVQVEFYVNENTFKERLKLFFIKNQRSSLRIRLFNFSLKLLTCLLYIVRVLLDDPALGIGCWGCPKQNYSFNDSSSEINWAPILWVERKMTLWAIQVIVAIISFLETMLLIYLSYKGNIWEQIFRVSFVLEMINTLPFIITIFWPPLRNLFIPVFLNCWLAKHALENMINDFHRAILRTQSAMFNQVLILFCTLLCLVFTGGCRTCGIQHLERAGENLSLLTSFYFCIVTFSTVGYGDVTPKIWPSQLLVVIMICVALVVLPLQFEELVYLWMERQKSGGNYSRHRAQTEKHVVLCVSSLKIDLLMDFLNEFYAHPRLQDYYVVILCPTEMDVQVRRVLQIPLWSQRVIYLQGSALKDQDLMRAKMDNGEACFILSSRNEVDRTAADHQTILRAWAVKDFAPNCPLYVQILKPENKFHVKFADHVVCEEECKYAMLALNCICPATSTLITLLVHTSRGQEGQESPEQWQRMYGRCSGNEVYHIRMGDSKFFREYEGKSFTYAAFHAHKKYGVCLIGLKREDNKSILLNPGPRHILAASDTCFYINITKEENSAFIFKQEEKRKKRAFSGQGLHEGPARLPVHSIIASMGTVAMDLQGTEHRPTQSGGGGGGSKLALPTENGSGSRRPSIAPVLELADSSALLPCDLLSDQSEDEVTPSDDEGLSVVEYVKGYPPNSPYIGSSPTLCHLLPVKAPFCCLRLDKGCKHNSYEDAKAYGFKNKLIIVSAETAGNGLYNFIVPLRAYYRSRKELNPIVLLLDNKPDHHFLEAICCFPMVYYMEGSVDNLDSLLQCGIIYADNLVVVDKESTMSAEEDYMADAKTIVNVQTMFRLFPSLSITTELTHPSNMRFMQFRAKDSYSLALSKLEKRERENGSNLAFMFRLPFAAGRVFSISMLDTLLYQSFVKDYMITITRLLLGLDTTPGSGYLCAMKITEGDLWIRTYGRLFQKLCSSSAEIPIGIYRTESHVFSTSEPHDLRAQSQISVNVEDCEDTREVKGPWGSRAGTGGSSQGRHTGGGDPAEHPLLRRKSLQWARRLSRKAPKQAGRAAAAEWISQQRLSLYRRSERQELSELVKNRMKHLGLPTTGYEDVANLTASDVMNRVNLGYLQDEMNDHQNTLSYVLINPPPDTRLEPSDIVYLIRSDPLAHVASSSQSRKSSCSHKLSSCNPETRDETQL

SEQ ID NO: 66583 - protein, 145 aa, Homo sapiens
ECKKQLINTLCSGRWDQQYVIQLTSMFKDVPLTAEEVEFVVEKALSMFSKMNLQEIPPLVYQLLVLSSKGSRKSVLEGIIAFFSALDKQHNEEQSGDELLDVVTVPSGELRHVEGTIILHIVFAIKLDYELGRELVKHLKVASNL

SEQ ID NO: 66584 - protein, 162 aa, Homo sapiens
MLGCAEEGHASLGRDPDWASYTLGVFICLSCSGIHRNIPQVSKVKSVRLDAWEEAQVEFMASHGNDAARARFESKVPSFYYRPTPSDCQLLREQWIRAKYERQEFIYPEKQEPYSAGYREGFLWKRGRDNGQFLSRKFVLTEREGALKYFNRNDAKEPKAVM

SEQ ID NO: 66585 - protein, 227 aa, Homo sapiens
  MOD_RES (1)..(1): Any amino acid
XDGAAVDSADRSPRPTSAPAITQGQVAEGGVLDASAKKTVVPKAQKETVKAEVKKEDEPPEQAEPEPTEAWKVEKTHIEVTVPTSNGDQTQKLAEKTEDLIRMRKKKRERLDGENIYIRHSNLMLEDLDKSQEEIKKHHASISELKKNFMESVPEPRPSEWDKRLSTHSPFRTLNINGQIPTGEGSPSYFLPDTYHLGVCKEPVLNFQTDQRRLAQLRELRAKFFLS

SEQ ID NO: 66586 - protein, 881 aa, Homo sapiens
MCLVKSWFLSIRSRWYHGKLDRTIAEERLRQAGKSGSYLIRESDRRPGSFVLSFLSQMNVVNHFRIIAMCGDYYIGGRRFSSLSDLIGYYSHVSCLLKGEKLLYPVAPPEPVEDRRRVRAILPYTKVPDTDEISFLKGDMFIVHNELEDGWMWVTNLRTDEQGLIVEDLVEEVGREEDPHEGKIWFHGKISKQEAYNLLMTVGQVCSFLVRPSDNTPGDYSLYFRTNENIQRFKICPTPNNQFMMGGRYYNSIGDIIDHYRKEQIVEGYYLKEPVPMQDQEQVLNDTVDGKEIYNTIRRKTKDAFYKNIVKKGYLLKKGKGKRWKNLYFILEGSDAQLIYFESEKRATKPKGLIDLSVCSVYVVHDSLFGRPNCFQIVVQHFSEEHYIFYFAGETPEQAEDWMKGLQAFCNLRKSSPGTSNKRLRQVSSLVLHIEEAHKLPVKHFTNPYCNIYLNSVQVAKTHAREGQNPVWSEEFVFDDLPPDINRFEITLSNKTKKSKDPDILFMRCQLSRLQKGHATDEWFLLSSHIPLKGIEPGSLRVRARYSMEKIMPEEEYSEFKELILQKELHVVYALSHVCGQDRTLLASILLRIFLHEKLESLLLCTLNDREISMEDEATTLFRATTLASTLMEQYMKATATQFVHHALKDSILKIMESKQSCELSPSKLEKNEDVNTNLTHLLNILSELVEKIFMASEILPPTLRYIYGCLQKSVQHKWPTNTTMRTRVVSGFVFLRLICPAILNPRMFNIISDSPSPIAARTLILVAKSVQNLANLVEFGAKEPYMEGVNPFIKSNKHRMIMFLDELGNVPELPDTTEHSRTDLSRDLAALHEICVAHSDELRTLSNERGAQQHVLKKLLAITELLQQKQNQYTKTNDVR

SEQ ID NO: 66587 - protein, 170 aa, Homo sapiens [sequence omitted]

SEQ ID NO: 66588 - protein, 148 aa, Homo sapiens
EEDGPSSCSEDDYSELLQEITDNLTKKEIQIEKIHLDTSSFVEELPGEKDLAHVVEIYDFEPALKTEDLLATFSEFQEKGFRIQWVDDTHALGIFPCLASAAEALTREFSVLKIRPLTQGTKQSKLKALQRPKTMVRDFRHEFSMTSK

SEQ ID NO: 66589 - protein, 207 aa, Homo sapiens
  MOD_RES (1)..(1): Any amino acid
XKAHHSSQEMSSEYREYADSFGKCPGGRNPWTGVSQFLQTSQKIIQFASGKEPQPGETVIYVAGAFDLFHIGHVDFLEKVHRLAERPYIIAGLHFDQYVSEVVIGAPYAVTAELLSHFKVDLVCHGKTEIIPDRDGSDPYQEPKRRGIFRQIDSGSNLTTDLIVQRIITNRLEYEARNQKKEAKELAFLEAARQQAAQPLGERDGDF

SEQ ID NO: 66590 - protein, 82 aa, Homo sapiens
MPSQNYDLPQKKQEKMTKFQGGTATARSYPEEAVPRCHGGELQEPGCSGASSLPTRYGIPIGSRRKALDDGNRNPKKQQASK

SEQ ID NO: 66591 - protein, 83 aa, Homo sapiens
NFLDDKQWLTTISQYDKEVGQWNKFRDDDYFRTWSPGKPFDQALDPAKDPCLKMKCSRHKVCIAQDSQTAVCISHRRLTHSAN

SEQ ID NO: 66592 - protein, 90 aa, Homo sapiens
MLLFPQVAVKTEPMSSSETASTTADGSLNNFSGSAIGSSSFSPRPTHQFSPPQIYPSNRPYPHILPTPSSQTMAAYGQTQFTTGMQQATA

SEQ ID NO: 66593 - protein, 881 aa, Homo sapiens
MKIPNIGNVMNKFEILGVVGEGAYGVVLKCRHKETHEIVAIKKFKDSEENEEVKETTLRELKMLRTLKQENIVELKEAFRRRGKLYLVFEYVEKNMLELLEEMPNGVPPEKVKSYIYQLIKAIHWCHKNDIVHRDIKPENLLISHNDVLKLCDFGFARNLSEGNNANYTEYVATRWYRSPELLLGAPYGKSVDMWSVGCILGELSDGQPLFPGESEIDQLFTIQKVLGPLPSEQMKLFYSNPRFHGLRFPAVNHPQSLERRYLGILNSVLLDLMKNLLKLDPADRYLTEQCLNHPTFQTQRLLDRSPSRSAKRKPYHVESSTLSNRNQAGKSTALQSHHRSNSKDIQNLSVGLPRADEGLPANESFLNGNLAGASLSPLHTKTYQASSQPGSTSKDLTNNNIPHLLSPKEAKSKTEFDFNIDPKPSEGPGTKYLKSNSRSQQNRHSFMESSQSKAGTLQPNEKQSRHSYIDTIPQSSRSPSYRTKAKSHGALSDSKSVSNLSEARAQIAEPSTSRYFPSSCLDLNSPTSPTPTRHSDTRTLLSPSGRNNRNEGTLDSRRTTTRHSKTMEELKLPEHMDSSHSHSLSAPHESFSYGLGYTSPFSSQQRPHRHSMYVTRDKVRAKGLDGSLSIGQGMAARANSLQLLSPQPGEQLPPEMTVARSSVKETSREGTSSFHTRQKSEGGVYHDPHSDDGTAPKENRHLYNDPVPRRVGSFYRVPSPRPDNSFHENNVSTRVSSLPSESSSGTNHSKRQPAFDPWKSPENISHSEQLKEKEKQGFFRSMKKKKKKSQTVPNSDSPDLLTLQKSIHSASTPSSRPKEWRPEKISDLQTQGLTQSLRLECSGKIMAHCSLDLLGSSHSPISASRVTGTTGTRHHTWPVF

SEQ ID NO: 66594 - protein, 172 aa, Homo sapiens
MLLTQSLFGGLFPRTRETMRRYKVSLFYLGCSRTPNVKLSSCLGLPCCWDYSYKFIQLSEFGFGQVIIVSEEPWKENISCSSTTFIKSTICLSVCFRMYTEDEARKIGVVGWVKNTSKGTVTGQVQGPEDKVNSMKSWLSKVGSPSSRIDRTNFSNEKTISKLEYSNFSIRY

SEQ ID NO: 66595 - protein, 136 aa, Homo sapiens
MWTLVSWVALTAGLVAGTRCPDGQFCPVACCLDPGGASYSCCRPLLDKWPTTLSRHLGGPCQVDAHCSAGHSCIFTVSGTSSCCPFPEAVACGDGHHCCPRGFHCSADGRSCFQRSGNNSVGAIQCPDSQFECPDF

SEQ ID NO: 66596 - protein, 145 aa, Homo sapiens
MNPIALGSRWLAYAENKLIRCHQSRGGACGDNIQSYTATVISAAKTLKSGLTMVGKVVTQLTGTLPSGVTEDDVAIHSNSRRSPLVPGIITVIDTETVGEGQVLVSEDSDSDGIVAHFPAHEKPVCCMAFNTSGMLLVTTDTLGH

SEQ ID NO: 66597 - protein, 204 aa, Homo sapiens
  MOD_RES (1)..(1): Any amino acid
XMLISAEGEGLVLPKKIRVRSAVEQWLVNVEKSMFDVLKKFLSQGIEDWNCQMFSQWVLSHPGQVVLTVSQIMFYNDCVKSFVSSYSREKLEKVHAGLMCHLEEVADLVVLDTSNSRTKAILGALLILYVHCRDIVINLLLKNIFNAEDFEWTRHLQYKWNEKQKLCYVSQGNASFTYGYEYLGCTSRLVITPLTDRCWLTLME

SEQ ID NO: 66598 - protein, 52 aa, Homo sapiens
MCDKEFMWALKNGDLDEVKDYVAKGADKTVKGPDGLTAFEATDNQAIKALLQ

SEQ ID NO: 66599 - protein, 388 aa, Homo sapiens [sequence omitted]

SEQ ID NO: 66600 - protein, 65 aa, Homo sapiens
MSEEVTYATLTFQDSAGARNNRDGNNLRKRGHPAPSPIWRHAALGLVTLCLMLLIGLVTLGMMYI

SEQ ID NO: 66601 - protein, 128 aa, Homo sapiens
  MOD_RES (1)..(1): Any amino acid
XVALQWLDPSEDLTWLEWEELKIPLHGRPIYPNRREREAMILSSYAGILMNSIPIEEVFKIYGADSSADSGTIKVPRVSSLCLSLHPFAMLTAPKAAAYARKQSHLENWNCTMELHNRFSGSRREASS

SEQ ID NO: 66602 - protein, 310 aa, Homo sapiens
  MOD_RES (1)..(1): Any amino acid
XTLEFLTATGVQETFVFCCWKAAQIKEHLLKSKWCRPTSLNVVRIITSELYRSLGDVLRDVDAKALVRSDFLLVYGDVISNINITRALEEHRLRRKLEKNVSVMTMIFKESSPSHPTRCHEDNVVVAVDSTTNRVLHFQKTQGLRRFAFPLSLFQGSSDGVEVRYDLLDCHISICSPQVAQLFTDNFDYQTRDDFVRGLLVNEEILGNQIHMHVTAKEYGARVSNLHMYSAVCADVIRRWVYPLTPEANFTDSTTQSCTHSRHNIYRGPEVSLGHGSILEENVLLGSGTVIGSNCFITNSVIGPGCHIAR

SEQ ID NO: 66603 - protein, 90 aa, Homo sapiens
  MOD_RES (1)..(1): Any amino acid
XNNFMVAMETGGVIGIDFGHAFGSATQFLPVPELMPFRLTRQFINLMLPMKETGLMYSIMVHALRAFRSDPGLLTNTMDVFVKEPSFDWK

SEQ ID NO: 66604 - protein, 158 aa, Homo sapiens
MFVARSIAADHKDLIHDVSFDFHGRRMATCSSDQSVKVWDKSESGDWHCTASWKVKRTTLVDSRTSVTDVKFAPKHMGLMLATCSADGIVRIYEAPDVMNLSQWSLQHEISCKLSCSCISWNPSSSRAHSPMIAVGSDDSSPNAMAKVQIFEYNENTR

SEQ ID NO: 66605 - protein, 66 aa, Homo sapiens
MSPEKQHREEDEVDSVLLSASKILNSSEGVKESGCSDTGPSAAVGIISGFANADFAECQHGTVGNQ

SEQ ID NO: 66606 - protein, 167 aa, Homo sapiens
MVLRMVEAMSQLQDEKTQLQEELVVLQERLALRDSDQQATSTQLQNQVEHLKEKLISQAQEVSRLRSELGGTDLEKHRDLLMVENERLRQEMRRCEAELQELRTKPAGPCPGCEHSQESAQLRDKLSQLQLEMAESKGMLSELNLEVQQKTDRLAEVELRLKDCLAE

SEQ ID NO: 66607 - protein, 22 aa, Homo sapiens
KLRKEIEVSLNYLDFNVLWDHF

SEQ ID NO: 66608 - protein, 529 aa, Homo sapiens
MQQLRRLWVLAAQPFCHLPERCRLFFEIGGISLAMPQCLLWICLAVWEARGDLPFIAENDAVLTVNWNAVKEHRTFYAIYETSVNDPGNMSFVKETVDKLLKGYDIRLRPDFGGPPVCVGMNIDIASIDMVSEVNMDYTLTMYFQQYWRDKRLAYSGIPLNLTLDNRVADQLWVPDTYFLNDKKSFVHGVTVKNRMIRLHPDGTVLYGLRITTTAACMMDLRRYPLDEQNCTLEIESYGYTTDDIEFYWRGGDKAVTGVERIELPQFSIVEHRLVSRNVVFATGAYPRLSLSFRLKRNIGYFILQTYMPSILITILSWVSFWINYDASAARVALGITTVLTMTTINTHLRETLPKIPYVKAIDMYLMGCFVFVFLALLEYAFVNYIFFGRGPQRQKKLAEKTAKAKNDRSKSESNRVDAHGNILLTSLEVHNEMNEVSGGIGDTRNSAISFDNSGIQYRKQSMPREGHGRFLGDRSLPHKKTHLRRRSSQLKIKIPDLTDVNAIDRWSRIVFPFTFSLFNLVYWLYYVN

SEQ ID NO: 66609 - protein, 170 aa, Homo sapiens
MSEEARFCFSPGENSKTMSTELFSSTREEGSSGSGPSFRSNQRKMLNLLLERDTSFTVCPDVPRTPVGKFLGDSANLSILSGGTPKRCLDLSNLSSGEITATQLTTSADLDETGHLDSSGLQEVHLAGMNHDQHLMKCSPAQLLCSTPNGLDRGHRKRDAMCSSSANKEN

SEQ ID NO: 66610 - protein, 392 aa, Homo sapiens
MGESIPLAAPVPVEQAVLETFFSHLGGQSFFSRKDSIRTIYTSLHNELKKVVTGRGALGGTAPHVEELLSHLSEQLCFFVQARMEIADFYEKMYTLSTQKFINAEELVGLLDAIMKKYSSRFHHPILSPLESSFQLEVDVLCHLLKAQAQVSEWKFLPSLVNLHSAHTKLQTWGQIFEKQRETKKHLFGGQSQKAVQPPHLFLWLMKLKNMLLAKFSFYFHEALSRQTTASEMKTLTAKANPDFFGKISSFIRKYDAANVSLIFDNRGSESFQGHGYHHPHSYREAPKGVDQYPAVVSLPSDRPVMHWPNVIMIMTDRTSDLNSLEKVVHFYDDKVQSTYFLTRPEPHFTIVIIFESKKSERDSHFISFLNEVSLALKNPKVFASLKPGAKG

SEQ ID NO: 66611 - protein, 223 aa, Homo sapiens
MATGALLPCSRPCPMSRLDFLKASHFSLGPDLRLHEGTMRTTSHRDFAYPAATREPPSLQPPPALLFPMDPRWDREERVSEAHRAFPPPSTPPWELLQAQARERTLAMQAGNLHLHEDAHAGIGLSNAHAAYGWPELPARTRERIRGARLIFDRDSLPPGDRDKLRIPPTTHQALFPPHDARPQPRAPSCHLGGPNTLKWDYTRQDGTSYQRQFQALPGPPAL

SEQ ID NO: 66612 - protein, 77 aa, Homo sapiens
MRLAGPLRIVVLVVSVGVTWIVVSILLGGPGSGFPRIQQLFTSPESSVTAVTENPSVLGPCGLTSRTQSMEVSPASA

SEQ ID NO: 66613 - protein, 315 aa, Homo sapiens
MLTAACPRPEDNDLYDAITRGLHQTIVDPENPPATAFLTVVPDKAASPRSSPKPQVSFLHAQKSLDVSPRNLSQEESMEAPIRVSPLPEKSSSLLEESFGGPSDIIYADLRRMNQARLGLGTEGSGRHGPVPAGSQAYSPGREAQRRLSDGEQNRPDGLGPVLSGVSPDQGPTESPTSWGCSDAMGSLGATWRQEFPKLSQEAQPCSQGSSADIYEFIGTEGLLQEARDTPDQEGSTYEQIPACWGGPARAPHPGASPTYSPWVHGYKRISGTPELSEPGNTYEQIPATKSKETGRTHKPDKLRRLFFTYRKHKF

SEQ ID NO: 66614 - protein, 116 aa, Homo sapiens
MGIKTALPAAELGLYSLVLSGALAYAGRGLLEASQDGAHRKAFRESVRPGWEYIGRKMDVADFEWVMWFTSFRNVIIFALSGHVLFAKLCTMVAPKSGFVTGTFDLQEVLFHGGSS

SEQ ID NO: 66615 - protein, 165 aa, Homo sapiens
MLTFMASDSEEEVCDERTSLMSAESPTPRSCQEGRQGPEDGENTAQWRSQENEEDGEEDPDRYVCSGVPGRPPGLEEELTLKYGAKHVIMLFVPVTLCMIVVVATIKSVRFYTEKNGQLSRITQGGEPRGAVRAGSISPLPSPSASTRHSLRTHPRWASASSTPC

SEQ ID NO: 66616 - protein, 4590 aa, Homo sapiens
MGRHLALLLLLLLLFQHFGDSDGSQRLEQTPLQFTHLEYNVTVQENSAAKTYVGHPVKMGVYITHPAWEVRYKIVSGDSENLFKAEEYILGDFCFLRIRTKGGNTAILNREVKDHYTLIVKALEKNTNVEARTKVRVQVLDTNDLRPLFSPTSYSVSLPENTAIRTSIARVSATDADIGTNGEFYYSFKDRTDMFAIHPTSGVIVLTGRLDYLETKLYEMEILAADRGMKLYGSSGISSMAKLTVHIEQANECAPVITAVTLSPSELDRDPAYAIVTVDDCDQGANGDIASLSIVAGDLLQQFRTVRSFPGSKEYKVKAIGGIDWDSHPFGYNLTLQAKDKGTPPQFSSVKVIHVTSPQFKAGPVKFEKDVYRAEISEFAPPNTPVVMVKAIPAYSHLRYVFKSTPGKAKFSLNYNTGLISILEPVKRQQAAHFELEVTTSDRKASTKVLVKVLGANSNPPEFTQTAYKAAFDENVPIGTTVMSLSAVDPDEGENGYVTYSIANLNHVPFAIDHFTGAVSTSENLDYELMPRVYTLRIRASDWGLPYRREVEVLATITLNNLNDNTPLFEKINCEGTIPRDLGVGEQITTVSAIDADELQLVQYQIEAGNELDFFSLNPNSGVLSLKRSLMDGLGAKVSFHSLRITATDGENFATPLYINITVAASHKLVNLQCEETGVAKMLAEKLLQANKLHNQGEVEDIFFDSHSVNAHIPQFRSTLPTGIQVKENQPVGSSVIFMNSTDLDTGFNGKLVYAVSGGNEDSCFMIDMETGMLKILSPLDRETTDKYTLNITVYDLGIPQKAAWRLLHVVVVDANDNPPEFLQESYFVEVSEDKEVHSEIIQVEATDKDLGPNGHVTYSIVTDTDTFSIDSVTGVVNIARPLDRELQHEHSLKIEARDQAREEPQLFSTVVVKVSLEDVNDNPPTFIPPNYRVKVREDLPEGTVIMWLEAHDPDLGQSGQVRYSLLDHGEGNFDVDKLSGAVRIVQQLDFEKKQVYNLTVRAKDKGKPVSLSSTCYVEVEVVDVNENLHPPVFSSFVEKGTVKEDAPVGSLVMTVSAHDEDARRDGEIRYSIRDGSGVGVFKIGEETGVIETSDRLDRESTSHYWLTVFATDQGVVPLSSFIEIYIEVEDVNDNAPQTSEPVYYPEIMENSPKDVSVVQIEAFDPDSSSNDKLMYKITSGNPQGFFSIHPKTGLITTTSRKLDREQQDEHILEVTVTDNGSPPKSTIARVIVKILDENDNKPQFLQKFYKIRLPEREKPDRERNARREPLYHVIATDKDEGPNAEISYSIEDGNEHGKFFIEPKTGVVSSKRFSAAGEYDILSIKAVDNGRPQKSSTTRLHIEWISKPKPSLEPISFEESFFTFTVMESDPVAHMIGVISVEPPGIPLWFDITGGNYDSHFDVDKGTGTIIVAKPLDAEQKSNYNLTVEATDGTTTILTQVFIKVIDTNDHRPQFSTSKYEVVIPEDTAPETEILQISAVDQDEKNKLIYTLQSSRDPLSLKKFRLDPATGSLYTSEKLDHEAVPAHLTVMVRDQDVPVKRNFARIVVNVSDTNDHAPWFTASSYKGRVYESAAVGSVVLQVTALDKDKGKNAEVLYSIESGTFGNIGNSFMIDPVLGSIKTAKELDRSNQAEYDLMVKATDKGSPPMSEITSVRIFVTIADNASPKFTSKEYSVELSETVSIGSFVGMVTAHSQSSVVYEIKDGNTGDAFDINPHSGTIITQKALDFETLPIYTLIIQGTNMAGLSTNTTVLVHLQDENDNAPVFMQAEYTGLISESASINSVVLTDRNVPLVIRAADADKDSNALLVYHIVEPSVHTYFAIDSSTGAIHTVLSLDYEETSIFHFTVQVHDMGTPRLFAEYAANVTVHVIDINDCPPVFAKPLYEASLLLPTYKGVKVITVNATDADSSAFSQLIYSITEGNIGEKFSMDYKTGALTVQNTTQLRSRYELTVRASDGRFAGLTSVKINVKESKESHLKFTQDVYSAVVKENSTEAETLAVITAIGNPINEPLFYHILNPDRRFKISRTSGVLSTTGTPFDREQQEAFDVVVEVTEEHKPSAVAHVVVKVIVEDQNDNAPVFVNLPYYAVVKVDTEVGHVIRYVTAVDRDSGRNGEVHYYLKEHHEHFQIGPLGEISLKKQFELDTLNKEYLVTVVAKDGGNPAFSAEVIVPITVMNKAMPVFEKPFYSAEIAESIQVHSPVVHVQANSPEGLKVFYSITDGDPFSQFTINFNTGVINVIAPLDFEAHPAYKLSIRATDSLTGAHAEVFVDIIVDDINDNPPVFAQQSYAVTLSEASVIGTSVVQVRATDSDSEPNRGISYQMFGNHSKSHDHFHVDSSTGLISLLRTLDYEQSRQHTIFVRAVDGGMPTLSSDVIVTVDVTDLNDNPPLFEQQIYEARISEHAPHGHFVTCVKAYDADSSDIDKLQYSILSGNDHKHFVIDSATGIITLSNLHRHALKPFYSLNLSVSDGVFRSSTQVHVTVIGGNLHSPAFLQNEYEVELAENAPLHTLVMEVKTTDGDSGIYGHVTYHIVNDFAKDRFYINERGQIFTLEKLDRETPAEKVISVRLMAKDAGGKVAFCTVNVILTDDNDNAPQFRATKYEVNIGSSAAKGTSVVKVLASDADEGSNADITYAIEADSESVKENLEINKLSGVITTKESLIGLENEFFTFFVRAVDNGSPSKESVVLVYVKILPPEMQLPKFSEPFYTFTVSEDVPIGTEIDLIRAEHSGTVLYSLVKGNTPESNRDESFVIDRQSGRLKLEKSLDHETTKWYQFSILARCTQDDHEMVASVDVSIQVKDANDNSPVFESSPYEAFIVENLPGGSRVIQIRASDADSGTNGQVMYSLDQSQSVEVIESFAINMETGWITTLKELDHEKRDNYQIKVVASDHGEKIQLSSTAIVDVTVTDVNDSPPRFTAEIYKGTVSEDDPQGGVIAILSTTDADSEEINRQVTYFITGGDPLGQFAVETIQNEWKVYVKKPLDREKRDNYLLTITATDGTFSSKAIVEVKVLDANDNSPVCEKTLYSDTIPEDVLPGKLIMQISATDADIRSNAEITYTLLGSGAEKFKLNPDTGELKTSTPLDREEQAVYHLLVRATDGGGRFCQASIVLTLEDVNDNAPEFSADPYAITVFENTEPGTLLTRVQATDADAGLNRKILYSLIDSADGQFSINELSGIIQLEKPLDRELQAVYTLSLKAVDQGLPRRLTATGTVIVSVLDINDNPPVFEYREYGATVSEDILVGTEVLQVYAASRDIEANAEITYSIISGNEHGKFSIDSKTGAVFIIENLDYESSHEYYLTVEATDGGTPSLSDVATVNVNVTDINDNTPVFSQDTYTTVISEDAVLEQSVITVMADDADGPSNSHIHYSIIDGNQGSSFTIDPVRGEVKVTKLLDRETISGYTLTVQASDNGSPPRVNTTTVNIDVSDVNDNAPVFSRGNYSVIIQENKPVGFSVLQLVVTDEDSSHNGPPFFFTIVTGNDEKAFEVNPQGVLLTSSAIKRKEKDHYLLQVKVADNGKPQLSSLTYIDIRVIEESIYPPAILPLEIFITSSGEEYSGGVIGKIHATDQDVYDTLTYSLDPQMDNLFSVSSTGGKLIAHKKLDIGQYLLNVSVTDGKFTTVADITVHIRQVTQEMLNHTIAIRFANLTPEEFVGDYWRNFQRALRNILGVRRNDIQIVSLQSSEPHPHLDVLLFVEKPGSAQISTKQLLHKINSSVTDIEEIIGVRILNVFQKLCAGLDCPWKFCDEKVSVDESVMSTHSTARLSFVTPRHHRAAVCLCKEGRCPPVHHGCEDDPCPEGSECVSDPWEEKHTCVCPSGRFGQCPGSSSMTLTGNSYVKYRLTENENKLEMKLTMRLRTYSTHAVVMYARGTDYSILEIHHGRLQYKFDCGSGPGIVSVQSIQVNDGQWHAVALEVNGNYARLVLDQVHTASGTAPGTLKTLNLDNYVFFGGHIRQQGTRHGRSPQVGNGFRGCMDSIYLNGQELPLNSKPRSYAHIEESVDVSPGCFLTATEDCASNPCQNGGVCNPSPAGGYYCKCSALYIGTHCEISVNPCSSKPCLYGGTCVVDNGGFVCQCRGLYTGQRCQLSPYCKDEPCKNGGTCFDSLDGAVCQCDSGFRGERCQSDIDECSGNPCLHGALCENTHGSYHCNCSHEYRGRHCEDAAPNQYVSTPWNIGLAEGIGIVVFVAGIFLLVVVFVLCRKMISRKKKHQAEPKDKHLGPATAFLQRPYFDSKLNKNIYSDIPPQVPVRPISYTPSIPSDSRNNLDRNSFEGSAIPEHPEFSTFNPESVHGHRKAVAVCSVAPNLPPPPPSNSPSDSDSIQKPSWDFDYDTKVVDLDPCLSKKPLEEKPSQPYSARESLSEVQSLSSFQSESCDDNGYHWDTSDWMPSVPLPDIQEFPNYEVIDEQTPLYSADPNAIDTDYYPGGYDIESDFPPPPEDFPAADELPPLPPEFSNQFESIHPPRDMPAAGSLGSSSRNRQRFNLNQYLPNFYPLDMSEPQTKGTGENSTCREPHAPYPPGYQRHFEAPAVESMPMSVYASTASCSDVSACCEVESEVMMSDYESGDDGHFEEVTIPPLDSQQHTEV

SEQ ID NO: 66617 - protein, 160 aa, Homo sapiens
MSRARRTDGSFVVHDIPSGSYVVEVVSPAYRFDPVRVDITSKGKMRARYVNYIKTSEVVRLPYPLQMKSSGPPSYFIKRESWGWTDFLMNPMVMMMVLPLLIFVLLPKVVNTSDPDMRREMEQSMNMLNSNHELPDVSEFMTRLFSSKSSGKSSSGSSKT

SEQ ID NO: 66618 - protein, 102 aa, Homo sapiens
MGSFRINPDGSQSVVEVPYARSEAHLTELLEEICDRMKEYGEQIDPSTHRKNYVRVVGRNGESSELDLQGIRIDSDISGTLKFACESIVEEYEDELIEFFSR

SEQ ID NO: 66619 - protein, 705 aa, Homo sapiens
MQWTKVLGLGLGAAALLGLGIILGHFAIPKKANSLAPQDLDLEILETVMGQLDAHRIRENLRELSREPHLASSPRDEDLVQLLLQRWKDPESGLDSAEASTYEVLLSFPSQEQPNVVDIVGPTGGIIHSCHRTEENVTGEQGGPDVVQPYAAYAPSGTPQGLLVYANRGAEEDFKELQTQGIKLEGTIALTRYGGVGRGAKAVNAAKHGVAGVLVYTDPADINDGLSSPDETFPNSWYLPPSGVERGSYYEYFGDPLTPYLPAVPSSFRVDLANVSGFPPIPTQPIGFQDARDLLCQVNVSVYNRLELRNSSNVLGIIRGAVEPDRYVLYGNHRDSWVHGAVDPSSGTAVLLELSRVLGTLLKKGTWRPRRSIVFASWGAEEFGLIGSTEFTEEFFNKLQERTVAYINVDISVFANATLRVQGTPPVQSVVFSATKEIRSPGPGDLSIYDNWIRYFNRSSPVYGLVPSLGSLGAGSDYAPFVHFLGISSMDIAYTYDRSKTSARIYPTYHTAFDTFDYVDKFLDPGFSSHQAVARTAGSVILRLSDSFFLPLKVSDYSETLRSFLQAAQQDLGALLEQHSISLGPLVTAVEKFEAEAAALGQRISTLQKGSPDPLQVRMLNDQLMLLERTFLNPRAFPEERYYSHVLWAPRTGSVVTFPGLSNACSRARDTASGSEAWAEVQRQLSIVVTALEGAAATLRPVADL

SEQ ID NO: 66620 - protein, 392 aa, Homo sapiens
MMDLRNTPAKSLDKFIEDYLLPDTCFRMQINHAIDIICGFLKERCFRGSSYPVCVSKVVKGGSSGKGTTLRGRSDADLVVFLSPLTTFQDQLNRRGEFIQEIRRQLEACQRERAFSVKFEVQAPRWGNPRALSFVLSSLQLGEGVEFDVLPAFDALAHRGVHRPAERGRVLHLLHRTTERLPEAAPHQAQEPHPPSQALVPKCMALPPGLCKKKLGKLPPQYALELLTVYAWERGSMKTHFNTAQGFRTVLELVINYQQLCIYWTKYYDFKNPIIEKYLRRQLTKPRPVILDPADPTGNLGGGDPKGWRQLAQEAEAWLNYPCFKNWDGSPVSSWILLAESNSADDETDDPRRYQKYGYIGTHEYPHFSHRPSTLQAASTPQAEEDWTCTIL

SEQ ID NO: 66621 - protein, 44 aa, Homo sapiens
LKEEAQKRRERIDEIKRKKLEELSTAVCCADQRGWTGGPVPGRR

SEQ ID NO: 66622 - protein, 27 aa, Homo sapiens
MSGPSSGEGGAGGRRRRRRRRRRSLSL

SEQ ID NO: 66623 - protein, 185 aa, Homo sapiens
MGPKKKHLDYLIQCTNEMNVNIPQLADSLFERTTNSSWVVVFKSLITTHHLMVYGNERFIQYLASRNTLFNLSNFLDKSGLQGYDMSTFIRRYSRYLNEKAVSYRQVAFDFTKVKRGADGVMRTMNTEKLLKTVPIIQNQMDALLDFNVNSNELTNGVINAAFMLLFKDAIRLFAAYNEGIINLL

SEQ ID NO: 66624 - protein, 269 aa, Homo sapiens
MAVAELYTQYNRVWIPDPEEVWKSAEIAKDYRVGDKVLRLLLEDGTELDYSVNPESLPPLRNPDILVGENDLTALSYLHEPAVLHNLRIRFAESKLIYTYSGIILVAMNPYKQLPIYGDAIIHAYSGQNMGDMDPHIFAVAEEAYKQMARNNRNQSIIVSGESGAGKTVSARYAMRYFATVSKSGSNAHVEDKVLASNPITEAVGNAKTTRNDNSSRFGKYTEISFDEQNQIIGANMSTYLLEKSRVVFQGVPKNLIIQEWEAILSLRV

SEQ ID NO: 66625 - protein, 54 aa, Homo sapiens
MSLWLGAPVPDIPPESSPESFLVVLASRPDHLSPGSSAWPLQAPAQSSPVWICC

SEQ ID NO: 66626 - protein, 42 aa, Homo sapiens
MATLKDQLIYNLLKEEQTPQNKITVVGVGAVGMACAISILMK

SEQ ID NO: 66627 - protein, 223 aa, Homo sapiens
MSGSSGTPYLGSKISLISKAQIRYEGILYTIDTDNSTVALAKVRSFGTEDRPTDRPAPPREEIYEYIIFRGSDIKDITVCEPPKAQHTLPQDPAIVQSSLGSASASPFQPHVPYSPFRGMAPYGPLAASSLLSQQYAASLGLGAGFPSIPVGKSPMVEQAVQTGSADNLNAKKLLPGKGTTGTQLNGRQAQPSSKTASGNRRTRNRSRGQNRPTNVKENTIKF

SEQ ID NO: 66628 - protein, 121 aa, Homo sapiens
MAVKKIAIFGATGQTGLTTLAQAVQAGYEVTVLVRDSSRLPSEGPRPAHVVVGDVLQAADVDKTVAGQDAVIVLLGTRNDLSPTTVMSEGARNIVAAMKAHGVDKLSCSGTLPRCPHDCRL

SEQ ID NO: 66629 - protein, 209 aa, Homo sapiens
MKRKKLKLSHLVQYEELPDYIMVMVANKKSQDQMTEDLSLFLGNNTIRFTVWLHGVLDKLRSVTTEPSSLKSSDTNIFDSNVPSNKSNFSRGDERRHEAAVPPLAIPSARPEKRDSRVSTSSQESKTTNVRQTYDDGAATRLMSTVKPLREPAPSEDVIDIKPEPDDLIDEDLNFVQENPLSQKKPTVTLTYGSSRPSIEIYRPPASRN

SEQ ID NO: 66630 - protein, 400 aa, Homo sapiens [sequence omitted]

SEQ ID NO: 66631 - protein, 314 aa, Homo sapiens
MAAAMPLALLVLLLLGPGGWCLAEPPRDSLREELVITPLPSGDVAATFQFRTRWDSELQREGVSHYRLFPKALGQLISKYSLRELHLSFTQGFWRTRYWGPPFLQAPSGAELVDKSWKELSNVLSGIFCASLNFIDSTNTVTPTASFKPLGLANDTDHYFLRYAVLPREVVCTENLTPWKKLLPCSSKAGLSVLLKADRLFHTSYHSQAVHIRPVCRNARCTSISWELRQTLSVVFDAFITGQGKKDWSLFRMFSRTLTEPCPLASESRVYVDITTYNQDNETLEVHPPPTTTYQDVILGTRKTYAIYDLLDTA

SEQ ID NO: 66632 - protein, 194 aa, Homo sapiens
MDPLFQQTHKQVHEIQSCMGRLETADKQSVHIENEIQASIDQIFSRLERLEILSSKEPPNKRQNARLRVDQLKYDVQHLQTALRNFQHRRHAREQQERQREELLSRTFTTNDSDTTIPMDESLQFNSSLQKVHNGMDDLILDGHNILDGLRTQRLTLKVGSLLGDREKASCFSLIQQFSNCVYILITCPQIVIF

SEQ ID NO: 66633 - protein, 53 aa, Homo sapiens
MAKTVAYFYDPDVGNFHYGAGHPMKPHRLALTHSLVLHYGLYKKMIPSVSRAL

SEQ ID NO: 66634 - protein, 107 aa, Homo sapiens
RLPAAAGLAATAAAAPPPRAPSRRLLLQEAEESCGQHQRQEDAQRNLGGARAAKGDAAQQVTLRAQEVFSHPRGAPGGGDPYQIRRRLQAVSGGVQLIAIWTHTRNF

SEQ ID NO: 66635 - protein, 57 aa, Homo sapiens
MTSKKLVNSVAGCADDALAGLVACNPNLQLLQGHRVALRSDLDSLKGRVALLSGGGS

SEQ ID NO: 66636 - protein, 35 aa, Homo sapiens
MQREEGFNTKMADGPDEYDTEAGCVPLLHPEIWNI

SEQ ID NO: 66637 - protein, 160 aa, Homo sapiens
MSPLECSECFGDQLLHRTYTWQLTLRGTAEPFPRLHNLYSTPRCAQQAALPRLSRRMASQHSYPLNRFSSVPLDPMERPMSQADLELDYNPPRVQLSDEMFVFQDGRWVNENCRLQSPYFSPSASFHHKLHHKRLAKECMLQEENKSLREENKALREENR

SEQ ID NO: 66638 - protein, 498 aa, Homo sapiens
MGTSALWALWLLLALCWAPRESGATGTGRKAKCEPSQFQCTNGRCITLLWKCDGDEDCVDGSDEKNCVKKTCAESDFVCNNGQCVPSRWKCDGDPDCEDGSDESPEQCHMRTCRIHEISCGAHSTQCIPVSWRCDGENDCDSGEDEENCGNITCSPDEFTCSSGRCISRNFVCNGQDDCSDGSDELDCAPPTCGAHEFQCSTSSCIPISWVCDDDADCSDQSDESLEQCGRQPVIHTKCPASEIQCGSGECIHKKWRCDGDPDCKDGSDEVNCPSRTCRPDQFECEDGSCIHGSRQCNGIRDCVDGSDEVNCKNVNQCLGPGKFKCRSGECIDISKVCNQEQDCRDWSDEPLKECHINECLVNNGGCSHICKDLVIGYECDCAAGFELIDRKTCGDIDECQNPGICSQICINLKGGYKCECSRGYQMDLATGVCKAVGKEPSLIFTNRRDIRKIGLERKEYIQLVEQLRNTVALDADIAAQKLFWADLSQKAIFSHCC

SEQ ID NO: 66639 - protein, 46 aa, Homo sapiens
MESAIAEGGASRFRNGFLHEALDEMTTPQQTTPQTKKNDMMQSSGK

SEQ ID NO: 66640 - protein, 31 aa, Homo sapiens
MKGEAGHMLHNEKSKQEGHIWGSMRRTAFIL

SEQ ID NO: 66641 - protein, 323 aa, Homo sapiens
MEDSMDMDMSPLRPQNYLFGCELKADKDYHFKVDNDENEHQLSLRTVSLGAGAKDELHIVEAEAMNYEGSPIKVTLATLKMSVQPTVSLGGFEITPPVVLRLKCGSGPVHISGQHLVAVEEDAESEDEEEEDVKLLSISGKRSAPGGGSKVPQKKVKLAADEDDDDDDEEDDDEDDDDDDFDDEEAEEKAPVKKSIRDTPAKNAQKSNQNGKDSKPSSTPRSKMCLASPLPSAMIVNFLWPPSHASYTAYSTGQESFKKQEKTPKTPKGPSSVEDIKAKMQASIEKGGSLPKVEAKFINYVKNCFRMTDQEAIQDLWQWRKSL

SEQ ID NO: 66642 - protein, 47 aa, Homo sapiens
MPPGPLAPASSFTAAVGAGAGASQGGFLYEPVSQCVVFGGGTKLTVL

SEQ ID NO: 66643 - protein, 130 aa, Homo sapiens
LARPHDFFDAQTLDAIRHRAICFNLSAHIESLGKGHSVVFHSTVIAKRKEDSGKIKLLLHWMPEDILPDVWVNESERHQLKTKVVHLSKLPKDTALLLDPNIYRTMPQKRLKRSDKPFTFCHDCEASSAM

SEQ ID NO: 66644 - protein, 341 aa, Homo sapiens
NDSQHDPGKMFIGGLSWQTSPDSLRDYFSKFGEIRECMVMRDPTTKRSRGFGFVTFADPASVDKVLGQPHHELDSKTIDPKVAFPRRAQPKMVTRTKKIFVGGLSANTVVEDVKQYFEQFGKVEDAMLMFDKTTNRHRGFGFVTFENEDVVEKVCEIHFHEINNKMVECKKAQPKEVMFPPGTRGRARGLPYTMDAFMLGMGMLGYPNFVATYGRGYPGFAPSYGYQFPALLPYLNASFPAAAYGPVAAAAVAAARGSVLNSYSAQPNFGAPASPAGSNPARPGGFPGANSPGPVADLYGPASQDSGVGNYISAASPQPGSGFGHGIAGPLIATAFTNGYH

SEQ ID NO: 66645 - protein, 136 aa, Homo sapiens
MQKSEGSGGTQLKNRATGNYDQRTSSSTQLKHRNAVQGSKSSLSTSSPESARKLHPRPSDKLNPKTINPFGEQSRVPSAFAAIYSKGGIPCRLVHGSVKHRLQWECPPESLSFDPLLITLAEGLRETKHPYTFVSK

SEQ ID NO: 66646 - protein, 243 aa, Homo sapiens
MSAEVIHQVEEALDTDEKEMLLFLCRDVAIDVVPPNVRDLLDILRERGKLSVGDLAELLYRVRRFDLLKRILKMDRKAVETHLLRNPHLVSDYRVLMAEIGEDLDKSDVSSLIFLMKDYMGRGKISKEKSFLDLVVELEKLNLVAPDQLDLLEKCLKNIHRIDLKTKIQKYKQSVQGAGTSYRNVLQAAIQKSLKDPSNNFRAGVQWRDLGSPQPPPPGFKRFSHLSLPSSWDYRNVPPRPAP

SEQ ID NO: 66647 - protein, 374 aa, Homo sapiens
MPGRSCVALVLLAAAVSCAVAQHAPPWTEDCRKSTYPPSGPTYRGAVPWYTINLDLPPYKRWHELMLDKAPVLKVIVNSLKNMINTFVPSGKIMQVVDEKLPGLLGNFPGPFEEEMKGIAAVTDIPLEDKKGHLIHGRNMDFGVFLGWNINNDTWVITEQLKPLTVNLDFQRNNKTVFKASSFAGYVGMLTGFKPGLFSLTLNERFSINGGYLGILEWILGKKDVMWIGFLTRTVLENSTSYEEAKNLLTKTKILAPAYFILGGNQSGEGCVITRDRKESLDVYELDAKQGRWYVVQTNYDRWKHPFFLDDRRTPAKMCLNRTSQENISFETMYDVLSTKPVLNKLTVYTTLIDVTKGQFETYLRDCPDPCIGW

SEQ ID NO: 66648 - protein, 301 aa, Homo sapiens
MLGPESVPPPKRSRSKLMAPPRIGTHNGTFHCDEALACALLRLLPEYRDAEIVRTRDPEKLASCDIVVDVGGEYDPRRHRYDHHQRSFTETMSSLSPGKPWQTKLSSAGLIYLHFGHKLLAQLLGTSEEDSMVGTLYDKAGFKRAMDLVQEEFLQRLDFYQHSWLPARALVEEALAQRFQVDPSGEIVELAKGACPWKEHLYHLESGLSPPVAIFFVIYTDQAGQWRIQCVPKEPHSFQSRLPLPEPWRGLRDEALDQVSGIPGCIFVHASGFTGGHHTREGALSMARATLAQRSYLPQIS

SEQ ID NO: 66649 - protein, 86 aa, Homo sapiens
MECIISGSASPTLAINTVTNKVTLYNTDQDGSDSPRSSLNNSLSDQSLASVNLNSVGSVHSYTPVTSHPESVSQSLTPQQQPQYNL

SEQ ID NO: 66650 - protein, 138 aa, Homo sapiens
MAASIGTDFWYEYRSPVQENSSDLNKSIWDEFISDEADEKTYNDALFRYNGTVGLWRRCITIPKNMHWYSPPERTESFDVVTKCVSFTLTEQFMEKFVDPGNHNSGIDLLRTYLWRCQFLLPFVSLGLMCFGALIGLC

SEQ ID NO: 66651 - protein, 298 aa, Homo sapiens
MFSLMASCCGWFKRWREPVRLANKQDKEGALGEADVIECLSLEKLVNEHKCLCQIEPCSAISGYGKKIDKSIKKGLYWLLHVIARDFDALNERIQKETTEQRALEEQEKQERAERVRKLREERKQNEQEQAELDGTSGLAELDPEPTNPFQPIASVIIENEGKLEREKKNQKMEKDSDGCHLKHKMEHEQIETQGQVNHNGQKNNEFGLVENYKEALTQQLKNEDETDRPSLESANGKKKTKKLRMKRNHRVEPLNIDDCAPESPTPPPPPPPDFYRKPLPPLAVPQRPNSDAHDVIS

SEQ ID NO: 66652 - protein, 150 aa, Homo sapiens
  MOD_RES (1)..(1): Any amino acid
XLGWSKAGSGSVCLALDQLRDVIESQEELIHQLRNVMVLQDENFVSKEEFQAVEKKLVEEKAAHAKTKVLLAKEEEKLQFALGEVEVLSKQLEKEKLAFEKALSSVKSKVLQESSKKDQLITKCNGITCLTSGSRSSRRATWPRCWTRSI

SEQ ID NO: 66653 - protein, 1316 aa, Homo sapiens
LDGNSWLLCYGFLYLALYAQVSQSKPCERTGSCFSGRCVNSTCLCDPGWVGDQCQHCQGRFKLTEPSGYLTDGPINYKYKTKCTWLIEGYPNAVLRLRFNHFATECSWDHMYVYDGDSIYAPLIAVLSGLIVPEIRGNETVPEVVTTSGYALLHFFSDAAYNLTGFNIFYSINSCPNNCSGHGKCTTSVSVPSQVYCECDKYWKGEACDIPYCKANCGSPDHGYCDLTGEKLCVCNDSWQGPDCSLNVPSTESYWILPNVKPFSPSVGRASHKAVLHGKFMWVIGGYTFNYSSFQMVLNYNLESSIWNVGTPSRGPLQRYGHSLALYQENIFMYGGRIETNDGNVTDELWVFNIHSQSWSTKTPTVLGHGQQYAVEGHSAHIMELDSRDVVMIIIFGYSAIYGYTSSIQEYHISSNTWLVPETKGAIVQGGYGHTSVYDEITKSIYVHGGYKALPGNKYGLVDDLYKYEVNTKTWTILKESGFARYLHSAVLINGAMLIFGGNTHNDTSLSNGAKCFSADFLAYDIACDEWKILPKPNLHRDVNRFGHSAVVINGSMYIFGGFSSVLLNDILVYKPPNCKAFRDEELCKNAGPGIKCVWNKNHCESWESGNTNNILRAKCPPKTAASDDRCYRYADCASCTANTNGCQWCDDKKCISANSNCSMSVKNYTKCHVRNEQICNKLTSCKSCSLNLNCQWDQRQQECQALPAHLCGEGWSHIGDACLRVNSSRENYDNAKLYCYNLSGNLASLTTSKEVEFVLDEIQKYTQQKVSPWVGLRKINISYWGWEDMSPFTNTTLQWLPGEPNDSGFCAYLERAAVAGLKANPCTSMANGLVCEKPVVSPNQNARPCKKPCSLRTSCSNCTSNGMECMWCSSTKRCVDSNAYIISFPYGQCLEWQTATCSPQNCSGLRTCGQCLEQPGCGWCNDPSNTGRGHCIEGSSRGPMKLIGMHHSEMVLDTNLCPKEKNYEWSFIQCPACQCNGHSTCINNNVCEQCKNLTTGKQCQDCMPGYYGDPTNGGQCTACTCSGHANICHLHTGKCFCTTKGIKGDQCQLCDSENRYVGNPLRGTCYYSLLIDYQFTFSLLQEDDRHHTAINFIANPEQSNKNLDISINASNNFNLNITWSVGSTAGTISGEETSIVSKNNIKEYRDSFSYEKFNFRSNPNITFYVYVSNFSWPIKIQIAFSQHNTIMDLVQFFVTFFSCFLSLLLVAAVVWKIKQTCWASRRREQLLRERQQMASRPFASVDVALEVGAEQTEFLRGPLEGAPKPIAIEPCAGNRAAVLTVFLCLPRGSSGAPPPGQSEHSPEPTAQKILL

SEQ ID NO: 66654 - protein, 185 aa, Homo sapiens
MRALRDRAGLLLCVLLLAALLEAALGLPVKKPRLRGPRPGSLTRLAEVSASPDPRPLKEEEEAPLLPRTHLQAEPHQHGCWTVTEPAAMTPGNATPPRTPEVTPLRLELQKLPGLANTTLSTPNPDTQVTIKVVEDPQAEVSIDLLAEPSNPPPQDTLSWLPALWSFLWGDYKGEEKDRAPGEKG

SEQ ID NO: 66655 - protein, 126 aa, Homo sapiens
ITKREVEDDLGLSMLIDSQNNQYILTKPRDSTIPRADHHFIKDIVTIGMLSLPCGWLCTAIGLPTMFGYIICGVLLGPSGLNSIKSIVQVETLGEFGVFFTLFLVGLEFSPEKLRKVRTSSTCYCS

SEQ ID NO: 66656 - protein, 198 aa, Homo sapiens
MTPQSLLQTTLFLLSLLFLVQASASSGAHGRGHREDFRFCSQRNQTHRSSLHYKPTPDLRISIENSEEALTVHAPFPAAHPASRSFPDPRGLYHFCLYWNRHAGRLHLLYGKRDFLLSDKASSLLCFQHQEESLAQGPPLLATSVTSWWSPQNISLPSAASFTFSFHSPPHTAAHNASVDMCELKRDLQLLSQFLKHP

SEQ ID NO: 66657 - protein, 932 aa, Homo sapiens
MCLRVCKFIGRQIRGRWLPGEKHVLVYFKNKLKLALIGQSLFGQEVYSHLRKEGHRVVGVFTVPDKDGKADPLALAAEKDGTPVFKLPKWRVKGKTIKEVAEAYRSVGAELNVLPFCTQFIPMDIIDSPKHGSIIYHPSILPRHRGASAINWTLIMGDKKAGFSVFWADDGLDTGPILLQRSCDVEPNDTVDALYNRFLFPEGIKAMVEAVQLIADGKAPRIPQPEEGATYEGIQKKENAEISWDQSAEVLHNWIRGHDKVPGAWTEINGQMVTFYGSTLLNSSVPPGEPLEIKGAKKPGLVTKNGLVLFGNDGKALTVRNLQFEDGKMIPASQYFSTGETSVVELTAEEVKVAETIKVIWAGILSNVPIIEDSTDFFKSGASSMDVARLVEEIRQKCGGLQLQNEDVYMATKFEGFIQKVVRKLRGEDQEVELVVDYISKEVNEIMVKMPYQCFINGQFTDADDGKTYDTINPTDGSTICKVSYASLADVDKAVAAAKDAFENGEWGRMNARERGRLMYRLADLLEENQEELATIEALDSGAVYTLALKTHIGMSVQTFRYFAGWCDKIQGSTIPINQARPNRNLTFTKKEPLGVCAIIIPWNYPLMMLAWKSAACLAAGNTLVLKPAQVTPLTALKFAELSVKAGFPKGVINIIPGSGGIAGQRLSEHPDIRKLGFTGSTPIGKQIMKSCAVSNLKKVSLELGGKSPLIIFNDCELDKAVRMGMGAVFFNKGENCIAAGRLFVEESIHDEFVTRVVEEIKKMKIGDPLDRSTDHGPQNHKAHLEKLLQYCETGVKEGATLVYGGRQVQRPGFFMEPTVFTDVEDYMYLAKEESFGPIMVISKFQNGDIDGVLQRANSTEYGLASGVFTRDINKAMYVSEKLEAGTVFINTYNKTDVAAPFGGVKQSGFGKDLGEEALNEYLKTKTVTLEY

SEQ ID NO: 66658 - protein, 137 aa, Homo sapiens
MAENREPRGAVEAELDPVEYTLRKRLPSRLPRRPNDIYVNMKTDFKAQLARCQKLLDGGARGQNACSEIYIHGLGLAINRAINIALQLQAGSFGSLQVAANTSTVELVDELEPETDTREPLTRIRNNSAIHIRVFRV

SEQ ID NO: 66659 - protein, 37 aa, Homo sapiens
MSASAQQLAEELQIFGLDCEEALIEKFSEQKIIESQA

SEQ ID NO: 66660 - protein, 221 aa, Homo sapiens
MHHQQRMAALGTDKELSDLLDFSAMFSPPVSSGKNGPTSLASGHFTGSNVEDRSSSGSWGNGGHPSPSRNYGDGTPYDHMTSRDLGSHDNLSPPFVNSRIQSKTERGSYSSYGRESNLQGCHQQSLLGGDMDMGNPGTLSPTKPGSQYYQYSSNNPRRRPLHSSAMEVQTKKVRKVPPGLPSSVYAPSASTADYNRDSPGYPSSKPATSTFPSSFFMQDGH

SEQ ID NO: 66661 - protein, 61 aa, Homo sapiens
MLPSKKTVRMPSVTQRLRDPDINPCLSESDASTRCLDENNYDRERCSTYFLRYKNCRRFWP

SEQ ID NO: 66662 - protein, 243 aa, Homo sapiens
MGLELFLDLVSQPSRAVYIFAKKNGIPLELRTVDLVKGQHKSKEFLQINSLGKLPTLKDGDFILTESSAILIYLSCKYQTPDHWYPSDLQARARVHEYLGWHADCIRGTFGIPLWVQMLGPLIGVQVPEEKVERNRTAMDQALQWLEDKFLGDRPFLAGQQVTLADLMALEELMQPVALGYELFEGRPRLAAWRGVEAFLGAELCQEAHSIILSILEQAAKKTLPTPSPEAYQAMLLRIARIP

SEQ ID NO: 66663 - protein, 18 aa, Homo sapiens
MSKSKVDNQFYSVEVGDS

SEQ ID NO: 66664 - protein, 47 aa, Homo sapiens
IISDITELAPASPMASPGGSIDESPHGRQGPHGHRGPASLPPAHLHP

SEQ ID NO: 66665 - protein, 585 aa, Homo sapiens
MGPLTFTDVAIEFSLEEWQCLDTAQQNLYRNVMLENYRNLVFLGIAVSKPDLITCLEKEKEPCKMKRHEMVDEPPVVCSHFAEDFWPEQDIKDSFQKVTLRRYDKRGHENLQLRKGYKTVGDCKLYKGGYNGLNQCLTLTQSKMYHCDIYVKVFYAFSNADRYKTRHTGKKPFQCKKCGKSFCMLSQLTQHKKIHIRENTYRCKEFGNAFNQSSALTNHKRIYVGEKHYRCEECGKAFNHYSTLTNHKRIHSGEKPYKCDECGKTFSISSTFTKHKIIHTEEKPYKCKECGKAFNRPQPLLAIIHTGEKPYKCEECAKPLTGLQLTKHKVIHTGEKPYKCEECGKAFNQSSRLTRHKKIHTGEEPYKFEKCGRVFTCSSTLTQDKKIHTGEKPYNCEECGKVFTYSSTLTRHKRIHTEEKPYKCNECGKAFNRSSHLTSHRRIHTGEKPYKCEECGKAFKQSSNLNSHKKIHSGEKPYKCEECGKAFILSSRLTQHKKIHTGEKPYKCEECGKAFNRSSRLTQHKKIHTGEKPYKCKQCDKAFTHSSNLSSHKKIHSGEKPYKCEECGKAFNRSSRLTQHKKENS

SEQ ID NO: 66666 - protein, 847 aa, Homo sapiens
MSKKRKALEGGGGGGEPQLPEEEPTAWFGDSSEEQASRLPFMLKGGSKGPALLALRSGTDPRAQMSDDPAEGTLDPCSAPGLTDEKVKAYLSLHPQVLDEFVSESVSAETVEKWLKRKNNKSEDESAPKEVSRYQDTNMQGVVYELNSYIEQRLDTGGDNQLLLYELSSIIKIATKADGFALYFLGECNNSLCIFTPPGIKEGKPRLIPAGPITQGTTVSAYVAKSRKTLLVEDILGDERFPRGTGLESGTRIQSVLCLPIVTAIGDLIGILELYRHWGKEAFCLSHQEVATANLAWASVAIHQVQVCRGLAKQTELNDFLLDVSKTYFDNIVAIDSLLEHIMIYAKNLVNADRCALFQVDHKNKELYSDLFDIGEEKEGKPVFKKTKEIRFSIEKGIAGQVARTGEVLNIPDAYADPRFNREVDLYTGYTTRNILCMPIVSRGSVIGVVQMVNKISGSAFSKTDENNFKMFAVFCALALHCANMYHRIRHSECIYRVTMEKLSYHSICTSEEWQGLMQFTLPVRLCKEIELFHFDIGPFENMWPGIFVYMVHRSCGTSCFELEKLCRFIMSVKKNYRRVPYHNWKHAVTVAHCMYAILQNNHTLFTDLERKGLLIACLCHDLDHRGFSNSYLQKFDHPLAALYSTSTMEQHHFSQTVSILQLEGHNIFSTLSSSEYEQVLEIIRKAIIATDLALYFGNRKQLEEMYQTGSLNLNNQSHRDRVIGLMMTACDLCSVTKLWPVTKLTANDIYAEFWAEGDEMKKLGIQPIPMMDRDKKDEVPQGQLGFYNAVAIPCYTTLTQILPPTEPLLKACRDNLSQWEKVIRGEETATWISSPSVAQKAAASED

SEQ ID NO: 66667 - protein, 541 aa, Homo sapiens
MFSNSTGRLPGQPTEEIQQYKVLVHSQERELTQLREKLREGRDASRSLNEHLQALLTPDEPDKSQGQDLQEQLAEGCRLAQHLVQKLSPENDEDEDEDVQVEEDEKVLESSAPREVQKAEESKVPEDSLEECAITCSNSHGPCDSIQPHKNIKITFEEDKVNSSLVVDRESSHDGCQDALNILPVPGPTSSATNVSMVVSAGPLSSEKAEMNILEINEKLCPQLAEKKQQFRSLKEKCFVTQVACFLAKQQNKYKYEECKDLIKSMLRNERQFKEEKLAEQLKQAEELRQYKVLVHSQERELTQLREKLREGRDASRSLNEHLQALLTPDEPDKSQGQDLQEQLAEGCRLAQHLVQKLSPENDNDDDEDVQVEVAEKVQKSSSPREMQKAEEKEVPEDSLEECAITCSNSHGPYDSNQPHRKTKITFEEDKVDSTLIGSSSHVEWEDAVHIIPENESDDEEEEEKGPVSPRNLQESEEEEVPQESWDEGYSTLSIPPERLASYQSYSSTFHSLEEQQVCMAVDIGRLDRGMFLCARKNCLM

SEQ ID NO: 66668 - protein, 155 aa, Homo sapiens
MVSLTAPYVSGFLAFREVPFLLELVQQLREKEPGLMPQVLLVDGNGVLHHRGFGVACHLGVLTDLPCVGVAKKLLQVDGLENNALHKEKIRLLQTRGDSFPLLGDSGTVLGMALRSHDRSTRPLYISVGHRMSLEAAVRLTCCCCRFRIPEPVRQ

SEQ ID NO: 66669 - protein, 157 aa, Homo sapiens
MNGQLDLSGKLIIKAQLGEDIRRIPIHNEDITYDELVLMMQRVFRGKLLSNDEVTIKYKDEDGDLITIFDSSDLSFAIQCSRILKLTLFVNGQPRPLESSQVKYLRRELIELRNKVNRLLDSLEPPGEPGPSTNIPENDTVDGREEKSASDSSGKQS

SEQ ID NO: 66670 - protein, 364 aa, Homo sapiens
MHGGQGCAPMWGVVTQLPVRALGLEVRVWGLCLHLLSLGLRAFLLFFLVLLRELCVCVQEAGRAVLMAARSVALTAHVCSVYVFLQGVAWSAQLVGSWVMLHIWLYRALLETPRRVPLLPQCEQAARWLVWASMQAGKGLARVWGVATFVQLCAHTVFLSMYLCMHICFAAISSKVRVRVNAPFCVSVPLKVHAPLSLGIKVGLQGQKHGRATGEAGMPQGEMLGKQEPQTSRSPKPTRRREVSRSELSPVIPSAATLIIVVCVGFLVLMVVLGLVRIHSLHRRVSGAGGPPGASSDPKDPDLFWDDSALTIIVNPMESYQNRQSCVTGAVGGQQEDEDSSDSEVADSPSSDERRIIETPPHRY

SEQ ID NO: 66671 - protein, 114 aa, Homo sapiens
MQLAARIRPRDLEDFFSAVGKVRDVRIISDRNSRRSKGIAYVEFCEIQSVPLAIGLTGQRLLGVPIIVQASQAEKNRLAAMANNLQKGNGGPMRLYVGSLHFNITEDMLRGIFE

SEQ ID NO: 66672 - protein, 88 aa, Homo sapiens
MDPLTKVPCGSQIAQTILWKAKSSLSFGIQPLQTWPTKDPELESQVNLLFPVMLMEPSKGLEDSEWKMALQMRMQLPCLVLGEEQTCT

SEQ ID NO: 66673 - protein, 71 aa, Homo sapiens
MSMILSASVIRVRDGLPLSASTDYEQSTGMQECRKYFKMLSRKLAQLPDRCTLKTGHYNINFRRSSLLLIT

SEQ ID NO: 66674 - protein, 1761 aa, Homo sapiens
MVDKNIYIIQGEINIVVGAIKRNARWSTHTPLDEERDPLLHSFGHLKEVLNSITELSEIEPNVFLRPFLEVIRSEDTTGPITGLALTSVNKFLSYALIDPTHEGTAEGMENMADAVTHARFVGTDPASDEVVLMKILQVLRTLLLTPVGAHLTNESVCEIMQSCFRICFEMRLSELLRKSAEHTLVDMVQLLFTRLPQFKEEPKNYVGTNMKKLKMRAGGMSDSSKWKKQKRSPRPPRHMTKVTPGSELPTPNGTTLSSNLTGGMPFIDVPTPISSASSEAASAVVSPSTDSGLEFSSQTTSKEDLTDLEQPGSPGYSTATEPGSSELGVPEQPDLQEGTHVEKSQSASVESIPEVLEECTSPADHSDSASVHDMDYVNPRGVRFTQSSQKEGTALVPYGLPCIRELFRFLISLTNPHDRHNSEVMIHMGLHLLTVALESAPVAQCQTLLGLIKDEMCRHLFQNAFPVSGQLYTTHLLSLDALLTVIDSTEAHCQAKVLNSLTQQEKKETARPSCEIVDGTREASNTERTASDGKAVGMASDIPGLHLPGGGRLPPEHGKSGCSDLEEAVDSGADKKFARKPPRFSCLLPDPRELIEIKNKKKLLITGTEQFNQKPKKGIQFLQEKGLLTIPMDNTEVAQWLRENPRLDKKMIGEFVSDRKNIDLLESFVSTFSFQGLRLDEALRLYLEAFRLPGEAPVIQRLLEAFTERWMNCNGSPFANSDACFSLAYAVIMLNTDQHNHNVRKQNAPMTLEEFRKNLKGVNGGKDFEQDILEDMYHAIKNEEIVMPEEQTGLVRENYVWNVLLHRGATPEGIFLRVPTASYDLDLFTMTWGPTIAALSYVFDKSLEETIIQKAISGFRKCAMISAHYGLSDVFDNLIISLCKFTALSSESIENLPSVFGSNPKAHIAAKTVFHLAHRHGDILREGWKNIMEAMLQLFRAQLLPKAMIEVEDFVDPNGKISLQREETPSNRGESTVLSFVSWLTLSGPEQSSVRGPSTENQEAKRVALECIKQCDPEKMITESKFLQLESLQELMKALVSVTPDEETYDEEDAAFCLEMLLRIVLENRDRVGCVWQTVRDHLYHLCVQAQDFCFLVERAVVGLLRLAIRLLRREEISAQVLLSLRILLLMKPSVLSRVSHQVAYGLHELLKTNAANIHSGDDWATLFTLLECIGSGVKPPAALQATARADAPDAGAQSDSELPSYHQNDVSLDRGYTSDSEVYTDHGRPGKIHRSATDADVVNSGWLVVGKDDVDNSKPGPSRPGPSPLINQYSLTVGLDLGPHDTKSLLKCVESLSFIVRDAAHITPDNFELCVKTLRIFVEASLNGGCKSQEKRGKSHKYDSKGNRFKKKSKEGSMLRRPRTSSQHASRGGQSDDDEDEGVPASYHTVSLQVSQDLLDLMHTLHTRAASIYSSWAEEQRHLETGGQKIEADSRTLWAHCWCPLLQGIACLCCDARRQVRMQALTYLQRALLVHDLQKLDALEWESCFNKVLFPLLTKLLENISPADVGGMEETRMRASTLLSKVFLQHLSPLLSLSTFAALWLTILDFMDKYMHAGSSDLLSEAIPESLKNMLLVMDTAEIFHSADARGGGPSALWEITWERIDCFLPHLRDELFKQTVIQDPMPMEPQGQKPLASAHLTSAAGDTRTPGHPPPPEIPSELGACDFEKPESPRAASSSSPGSPVASSPSRLSPTPDGPPPLAQPPLILQPLASPLQVGVPPMTLPIILNPALIEATSPVPLLATPRPTDPIPTSEVN

SEQ ID NO: 66675 - protein, 128 aa, Homo sapiens
MAVAAVKWVMSKRTILKHLFPVQNGALYCVCHKSTYSPLPDDYNCNVELALTSDGRTIVCYHPSVDIPYEHTKPIPRPDPVHNNEETHDQVLKTRLEEKVEHLEEGPMIEQLSKMFFTTKHRWYPHGR

SEQ ID NO: 66676 - protein, 228 aa, Homo sapiens
MMCQSEARQGPELRAAKWLHFPQLALRRRLGQLSCMSRPALKLRSWPLTVLYYLLPFGALRPLSRVGWRPVSRVALYKSVPTRLLSRAWGRLNQVELPHWLRRPVYSLYIWTFGVNMKEAAVEDLHHYRNLSEFFRRKLKPQARPVCGLHSVISPSDGRILNFGQVKNCEVEQVKGVTYSLESFLGPRMCTEDLPFPPAASCDSFKNQLVTREGNELYHCVIYLAPGD

SEQ ID NO: 66677 - protein, 615 aa, Homo sapiens
  MOD_RES (1)..(1): Any amino acid
XVLLLSSPGLEELYRCCMLFVDDMAEPRETPEHPLKQIKFLLGRKEEEAVLVGGEWSPSLDGLDPQADPQVLVRTAIRCAQAQTGIDLSGCTKWWRFAEFQYLQPGPPRRLQTVVVYLPDVWTIMPTLEEWEALCQQKAAEAAPPTQEAQGETEPTEQAPDALEQAADTSRRNAETPEATTQQETDTDLPEAPPPPLEPAVIARPGCVNLSLHGIVEDRRPKERISFEVMVLAELFLEMLQRDFGYRVYKMLLSLPEKVVSPPEPEKEEAAKEEATKEEEAIKEEVVKEPKDEAQNEGPATESEAPLKEDGLLPKPLSSGGEEEEKPRGEASEDLCEMALDPELLLLRDDGEEEFAGAKLEDSEVRSVASNQSEMEFSSLQDMPKELDPSAVLPLDCLLAFVFFDANWCGYLHRRDLERILLTLGIRLSAEQAKQLVSRVVTQNICQYRSLQYSRQEGLDGGLPEEVLFGNLDLLPPPGKSTKPGAAPTEHKALVSHNGSLINVGSLLQRAEQQDSGRLYLENKIHTLELKLEESHNRFSATEVTNKTLAAEMQELRVRLAEAEETARTAERQKSQLQRLLQELRRRLTPLQLEIQRVVEKADSWVEKEEPAPSN

SEQ ID NO: 66678 - protein, 108 aa, Homo sapiens
MVMLLLLLSALAGLFGAAEGQAFHLGKCPNPPVQENFDVNKTESHFVTQGGVQHHHLGSLQPPPPGFKQFSCLSLPSSWDYSISEDGTKLRRSQQPLRMDAASRPTTH

SEQ ID NO: 66679 - protein, 345 aa, Homo sapiens
MPTGHLGSPLALALLPVATNRPAVQWSCTAPQPTSLAAGTIGAARRRPMASSARRARGSRRYSWVSEEPLNYVGWQDGEPQQPGGCTYVDVDGAWRTTSCDTKLQGAVCGVSSGPPPPRRISYHGSCPQGLADSAWIPFREHCYSFHMELLLGHKEARQRCQRAGGAVLSILDEMENVFVWEHLQSYEGQSRGAWLGMNFNPKGGTLVWQDNTAVNYSNWGPPGLGPSMLSHNSCYWIQSNSGLWRPGACTNITMGVVCKLPRAEQSSFSPSALPENPAALVVVLMAVLLLLALLTAALILYRRRQSIERGAFEGARYSRSSSSPTEATEKNILVSDMEMNEQQE

SEQ ID NO: 66680 - protein, 662 aa, Homo sapiens
MQTQEILRILRLPELGDLGQFFRSLSATTLDSGGARRSVIGSGPQLLTHYYDDARTMYQVFRRGLSISGNGPCLGFRKPKQPYQWLSYQEVADRAEFLGSGLLQHNCKACTDQFIGVFAQNRPEWIIVELACYTYSMVVVPLYDTLGPGAIRYIINTADISTVIVDKPQKAVLLLEHVERKETPGLKLIILMDPFEEALKERGQKCGVVIKSMQAVEDCGQENHQAPVPPQPDDLSIVCFTSGTTGNPKGAMLTHGNVVADFSGFLKVTESQWAPTCADVHISYLPLAHMFERMVQSVVYCHGGRVGFFQGDIRLLSDDMKALCPTIFPVVPRLLNRMYDKIFSQANTPLKRWLLEFAAKRKQAEVRSGIIRNDSIWDELFFNKIQASLGGCVRMIVTGAAPASPTVLGFLRAALGCQVYEGYGQTECTAGCTFTTPGDWTSGHVGAPLPCNHIKLVDVEELNYWACKGEGEICVRGPNVFKGYLKDPDRTKEALDSDGWLHTGDIGKWLPAGTLKIIDRKKHIFKLAQGEYVAPEKIENIYIRSQPVAQIYVHGDSLKAFLVGIVVPDPEVMPSWAQKRGIEGTYADLCTNKDLKKAILEDMVRLGKESGLHSFEQVKAIHIHSDMFSVQNGLLTPTLKAKRPELREYFKKQIEELYSISM

SEQ ID NO: 66681 - protein, 557 aa, Homo sapiens [sequence omitted]

SEQ ID NO: 66682 - protein, 84 aa, Homo sapiens
QPAPRCGDKIYNPLEQCCYNDAIVSLSETRQCGPPCTFWPCFELCCLDSFGLTNDFVVKLKVQGVNSQCHSSPISSKCERRRFP

SEQ ID NO: 66683 - protein, 188 aa, Homo sapiens
MYQPSRGAARRLGPCLRAYQARPQDQLYPGTLPFPPLWPHSTTTTSPSSPLFWSPLPPRLPTQRLPQVPPLPLPQIQALSSAWVVLPPGKGEEGPGPELHSGCLDGLRSLFEGPPCPYPGAWIPFQVPGTAHPSPATPSGDPSMEEHLSVMYERLRQELPKLFLQSHDYSLYSLDVEFINEILNIRTK

SEQ ID NO: 66684 - protein, 78 aa, Homo sapiens
MTYLYHYITSYVVDGQRIIYGPAYSGRERVYSNASLLIQNVTQEDAGSYTLHIIKRRDGTGGVTGHFTFTLHLETPKP

SEQ ID NO: 66685 - protein, 162 aa, Homo sapiens
KLVPFIQKASVGITVLSLCALSIDRYRAVASWSRIKGIGVPKWTAVEIVLIWVVSVVLAVPEAIGFDIITMDYKGSYLRICLLHPVQKTAFMQFYKTAKDWWLFSFYFCLPLAITAFFYTLMTCEMLRKKSGMQIALNDHLKQLSVGIGLYWYQHGFTEFLH

SEQ ID NO: 66686 - protein, 476 aa, Homo sapiens
  MOD_RES (1)..(1): Any amino acid
XYSTPVFSQKMTVWILLLLSLYPGFTSQKSDDDYEDYASNKTWVLTPKVPEGDVTVILNNLLEGYDNKLRPDIGVKPTLIHTDMYVNSIGPVNAINMEYTIDIFFAQTWYDRRLKFNSTIKVLRLNSNMVGKIWIPDTFFRNSKKADAHWITTPNRMLRIWNDGRVLYTLRLTIDAECQLQLHNFPMDEHSCPLEFSSYGYPREEIVYQWKRSSVEVGDTRSWRLYQFSFVGLRNTTEVVKTTSEDKLHEILVNLTLGDYVVMSVYFDLSRRMGYFTIQTYIPCTLIVVLSWVSFWINKDAVPARTSLGITTVLTMTTLSTIARKSLPKVSYVTAMDLFVSVCFIFVFSALVEYGTLHYFVSNRKPSKDKDKKKKNPLLRMFSFKAPTIDIRPRSATIQMNNATHLQERDEEYGYECLDGKDCASFFCCFEDCRTGAWRHGRIHIRIAKMDSYARIFFPTAFCLFNLVYWVSYLYL

SEQ ID NO: 66687 - protein, 262 aa, Homo sapiens
VDTAQRKEPEDGRLVQFLLMNPANDGGQWDMLVNIVEKYGVIPKKCFPESYTTEATRRMNDILNHKMREFCIRLRNLVHSGATKGEISATQDVMMEEIFRVVCICLGNPPETFTWEYRDKDKNYQKIGPITPLEFYREHVKPLFNMEDKVVNDPRPQHKYNKLYTVEYLSNMVGGRKTLYNNQPIDFLKKMVAASIKDGEAVWFGCDVGKHFNSKLGLSDMNLYDHELVFGVSLKNMNKAERLTFGESLMTHAMTFTAVSEK

SEQ ID NO: 66688 - protein, 212 aa, Homo sapiens
MEMQDLTSPHSRLSGSSESPSGPKLGNSHINSNSMTPNGTEVKTEPMSSSETASTTADGSLNNFSGSAIGSSSFSPRPTHQFSPPQIYPSNLPQECNKLQPMPRTHSQDSRTAFPHMASRLKVDCHSLSHLDRQDFSAMAQASVPLNLDRHHTATRCKVAVLQHHQEYIQEIIHSQIPLDLIVHSRTIRLIPVLARVSTHSIITAHRIQHII

SEQ ID NO: 66689 - protein, 197 aa, Homo sapiens
MEAKGNGDMKEESAAQLGCCHRPMALGGTGGSLSPSLDFQLFRGDQVFSACRPLPDMVDAHGPSCASWLCPLPLAPGRSALLACLQDLDLNLCTPQPAPLGTDLQGLQEDALSMKHEPPGLQASSTDDKKFTVKYPQNKDKLGKQPERAGEGAPCPAFSSHNSSSPPPLQNRKSPSPLAFCPCPPVNSISKELPFLL

SEQ ID NO: 66690 - protein, 44 aa, Homo sapiens
MEVAVPVKQEAEGLALDSPWHRFRRFHLGDAPGPREALGLLRAL

SEQ ID NO: 66691 - protein, 65 aa, Homo sapiens
MSEKKQPVDLGLLEEDDEFEEFPAEDWAGLDEDEDAHVWEDNWDDDNVEDDFSNQLRAGYSELEE

SEQ ID NO: 66692 - protein, 322 aa, Homo sapiens
MASALTDRTSRAPSTYTYTSRPRALPCQRSRYRDSLTQPDEEPMHYGNIMYDRRVIRGNTYALQTGPLLFDFDLEVKPVLEVLVGKTIEQSLLEVMEEEELANLRASQREYEELRNSERAEVQRLEEQERRHREEKERRKKQQWEIMHKHNETSQKIAARAFAQRYLADLLPSVFGSLRDSGYFYDPIERDIEIGFLPWLMNEVEKTMEYSMVGRTVLDMLIREVVEKRLCMYEHGEDTHQSPEPEDEPGGPGAMTESLEASEFLEQSMSQTRELLLDGGYLQRTTYDRRSSQERKFMEERELLGQDEETAMRKSLGEEELS

SEQ ID NO: 66693 - protein, 807 aa, Homo sapiens
MEIPFEEVLERAKAGDPKAQTEVGKHYLQLAGDTDEELNSCTAVDWLVLAAKQGRREAVKLLRRCLADRRGITSENEREVRQLSSETDLERAVRKAALVMYWKLNPKKKKQVAVAELLENVGQVNEHDGGAQPGPVPKSLQKQRRMLERLVSSESKNYIALDDFVEITKKYAKGVIPSSLFLQDDEDDDELAGKSPEDLPLRLKVVKYPLHAIMEIKEYLIDMASRAGMHWLSTIIPTHHINALIFFFIVSNLTIDFFAFFIPLVIFYLSFISMVICTLKVFQDSKAWENFRTLTDLLLRFEPNLDVEQAEVNFGWNHLEPYAHFLLSVFFVIFSFPIASKDCIPCSELAVITGFFTVTSYLSLSTHAEPYTRRALATEVTAGLLSLLPSMPLNWPYLKVLGQTFITVPVGHLVVLNVSVPCLLYVYLLYLFFRMAQLRNFKGTYCYLVPYLVCFMWCELSVVILLESTGLGLLRASIGYFLFLFALPILVAGLALVGVLQFARWFTSLELTKIAVTVAVCSVPLLLRWWTKASFSVVGMVKSLTRSSMVKLILVWLTAIVLFCWFYVYRSEGMKVYNSTLTWQQYGALCGPRAWKETNMARTQILCSHLEGHRVTWTGRFKYVRVTDIDNSAESAINMLPFFIGDWMRCLYGEAYPACSPGNTSTAEEELCRLKLLAKHPCHIKKFDRYKFEITVGMPFSSGADGSRSREEDDVTKDIVLRASSEFKSVLLSLRQGSLIEFSTILEGRLGSKWPVFELKAISCLNCMAQLSPTRRHVKIEHDWRSTVHGAVKFAFDFFFFPFLSAA

SEQ ID NO: 66694 - protein, 155 aa, Homo sapiens
MIIISNNSLPITEWIRPNSKALVVILSSGALSIGQIILGGLAYVFRDWQTLHVVASVPFFVFFLLSRWLVESARWLIITNKLDEGLKALRKVARTNGIKNAEETLNIEVVRSTMQEELDAAQTKTTVCDLFRNPSMRKRICILVFLRKKNLKEKA

SEQ ID NO: 66695 - protein, 273 aa, Homo sapiens
MAQEVDTAQGAEMRRGAGAARGRASWCWALALLWLAVVPGWSRVSGIPSRRHWPVPYKRFDFRPKPDPYCQAKYTFCPTGSPIPVMEGDDDIEVFRLQAPVWEFKYGDLLGHLKIMHDAIGFRSTLTGKNYTMEWYELFQLGNCTFPHLRPEMDAPFWCNQGAACFFEGIDDVHWKENGTLVQVATISGFHHVGQDSIELRTSSDPPILASQSAGITDVSHCTRPTIRILPQRGTLYYLSLALLPGWSTVVRPRLTATSASRIQTIFLPQPPK

SEQ ID NO: 66696 - protein, 200 aa, Homo sapiens
MTEWETAAPAVAETPDIKLFGKWSTDDVQINDISLQDYIAVKEKYAKYLPHSAGRYAAKRFRKAQCPIVERLTNSMMMHGRNNGKKLMTVRIVKHAFEIIHLLTGENPLQVLVNAIINSGPREDSTRIGRAGTVRRQAVDVSPLRRVNQAIWLLCTGAREAAFRNIKTIAECLADELINAAKGSSNSYAIKKKDELERVA

SEQ ID NO: 66697 - protein, 206 aa, Homo sapiens
MWKDMEECQNKLSLIGTETLTDSNAQLSLLIMQVKCLTAELSQWQKKTPETIPLTEDVLITLGKEEFQKLRQDLEMVLSTKESKNEKLKEDLERIFNELKTKMLNIKEYKEKLLSTLGEFLEDHFPLPDRSVKKKKKNIQESSVNLITLHEMLEILINRLFDVPHDPYVKISDSFWPPYVELLLRNGIALRHPEDPTRIRLEAFHQ

SEQ ID NO: 66698 - protein, 543 aa, Homo sapiens
  MOD_RES (1)..(1): Any amino acid
XGTMTDTRRRVKVYTLNEDRQWDDRGTGHVSSGYVERLKGMSLLVRAESDGSLLLESKINPNTAYQKQQDTLIVWSEAENYDLALSFQEKAGCDEIWEKICQVQGKDPSVDITQDLVDESEEERFDDMSSPGLELPSCELSRLEEIAELVASSLPSPLRREKLALALENEGYIKKLLELFHVCEDLENIEGLHHLYEIIKGIFLLNRTALFEVMFSEECIMDVIGCLEYDPALSQPRKHREFLTKTAKFKEVIPISDPELKQKIHQTYRVQYIQDMVLPTPSVFEENMLSTLHSFIFFNKVEIVGMLQEDEKFLTDLFAQLTDEATDEEKRQELVNFLKEFCAFSQTLQPQNRDAFFKTLSNMGILPALEVILGMDDTQVRSAATDIFSYLVEYNPSMVREFVMQEAQQNDDDILLINLIIEHMICDTDPELGGAVQLMGLLRTLVDPENMLATANKTEKTEFLGFFYKHCMHVLTAPLLANTTEDKPSKDDFQTAQLLALVLELLTFCVEHHTYHIKNYIINKDILRRVLVLMASKHAFLAL

SEQ ID NO: 66699 - protein, 690 aa, Homo sapiens
MSLLFSRCNSIVTVKKNKRHMAEVNASPLKHFVTAKKKINGIFEQLGAYIQESATFLEDTYRNAELDPVTTEEQVLDVKGYLSKVRGISEVLARRHMKVAFFGRTSNGKSTVINAMLWDKVLPSGIGHTTNCFLRVEGTDGHEAFLLTEGSEEKRSAKTVNQLAHALHQDKQLHAGSLVSVMWPNSKCPLLKDDLVLMDSPGIDVTTELDSWIDKFCLDADVFVLVANSESTLMQTEKHFFHKVSERLSRPNIFILNNRWDASASEPEYMEEVRRQHMERCTSFLVDELGVVDRSQAGDRIFFVSAKEVLNARIQKAQGMPEGGGALAEGFQVRMFEFQNFERRFEECISQSAVKTKFEQHTVRAKQIAEAVRLIMDSLHMAAREQQVYCEEMREERQDRLKFIDKQLELLAQDYKLRIKQITEEVERQVSTAMAEEIRRLSVLVDDYQMDFHPSPVVLKVYKNELHRHIEEGLGRNMSDRCSTAITNSLQTMQQDMIDGLKPLLPVSVRSQIDMLVPRQCFSLNYDLNCDKLCADFQEDIEFHFSLGWTMLVNRFLGPKNSRRALMGYNDQVQRPIPLTPANPSMPPLPQGSLTQEEFMVSMVTGLASLTSRTSMGILVVGGVVWKAVGWRLIALSFGLYGLLYVYERLTWTTKAKERAFKRQFVEHASEKLQLVISYTGSNCSHQVQQ

SEQ ID NO: 66700 - protein, 756 aa, Homo sapiens
MLVTDLEYALDKKVEQDLWNHAFKNQITTLQGQAKNRANPNRSEVQANLSLFLEAASGFYTQLLQELCTVFNVDLPCRVKSSQLGIISNKQTHTSAIVKPQSSSCSYICQHCLVHLGDIARYRNQTSQAESYYRHAAQLVPSNGQPYNQLAILASSKGDHLTTIFYYCRSIAVKFPFPAASTNLQKALSKALESRDEVKTKWGVSDFIKAFIKFHGHVYLSKSLEKLSPLREKLEEQFKRLLFQKAFNSQQLVHVTVINLFQLHHLRDFSNETEQHTYSQDEQLCWTQLLALFMSFLGILCKCPLQNESQEESYNAYPLPAVKVSMDWLRLRPRVFQEAVVDERQYIWPWLISLLNSFHPHEEDLSSISATPLPEEFELQGFLALRPSFRNLDFSKGHQGITGDKEGQQRRIRQQRLISIGKWIADNQPRLIQCENEVGKLLFITEIPELILEDPSEAKENLILQETSVIESLAADGSPGLKSVLSTSRNLSNNCDTGEKPVVTFKENIKTREVNRDQGRSFPPKEVKSQTELRKTPVSEARKTPVTQTPTQASNSQFIPIHHPGAFPPLPSRPGFPPPTYVIPPPVAFSMGSGYTFPAGVSVPGTFLQPTAHSPAGNQVQAGKQSHIPYSQQRPSGPGPMNQGPQQSQPPSQQPLTSLPAQPTAQSTSQLQVQALTQQQQSPTKAVPALGKSPPHHSGFQQYQQADASKQLWNPPQVQGPLGKIMPVKQPYYLQTQDPIKLFEPSLQPPVMQQQP

SEQ ID NO: 66701 - protein, 186 aa, Homo sapiens
MKRHRPVSSSDSSDESPSTSFTSGSMYRIKSKIPNEHKKPAEVFRKDLISAMKLPDSHHINPDSYYLFADTWKEEWEKGVQVPASPDTVPQPSLRIIAEKVKDVLFIRPRKYIHCSSPDTTEPGYINIMELAASVCRYDLDDMDIFWLQELNEDLAEMGCGPVDENLMEKTVEVLERHCHENMNHA

SEQ ID NO: 66702 - protein, 45 aa, Homo sapiens
MVKVTFNSALAQKEAKKDEPKSGEEALIIPPDAVAVDCKFYLGPC

SEQ ID NO: 66703 - protein, 37 aa, Homo sapiens
  MOD_RES (1)..(1): Any amino acid
XSLKALKLNYLDLYLIHWPMGFKVPFTSSSRMDHELQ

SEQ ID NO: 66704 - protein, 196 aa, Homo sapiens
  MOD_RES (1)..(1): Any amino acid
XSRLALKHKTPEVHLKYAMFLEDEGKFEEAEAEFIRAGKPKEAVLMFVHNQDWEAAQRVAEAHDPDSVAEVLVGQARGALEEKDFQKAEGLLLRAQRPGLALNYYKEAGLWSDALRICKDYVPSQLEALQEEYEREATKKGARGVEGFVEQARHWEQAGEYSRAVDCYLKVRDSGNSGLAEKCWMKVAGIYGVPAG

SEQ ID NO: 66705 - protein, 118 aa, Homo sapiens
MLLLPSAADGRGTAITHALTSASTLCQVEPVGRWFEAFVKRRNRNASASFQELEDKKELSEESEDEELQLEEFPMLKTLDPKDWKNQDHYAVLGLGHVRYKATQRQIKAARKYLVILK

SEQ ID NO: 66706 - protein, 902 aa, Homo sapiens
ELAQPLRKEPEIITVTLKKQNGMGLSIVAAKGAGQDKLGIYVKSVVKGGAADVDGRLAAGDQLLSVDGRSLVGLSQERAAELMTRTSSVVTLEVAKQGAIYHGLATLLNQPSPMMQRISDRRGSGKPRPKSEGFELYNNSTQNGSPESPQLPWAEYSEPKKLPGDDRLMKNRADHRSSPNVANQPPSPGGKSAYASGTTAKITSVSTGNLCTEEQTPPPRPEAYPIPTQTYTREYFTFPASKSQDRMAPPQNQWPNYEEKPHMHTDSNHSSIAIQRVTRSQEELREDKAYQLERHRIEAAMDRKSDSDMWINQSSSLDSSTSSQEHLNHSSKSVTPASTLTKSGPGRWKTPAAIPATPVAVSQPIRTDLPPPPPPPPVHYAGDFDGMSMDLPLPPPPSANQIGLPSAQVAAAERRKREEHQRWYEKEKARLEEERERKRREQERKLGQMRTQSLNPAPFSPLTAQQMKPEKPSTLQRPQETVIRELQPQQQPRTIERRDLQYITVSKEELSSGDSLSPDPWKRDAKEKLEKQQQMHIVDMLSKEIQELQSKPDRSAEESDRLRKLMLEWQFQKRLQESKQKDEDDEEEEDDDVDTMLIMQRLEAERRARDEERRRQQQLEEMRKREAEDRARQEEERRRQEEERTKRDAEEKRRQEEGYYSRLEAERRRQHDEAARRLLEPEAPGLCRPPLPRDYEPPSPSPAPGAPPPPPQRNASYLKTQVLSPDSLFTAKFVAYNEEEEEEDCSLAGQDKYSSTRKSHGDLLPAPLKPRPPPCQPRPASDGVFLSNSFQPPSAKANSTAHKKGQPLPPPKKSSSYHPSHCKGPNSYPGSTGAAVGAHDACRDAKEKRSKSQDADSPGSSGAPENLTFKERQRLFSQGQDVSNKVKASRKLTELENELNTK

SEQ ID NO: 66707 - protein, 285 aa, Homo sapiens
MQRADSEQPSKRPRCDDSPRTPSNTPSAEADWSPGLELHPDYKTWGPEQVCSFLRRGGFEEPVLLKNIRENEITGALLPCLDESRFENLGVSSLGERKKLLSYIQRLVQIHVDTMKVINDPIHGHIELHPLLVRIIDTPQFQRLRYIKQLGGGYYVFPGASHNRFEHSLGVGYLAGCLVHALGEKQPELQISERDVLCVQIAGLCHDLGHGPFSHMFDGRFIPLARPEVKWTHEQGSVMMFEHLINSNGIKPVMEQYGLIPEEDICFIKEQIVGPLESPVEDSLF

SEQ ID NO: 66708 - protein, 67 aa, Homo sapiens
MGSRNSSSAGSGSGDPSEGLPRRGAGLRRSEEEEEEDEDVDLAQRPSEVGAGRRCSKFTIHSGPLGL

SEQ ID NO: 66709 - protein, 79 aa, Homo sapiens
  MOD_RES (1)..(1): Any amino acid
XRPPRPPPRGTPPRRHSFRKHLYLLRGLPGSGKTTLARDDWSEHWPGSLKIVPSDLLRHLLAGDFGQSSSFSGPYVPYM

SEQ ID NO: 66710 - protein, 719 aa, Homo sapiens
AQGLEVALTDLQSSRNNVRHHTEEITVDHLLVRRGQAFNLTLYFRNRSFQPGLDNIIFVVETGPLPDLALGTRAVFSLARHHSPSPWIAWLETNGATSTEVSLCAPPTAAVGRYLLKIHIDSFQGSVTAYQLGEFILLFNPWCPEDAVYLDSEPQRQEYVMNDYGFIYQGSKNWIRPCPWNYGQFEDKIIDICLKLLDKSLHFQTDPATDCALRGSPVYVSRVVCAMINSNDDNGVLNGNWSENYTDGANPAEWTGSVAILKQWNATGCQPVRYGQCWVFAAVMCTVMRCLGIPTRVITNFDSGHDTDGNLIIDEYYDNTGRILGNKKKDTIWNFHVWNECWMARKDLPPAYGGWQVLDATPQEMSNGVYCCGPASVRAIKEGEVDLNYDTPFVFSMVNADCMSWLVQGGKEQKLHQDTSSVGNFISTKSIQSDERDDITENYKYEEGSLQERQVFLKALQKLKARSFHGSQRGAELQPSRPTSLSQDSPRSLHTPSLRPSDVVQVSLKFKLLDPPNMGQDICFVLLALNMSSQFKDLKVNLSAQSLLHDGSPLSPFWQDTAFITLSPKEAKTYPCKISYSQYSQYLSTDKLIRISALGEEKSSPEKILVNKIITLSYPSITINVLGAAVVNQPLSIQVIFSNPLSEQVEDCVLTVEGSGLFKKQQKVFLGVLKPQHQASIILETVPFKSGQRQIQANMRSNKFKDIKGYRNVYVDFAL

SEQ ID NO: 66711 - protein, 617 aa, Homo sapiens
MDEEIVSEKQAEESHRQDSANLLIFILLLTLTILTIWLFKHRRARFLHETGLAMIYGLLVGLVLRYGIHVPSDVNNVTLSCEVQSSPTTLLVTFDPEVFFNILLPPIIFYAGYSLKRRHFFRNLGSILAYAFLGTAISCFVIGSIMYGCVTLMKVTGQLAGDFYFTDCLLFGAIVSATDPVTVLAIFHELQVDVELYALLFGESVLNDAVAIVLSSSIVAYQPAGDNSHTFDVTAMFKSIGIFLGIFSGSFAMGAATGVVTALVTKFTKLREFQLLETGLFFLMSWSTFLLAEAWGFTGVVAVLFCGITQAHYTYNNLSTESQHRTKQLFELLNFLAENFIFSYMGLTLFTFQNHVFNPTFVVGAFVAIFLGRAANIYPLSLLLNLGRRSKIGSNFQHMMMFAGLRGAMAFALAIRDTATYARQMMFSTTLLIVFFTVWVFGGGTTAMLSCLHIRVGVDSDQEHLGVPENERRTTKAESAWLFRMWYNFDHNYLKPLLTHSGPPLTTTLPACCGPIARCLTSPQAYENQEQLKDDDSDLILNDGDISLTYGDSTVNTEPATSSAPRRFMGNSSEDALDRELAFGDHELVIRGTRLVLPMDDSEPPLNLLDNTRHGPA

SEQ ID NO: 66712 - protein, 104 aa, Homo sapiens
MVHLTPEEKTAVNALWGKVNVDAVGGEALGRLLVVYPWTQRFFESFGDLSSPDAVMGNPKVKAHGKKVLGAFSDGLAHLDNLKGTFSQLSELHCDKLHVDPENF

SEQ ID NO: 66713 - protein, 114 aa, Homo sapiens
MASPSGLCVLVRLPKLICGGKTLPRTLLDILADGTILKVGVGCSEDASKLLQDYGLVVRGCLDLRYLAMRQRNNLLCNGLSLKSLAETVLNFPLDKSLLLRCSNWDAETLTEDQ

SEQ ID NO: 66714 - protein, 256 aa, Homo sapiens
MTQQPLRGVTSLRFNQDQSCFCCAMETGVRIYNVEPLMEKGHLDHEQVGSMGLVEMLHRSNLLALVGGGSSPKFSEISVLIWDDAREGKDSKEKLVLEFTFTKPVLSVRMRHDKIVIVLKNRIYVYSFPDNPRKLFEFDTRDNPKGLCDLCPSLEKQLLVFPGHKCGSLQLVDLASTKPGTSSAPFTINAHQSDIACVSLNQPGTVVASASQKGTLIRLFDTQSKEKLVELRRGTDPATLYCHLRRWDLPQICLHS

SEQ ID NO: 66715 - protein, 74 aa, Homo sapiens
EGTHVEKSQSASVESIPEVLEECTSPADHSDSASVHDMDYVNPRGVRFTQSSQKEDVHQKAYGDHHCGEPQDAL

SEQ ID NO: 66716 - protein, 112 aa, Homo sapiens
  MOD_RES (1)..(1): Any amino acid
XRVVTVAYGEPVHHVMQFDPADSGYLYLMTSHQMARVKVAACNVHSTCGDCVGAADAYCGWCALETRCTLQQDCTNSSQQHFWTSASEGPSRCPAMTVLPSEIDVRQEYPTT

SEQ ID NO: 66717 - protein, 193 aa, Homo sapiens
MTPALTALLCLGLSLGPRTRVQAGPFPKPTLWAEPGSVISWGSPVTIWCQGSQEAQEYRLHKEGSPEPLDRNNPLEPKNKARFSIPSMTEHHAGRYRCHYYSSAGWSEPSDPLEMVMTGAYSKPTLSALPSPVVASGGNMTLRCGSQKGYHHFVLMKEGEHQLPRTLDSQQLHSRGFQALFPVGPVTPSHRRV

SEQ ID NO: 66718 - protein, 67 aa, Homo sapiens
  MOD_RES (1)..(1): Any amino acid
XKGGTSREGGQTAPASTRLFQVRANSAGATRAVEVISRSWNTEGIGLPETSQLNDQISRHRNGGRGW

SEQ ID NO: 66719 - protein, 108 aa, Homo sapiens
  MOD_RES (1)..(1): Any amino acid
XGMPFIDVPTPISSASSEAASAVVSPSTDSGLEFSSQTTSKEDLTDLEQPGSPGYSTATEPGSSELGVPEQPDLQAQLWSPMVFPASASSSASSSPSPIHTTAITQRL

SEQ ID NO: 66720 - protein, 41 aa, Homo sapiens
  MOD_RES (1)..(1): Any amino acid
XFPAAAYGPVAAAAVAAARGSEHTWMSRQDWAKFLSGPLFR

SEQ ID NO: 66721 - protein, 211 aa, Homo sapiens
  MOD_RES (1)..(1): Any amino acid
XARSQEPIFRTEGPMAQNQASVLKNQAPVTRTQAPITGTLCQDARSNSHPVKPSRLNVFCCPHCSLTFSKKSYLSRHQKAHLTEPPNYCFHCSKSFSSFSRLVRHQQTHWKQKSYLCPICDLSFGEKEGLMDHWRGYKGKDLCQSSHHKCRVILGQWLGFSHDVPTMAGEEWKHGGDQSPPRIHTPRRRGLREKACKGDKTKEAVSILKHK

SEQ ID NO: 66722 - protein, 75 aa, Homo sapiens
  MOD_RES (1)..(1): Any amino acid
XLSIQPSLNAILIPPHLRSPAGTTTLTPSSQENVDSHRPTWPRPSYSCNSPPVLCPQGLLPPHPTLEGQGSGESS

SEQ ID NO: 66723 - protein, 218 aa, Homo sapiens
  MOD_RES (1)..(1): Any amino acid
XLQIPGGFWAAAVTVMLVMLSTPVAEARDFPKDFLVQFKGMCYFTNGTERVRGVARYIYNREEYGRFDSDVGEFQAVTELGRSIEDWNNYKDFLEQERAAVDKVCRHNYEAELRTTLQRQVEPTVTISPSRTEALNHHNLLVCSVTDFYPAQIKVQWFRNDQEETAGVVSTSLIRNGDWTFQILVMLEITPQRGDIYTCQVEHPSLQSPITVEWRLLH

SEQ ID NO: 66724 - protein, 186 aa, Homo sapiens
  MOD_RES (1)..(1): Any amino acid
XQKSCPHWRGGNEGGDQSEEEPRERSQAGGMGTLWSQESTPEERLPVEGSRPWAVARRVLTAILILGLLLCFSVLLFYNFQNCGPRPCETSVCLDLRDHYLASGNTSVAPCTDFFSFACGRAKETNNSFQELATKNKNRLRRILEVQNSWHPGSGEEKAFQFYNSCMDTLAIEAAGTGPLRQVIEE

SEQ ID NO: 66725 - protein, 45 aa, Homo sapiens
  MOD_RES (1)..(1): Any amino acid
XSWQENISLKELQSRGVCLLKLQVSSQRTGLYGRLLVTFEPRRYG

SEQ ID NO: 66726 - protein, 125 aa, Homo sapiens
MLRRRAQEEDSTVLIDVSPPEAEKRGSYGSTAHASEPGGQQAAACRAGSPAKPRIDFVLVWEEDLKLDRQQDSAARDRTDMHRTWRETFLDNLRAAGLCVDQVRGGCHGQGPRPCIHSVTHDLAA

SEQ ID NO: 66727 - protein, 26 aa, Homo sapiens
ISGWTQALPDMVVSHLFGKVRRCLVD

SEQ ID NO: 66728 - protein, 39 aa, Homo sapiens
NPLPETDSQPIPPSGGPFSECTMRGCRTSWHRSAMPGGR

SEQ ID NO: 66729 - protein, 50 aa, Homo sapiens
NSSAPLAEDIDPEKKQEEARKSPTPSAPVPLTEPAAQPGEGHAAPTNVVE

SEQ ID NO: 66730 - protein, 219 aa, Homo sapiens
MLLMVVSMACVGFFLVQRAGPHMGGQDKPFLSAWPSAVVPRGGHVTLRCHYRHRFNNFMLYKEDRIHVPIFHGRIFQEGFNMSPVTTAHAGNYTCRGSHPHSPTGWSAPSNPMVIMVTGNHRKPSLLAHPGPLVKSGERVILQCWSDIMFEHFFLHKEGISKDPSRLVGQIHDGVSKANFSIGSMMRALAGTYRCYGSVTHTPYQLSAPSDPLDIVVTG

SEQ ID NO: 66731 - protein, 378 aa, Homo sapiens
MQKPPLLLRRPLPPKFTKLSLHEKKTHTAKTGKIESLHVAFTEDETTSIKMDRTRFPDVLRNQSLTPINIQNIFLDHCVQERVTAISSPQKSTKHVREQIPDTATGSIFFPHCNSASTRIFGKQTNKMESSRKFKTMKDVYTEKRLENILILSSKFSKPKSTPGSVIAQKLEKMHPKHQPLPESPGYTYQHISRDLSATVPSPPPMTVSMKPEGQWPEHFKSTATLTLRVTEFPGFVSLPTPVLPRKPHRQSVIETLVTENGNIESVPKQIPPRPPEGLTKTEKIESEIHVVRGEGFKTVAATRYETITAMTNLAIVNCQVYGRNALNLKGFFILNCPDLTPLAFQLIYLNLSFNDLHYFPTEVSQLLLLCTDITCRE

SEQ ID NO: 66732 - protein, 283 aa, Homo sapiens
MKHENVIGLLDVFTPARSLEEFNDVYLVTHLMGADLNNIVKCQKLTDDHVQFLIYQILRGLKYIHSADIIHRDLKPSNLAVNEDCELKILDFGLARHTDDEMTGYVATRWYRAPEIMLNWMHYNQTVDIWSVGCIMAELLTGRTLFPGTDHIDQLKLILRLVGTPGAELLKKISSESARNYIQSLTQMPKMNFANVFIGANPLAVDLLEKMLVLDSDKRITAAQALAHAYFAQYHDPDDEPVADPYDQSFESRDLLIDEWKSLTYDEVISFVPPPLDQEEMES

SEQ ID NO: 66733 - protein, 80 aa, Homo sapiens
AVVVPSGEEQRYTCHVQHEGLPKPLTLRWEPSSQSTVPIVGIVAGLAVLAVVVIGAVVAAVMCRRKSSGGKGGSCSQAAC

SEQ ID NO: 66734 - protein, 38 aa, Homo sapiens
MSSGLRAADFPRWKRHISEQLRRRDRLQRQAFEEIILQ

SEQ ID NO: 66735 - protein, 35 aa, Homo sapiens
MALDFLAGCAGGVAGVLVGHPFDTVKGLSPSIAKV

SEQ ID NO: 66736 - protein, 291 aa, Homo sapiens
MLMPKKNRIAIYELLFKEGVMVAKKDVHMPKHPELADKNVPNLHVMKAMQSLKSRGYVKEQFAWRHFYWYLTNEGIQYLRDYLHLPPEIVPATLRRSRPETGRPRPKGLEGERPARLTRGEADRDTYRRSAVPPGADKKAEAGAGSATEFQFVLLVSSSRHPDRWIVPGGGMEPEEEPSVAAVREVCEEAGVKGTLGRLVGIFENQERKHRTYVYVLIVTEVLEDWEDSVNIGRKREWFKIEDAIKVLQYHKPVQASYFETLRQGYSANNGTPVVATTYSVSAQSSMSGIR

SEQ ID NO: 66737 - protein, 218 aa, Homo sapiens
MHLEGRDGRRYPGAPAVELLQTSVPSGLAELVAGKRRLPRGAGGADPSHSCPRGAAGQSSWAPAGQEFASFLTKGRSHSSLPQMSSSRSKDSCFTENTPLLRNSLQEKGSRCIPVYHPEFITAEESWEDSSADWERRYLLSREVSGLSASASSEKGDLLDSPHIRLRLSKLRRCVQWLKVMGLFAFVVLCSVTHNWTVYLNPRRSEHSVMSRTFEVLT

SEQ ID NO: 66738 - protein, 149 aa, Homo sapiens
METDLEVIIKDNSLVLTPSHIKAYMLMTLQGLEYLHQHWILHRDLKPNNLLLDENGVLKLADFGLAKSFGSPNRAYTHQVVTRWYRAPELLFGARMYGVGVDMWAVGCILAELLLRVPFLPGDSDLDQLTRIFETLGTPTEEQWPDMCS

SEQ ID NO: 66739 - protein, 45 aa, Homo sapiens
LCRSGALKELSKRLNHRNYLLESPHRFSVADLQQVRVSCFPRPDL

SEQ ID NO: 66740 - protein, 66 aa, Homo sapiens
MPQYQTWEEFSRAAEKLYLADPMKARVVLKYRHSDGNLCVKVTDDLVQWHLNYCTLRHGIAGGLET

SEQ ID NO: 66741 - protein, 35 aa, Homo sapiens
MEKPLFPLVPLHWFGFGYTALVVSGGIVGYVKTGI

SEQ ID NO: 66742 - protein, 146 aa, Homo sapiens
MAITLTLQTAEMQEGLLAVKVKEEEEEHSCGPESGLSRNNPHTREIFRRRFRQFCYQESPGPREALQRLQELCHQWLRPEMHTKEQILELLVLEQFLTILPEELQAWVRQHRPVSGEEAVTVLEDLERELDDPGEQMARLGLGMWS

SEQ ID NO: 66743 - protein, 379 aa, Homo sapiens
MGGRVFLVFLAFCVWLTLPGAETQDSRGCARWCPQDSSCVNATACRCNPGFSSFSEIITTPMETCDDINECATLSKVSCGKFSDCWNTEGSYDCVCSPGYEPVSGAKTFKNESENTCQDVDECQQNPRLCKSYGTCVNTLGSYTCQCLPGFKLKPEDPKLCTDVDECSSGQHQCDSSTVCFNTVGSYSCRCRPGWKPRHGIPNNQKDTVCEDMTFSTWTPPPGVHSQTLSRFFDKVQDLGRDYKPGLANNTIQSILQALDELLEAPGDLETLPRLQQHCVASHLLDGLEDVLRGLSKNLSNGLLNFSYPAGTELSLEVQKQVDRSVTLRQNQAVMQLDWNQAQKSGDPGGGSRADCHHLHGAERLSAVPPPGGPHFSPV

SEQ ID NO: 66744 - protein, 55 aa, Homo sapiens
MQTACQAVQHQRGRSNAAICHGKEESPWRSGRPGAYTTQLFGTIITARTGCQLLW

SEQ ID NO: 66745 - protein, 387 aa, Homo sapiens
MAALSGVRWLTRALVSAGNPGAWRGLSTSAAAHAASRSQAEDVRVEGSFPVTMLPGDGVGPELMHAVKEVFKAAAVPVEFQEHHLSEVQNMASEEKLEQVLSSMKENKVAIIGKIHTPMEYKGELASYDMRLRRKLDLFANVVHVKSLPGYMTRHNNLDLVIIREQTEGEYSSLEHESARGVIECLKIVTRAKSQRIAKFAFDYATKKGRGKVTAVHKANIMKLGDGLFLQCCEEVAELYPKIKFETMIIDNCCMQLVQNPYQFDVLVMPNLYGNIIDNLAAGLVGGAGVVPGESYSAEYAVFETGARHPFAQAVGRNIANPTAMLLSASNMLRHLNLEYHSSMIADAVKKVIKVGKVRTRDMGGYSTTTDFIKSVIGHLQTKGSNL

SEQ ID NO: 66746 - protein, 60 aa, Homo sapiens
MCNTNMSVPTDGAVTTSQIPASEQETLVRPKPLLLKLLKSVGAQKDTYTMKENHRTQVHL

SEQ ID NO: 66747 - protein, 83 aa, Homo sapiens
MSILKIHAREIFDSRGNPTVEVDLFTSKGLFRAAVPSGASTGIYEALELRDNDKTRYMGKGVSKAVEHINKTIAPALVSKKLN

SEQ ID NO: 66748 - protein, 1057 aa, Homo sapiens
MSSQQFPRLGAPSTGLSQAPSQIANSGSAGLINPAATVNDESGRDSEVSAREHMSSSSSLQSREEKQEPVVVRPYPQVQMLSTHHAVASATPVAVTAPPAHLTPAVPLSFSEGLMKPPPKPTMPSRPIAPAPPSTLSLPPKVPGQVTVTMESSIPQASAIPVATISGQQGHPSNLHHIMTTNVQMSIIRSNAPGPPLHIGASHLPRGAAAAAVMSSSKVTTVLRPTSQLPNAATAQPAVQHIIHQPIQSRPPVTTSNAIPPAVVATVSATRAQSPVITTTAAHATDSALSRPTLSIQHPPSAAISIQRPAQSRDVTTRITLPSHPALGTPKQQLHTMAQKTIFSTGTPVAAATVAPILATNTIPSATTAGSVSHTQAPTSTIVTMTVPSHSSHATAVTTSNIPVAKVVPQQITHTSPRIQPDYPAERSSLIPISGHRASPNPVAMETRSDNRPSVPVQFQYFLPTYPPSAYPLAAHTYTPITSSVSTIRQYPVSAQAPNSAITAQTGVGVASTVHLNPMQLMTVDASHARHIQGIQPAPISTQGIQPAPIGTPGIQPAPLGTQGIHSATPINTQGLQPAPMGTQQPQPEGKTSAVVLADGATIVANPISNPFSAAPAATTVVQTHSQSASTNAPAQGSSPRPSILRKKPATDGMAVRKTLIPPQPPDVASPRVESSMRSTSGSPRPAGAKPKSEIHVSMATPVTVSMETVSNQNNDQPTIAVPPTAQQPPPTIPTMIAAASPPSQPAVALSTIPGAVPITPPITTIAAAPPPSVTVGGSLSSVLGPPVPEIKVKEEVEPMDIMRPVSAVPPLATNTVSPSLALLANNLSMPTSDLPPGASPRKKPRKQQHVISTEEGDMMETNSTDDEKSTAKSLLVKAEKRKSPPKEYIDEEGVRYVPVRPRPPITLLRHYRNPWKAAYHHFQRYSDVRVKEEKKAMLQEIANQKGVSCRAQGWKVHLCAAQLLQLTNLEHDVYERLTNLQEGIIPKKKAATDDDLHRINELIQGNMQRCKLVMDQISEARDSMLKVLDHKDRVLKLLNKNGTVKKVSKLKRKEKV

SEQ ID NO: 66749 - protein, 153 aa, Homo sapiens
MHYVHVHRVTTQPRNKPQTKCPSGGQSQGPRGQFLDTVLAAMCPIAMLLTADPGMPPTCLWHTPHAKHKEHLSIHLNMVPKCVHMHVTHTHTNSGSRYVGKYILLIKWSLAMYFVQGSTLSTVTKMSHGKALPDSDTYIQFPNQQGPHTPSIP

SEQ ID NO: 66750 - protein, 157 aa, Homo sapiens
  MOD_RES (1)..(1): Any amino acid
XMTTPSLKTDGGRRTATSPPPTTSQTIISTIPSTAMHTRSTAAPIPILPERGEAIQEFPSSPMGQTPGTWSSSGGPWTSPPHSSSRRLASPLAPLSVIPSTSQTMARSSSQSQTTRFSPTPTHSQQASQAGTLWPWWLRSGTMLTSPLVGGPHFIRL

SEQ ID NO: 66751 - protein, 54 aa, Homo sapiens
MAACRALKAVLVDLSGTLHIEDAAVPGAQEALKRQAILQVQLTNMFVTWCFCNH

SEQ ID NO: 66752 - protein, 98 aa, Homo sapiens
MDVFMKGLSKAKEGVVAAAEKTKQGVAEAAGKTKEGVLYVVAEKTKEQVTNVGGAVVTGVTAVAQKTVEGAGSIAAATGFVKKDQLGKEGYQDYEPEA

SEQ ID NO: 66753 - protein, 497 aa, Homo sapiens
MAQVAVSTLPVEEESSSETRMVVTFLVSALESMCKELAKSKAEVACIAVYETDVFVVGTERGCAFVNARTDFQKDFAKYCVAEGLCEVKPPCPVNGMQVHSGETEILRKAVEDYFCFCYGKALGTTVMVPVPYEKMLRDQSAVVVQGLPEGVAFQHPENYDLATLKWILENKAGISFIINRPFLGPESQLGGPGMVTDAERSIVSPSESCGPINVKTEPMEDSGISLKAEAVSVKKESEDPNYYQYNMQGSHPSSTSNEVIEMELPMEDSTPLVPSEEPNEDPEAEVKIEGNTNSSSVTNSAAGVEDLNIVQVTVPDNEKERLSSIEKIKQLREQVNDLFSRKFGEAIGVDFPVKVPYRKITFNPGCVVIDGMPPGVVFKAPGYLEISSMRRILEAAEFIKFTVIRPLPGLELSNGLLEAKARGLLEARSLRPAWATQDPISTKNLKISWKQWLTPVAPATWQAKAGGSLKLRSLRQQRTIIAILHSSLGDRTRPCL

SEQ ID NO: 66754 - protein, 130 aa, Homo sapiens
MLMPHSEKRHQQIKNFLGSCDPQVILKQLEEHMNTGQLAGFSHQIRSLILNNIINKKEFGILAKTKYFQMLKMHAMNTNNITELVNYLANDLSLDEASVLITEYSKHCGKPVPPDTAPCEILKMFLSGLS

SEQ ID NO: 66755 - protein, 526 aa, Homo sapiens
MRDSSAPSSASSSVTDLYCTPHSSRSDLVLPGTAGDFSLSASLSACTLLYEGAVEPMQIDVDPQEDPQNAPDVNYVVENPSLDLEQYAASYSGLMRIERLQFIADHCPTLRVEALKMALSFVQRTFNVDMYEEIHRKLSEATRELQNAPDAIPESGVEPPALDTAWVEATRKKALLKLEKLDTDLKNYKGNSIKESIRRGHDDLGDHYLDCGDLSNALKCYSRARDYCTSAKHVINMCLNVIKVSVYLQNWSHVLSYVSKAESTPEIAERGERDSQTQAILTKLKCAAGLAELAARKYKQAAKCLLLASFDHCDFPELLSPSNVAIYGGLCALATFDRQELQRNVISSSSFKLFLELEPQVRDIIFKFYESKYASCLKMLDEMKDNLLLDMYLAPHVRTLYTQIRNRALIQYFSPYVSADMHRMAAAFNTTVAALEDELTQLILEGLISARVDSHSKILYARDVDQRSTTFEKSLLMGKEFQRRAKAMMLRAAVLRNQIHVKSPPREGSQGELTPANSQSRMSTNM

SEQ ID NO: 66756 - protein, 324 aa, Homo sapiens
MLPEDKEADSLRGNISVKAVKKEVEKKLRCLLADLPLPPELPGGDDLSKSPEEKKTATQLHSKRRPKICGPRYGETKEKDIDWGKRCVDKFDIIGIIGEGTYGQVYKARDKDTGEMVALKKVRLDNEKEGFPITAIREIKILRQLTHQSIINMKEIVTDKEDALDFKKDKGAFYLVFEYMDHDLMGLLESGLVHFNENHIKSFMRQLMEGLDYCHKKNFLHRDIKCSNILLNNRGQIKLADFGLARLYSSEESRPYTNKVITLWYRPPELLLGEERYTPAIDVWSCGCILGELFTKKPIFQANQELAQLELIRHEENEVSDKQI

SEQ ID NO: 66757 - protein, 247 aa, Homo sapiens
MLLILLSVALLALSSAESSSEDVSQEESLFLISGKPEGRRPQGGNQPQRPPPPPGKPQGPPPQGGNQSQGPPPPPGKPEGRPPQGGNQSQGPPPHPGKPERPPPQGGNQSQGTPPPPGKPERPPPQGGNQSHRPPPPPGKPERPPPQGGNQSQGPPPHPGKPEGPPPQEGNKSRSARSPPGKPQGPPQQEGNKPQGPPPPGKPQGPPPAGGNPQQPQAPPAGKPQGPPPPPQGGRPPRPAQGQQPPQ

SEQ ID NO: 66758 - protein, 127 aa, Homo sapiens
MMTKMLHVAHWNSAKYSSLAEAASKADGLAVIGVLMKGKRAPFTNFDPSTLLPSSLDFWTYPGSLTHPPLYESVTWIICKESISVSSEQLAQFRSLLSNVEGDNAVPMQHNNRPTQPLKGRTVRASF

SEQ ID NO: 66759 - protein, 588 aa, Homo sapiens
MFYLDLTLFHRAEETGEESFSVQNGSIHQKDAVNDDDFEPYLSSQTNQSNSYPPMSDPYMPSYYAPSIGFPYSLGEAAWSTAGDQPMPYLTTYGQMSNGEHHYIPDGVFSQPGALGNTPPFLGQHGFNFFPGNADFSTWGTSGSQGQSTQSSAYSSSYGYPPSSLGRAITDGQAGFGNDTLSKVPGISSIEQGMTGLKIGGDLTAAVTKTVGTALSSSGMTSIATNSVPPVSSAAPKPTSWAAIARKPAKPQPKLKPKGNVGIGGSAVPPPPIKHNMNIGTWDEKGSVVKAPPTQPVLPPQTIIQQPQPLIQPPPLVQSQLPQQQPQPPQPQQQQGPQPQAQPHQVQPQQQQLQNRWVAPRNRGAGFNQNNGAGSENFGLGVVPVSASPSSVEVHPVLEKLKAINNYNPKDFDWNLKNGRVFIIKSYSEDDIHRSIKYSIWCSTEHGNKRLDAAYRSLNGKGPLYLLFSVNGSGHFCGVAEMKSVVDYNAYAGVWSQDKWKGKFEVKWIFVKDVPNNQLRHIRLENNDNKPVTNSRDTQEVPLEKAKQVLKIIATFKHTTSIFDDFAHYEKRQEEEEAMRRERNRNKQ

SEQ ID NO: 66760 - protein, 136 aa, Homo sapiens
MLLKHLQRMVSVPQVKASALKVVTLTANDKTSVSFSSLPGQGVIYNVIVWDPFLNTSAAYIPAHTYACSFEAGEGSCASLGRVSSKVFFTLFALLGFFICFFGHRFWKTELFFIGFIIMGFFFYILITRLTPIKYD

SEQ ID NO: 66761 - protein, 375 aa, Homo sapiens
MPRVKAAQAGRQSSAKRHLAEQFAVGEIITDMAKKEWKVGLPIGQGGFGCIYLADMNSSESVGSDAPCVVKVEPSDNGPLFTELKFYQRAAKPEQIQKWIRTRKLKYLGVPKYWGSGLHDKNGKSYRFMIMDRFGSDLQKIYEANAKRFSRKTVLQLSLRILDILEYIHEHEYVHGDIKASNLLLNYKNPDQVYLVDYGLAYRYCPEGVHKEYKEDPKRCHDGTIEFTSIDAHNGVAPSRRGDLEILGYCMIQWLTGHLPWEDNLKDPKYVRDSKIRYRENIASLMDKCFPEKNKPGEIAKYMETVKLLDYTEKPLYENLRDILLQGLKAIGSKDDGKLDLSVVENGGLKAKTITKVGLMRDVESSSRGCLVIME

SEQ ID NO: 66762 - protein, 237 aa, Homo sapiens
MSCRHSFPLLLPCSLHSHAFLSSCHGDLCPLTSHTACFLACVPPQAGGHFQSSFTPCVRVINQIWAPVLHPLCHNSPCPPNLPGTRFGAMLDMLTDRCSTMCLLVNLALLYPGATLFFQISMSLDVASHWLHLHSSVVRGSESHKMIDLSGNPVLRIYYTSRPALFTLCAGNELFYCLLYLFHFSEGPLVGSVGLFRMGLWVTAPIALLKSLISVIHLITAARNMAALDAADRAKKK

SEQ ID NO: 66763 - protein, 46 aa, Homo sapiens
MTVTDFGWEDALHTVRAGRSCANPNVGFQRQLQEFEKHEVHQVSSS

SEQ ID NO: 66764 - protein, 59 aa, Homo sapiens
MAATAVAAAVAGTESAQGPPGPAASLELWLNKATDPSMSEQDWSAIQNFCEQVNTDPNG

SEQ ID NO: 66765 - protein, 1645 aa, Homo sapiens
MDDDSLDELVARSPGPDGHPQVGPADPAESSVGSSGDSGDDSDSEHGDGTDGEDEGASEEEDLEDRSGSEDSEDDGETLLEVAGTQGKLEAAGSFNSDDDAESCPICLNAFRDQAVGTPENCAHYFCLDCIVEWSKNANSCPVDRTLFKCICIRAQFGGKILRKIPVENTKASEEEEDPTFCEVCGRSDREDRLLLCDGCDAGYHMECLDPPLQEVPVDEWFCPECAAPGVVLAADAGPVSEEEVSLLLADVVPTTSRLRPRAGRTRAIARTRQSERVRATVNRNRISTARRVQHTPGRLGSSLLDEAIEAVATGLSTAVYQRPLTPRTPARRKRKTRRRKKVPGRKKTPSGPSAKSKSSATRSKKRQHRVKKRRGKKVKSEATTRSRIARTLGLRRPVHSSCIPSVLKPVEPSLGLLRADIGAASLSLFGDPYELDPFDSSEELSANPLSPLSAKRRALSRSALQSHQPVARPVSVGLSRRRLPAAVPEPDLEEEPVPDLLGSILSGQSLLMLGSSDVIIHRDGSLSAKRAAPVSFQRNSGSLSRGEEGFKGCLQPRALPSGSPAQGPSGNRPQSTGLSCQGRSRTPARTAGAPVRLDLPAAPGAVQARNLSNGSVPGFRQSHSPWFNGTNKHTLPLASAASKISSRDSKPPCRSVVPGPPLKPAPRRTDISELPRIPKIRRDDGGGRRDAAPAHGQSIEIPSACISRLTGREGTGQPGRGTRAESEASSRVPREPGVHTGSSRPPAPSSHGSLAPLGPSRGKGVGSTFESFRINIPGNMAHSSQLSSPGFCNTFRPVDDKEQRKENPSPLFSIKKTKQLRSEVYDPSDPTGSDSSAPGSSPERSGPGLLPSEITRTISINSPKAQTVQAVRCVTSYTVESIFGTEPEPPLGPSSAMSKLRGAVAAEGASDTEREEPTESQGLAARLRRPSPPEPWDEEDGASCSTFFGSEERTVTCVTVVEPEAPPSPDVLQAATHRVVELRPPSRSRSTSSSRSRKKAKRKRVSREHGRTRSGTRSESRDRSSRSASPSVGEERPRRQRSKAKSRRSSSDRSSSRERAKRKKAKDKSREHRRGPWGHSRRTSRSRSGSPGSSSYEHYESRKKKKRRSASRPRGRECSPTSSLERLCRHKHQRERSHERPDRKESVAWPRDRRKRRSRSPSSEHRAREHRRPRSREKWPQTRSHSPERKGAVREASPAPLAQGEPGREDLPTRLPALGEAHVSPEVATADKAPLQAPPVLEVAAECEPDDLDLDYGDSVEAGHVFDDFSSDAVFIQLDDMSSPPSPESTDSSPERDFPLKPALPPASLAVAAIQREVSLMHDEDPSQPPPLPEGTQEPHLLRPDAAEKAEAPSSPDVAPAGKEDSPSASGRVQEAARPEEVVSQTPLLRSRALVKRVTWNLQESESSAPAEDRAPRAPLHRPQKPREGAWDMEDVAPTGVRQAFSELPFPSHVLPEPGFPDTDPSQVYSPGLPPAPAQPSSIPPCALVSQPTVQFILQGSLPLVGCGAAQTLAPVPAALTPASEPASQATAASNSEEKTPAPRLAAEKTKKEEYMKKLHMQERAVEEVKLAIKPFYQKREVTKEEYKDILRKAVQKICHSKSGEINPVKVANLVKAYVDKYRHMRRHKKPEAGEEPPTQGAEG

SEQ ID NO: 66766 - protein, 303 aa, Homo sapiens
MTRARIGCFGPGGRARGTESAPEPSKRVPPGRSWQTQEVRQTRGANGLGPRAGSAGAKAPGPAQGAAQHGLGGSAGLRVRVSPLAMGSAALEILGLVLCLVGWGGLILACGLPMWQVTAFLDHNIVTAQTTWKGLWMSCVVQSTGHMQCKVYDSVLALSTEVQAARALTVSAVLLAFVALFVTLAGAQCTTCVAPGPAKARVALTGGVLYLFCGLLALVPLCWFANIVVREFYDPSVPVSQKYELGAALYIGWAATALLMVGGCLLCCGAWVCTGRPDLSFPVKYSAPRRPTATGDYDKKNYV

SEQ ID NO: 66767 - protein, 234 aa, Homo sapiens
MLQSYISEIGRSAKSYCEHTARTQPTLSDIVVTLVEMGFNVDTLPAYAKRSQRMVITAPPVTNQPVTPKALTAGQNRPHPPHIPSHFPEFPDPHTYIKTPTYREPVSDYQVLREKAASQRRDVERALTRFMAKTGETQSLFKDDVSTFPSLLPSELEMQQMEETDSSEQDEQTDTENLALHISMEDSGAEKENTSVLQQNPSLSGSRNGEENIIDNPYLRPVKKPKIRRKKSLS

SEQ ID NO: 66768 - protein, 571 aa, Homo sapiens
MPPNINWKEIMKVDPDDLPRQEELADNLLISLSKVEVNELKSEKQENVIHLFRITQSLMKMKAQEVELALEEVEKAGEEQAKFENQLKTKVMKLENELEMAQQSAGGRDTRFLRNEICQLEKQLEQKDRELEDMEKELEKEKKVNEQLALRNEEAENENSKLRRENKRLKKKNEQLCQDIIDYQKQIDSQKETLLSRRGEDSDYRSQLSKKNYELIQYLDEIQTLTEANEKIEVQNQEMRKNLEESVQEMEKMTDEYNRMKAIVHQTDNVIDQLKKENDHYQLQVQELTDLLKSKNEEDDPIMVAVNAKVEEWKLILSSKDDEIIEYQQMLHNLREKLKNAQLDADKSNVMALQQGIQERDSQIKMLTEQVEQYTKEMEKNTCIIEDLKNELQRNKGASTLSQQTHMKIQSTLDILKEKTKEAERTAELAEADAREKDKELVEALKRLKDYESGVYGLEDAVVEIKNCKNQIKIRDREIEILTKEINKLELKISDFLDENEALRERVGLEPKTMIDLTEFRNSKHLKQQQYRAENQILLKEIESLEEERLDLKKKIRQMAQERGKRSATSE

SEQ ID NO: 66769 - protein, 120 aa, Homo sapiens
MSEQYFPALQKFTVLDLGMVLLPVASQMEASCLVIQLVQEQTKEPSKNPLLGKKRALLLSEPSLLRTVQQIPGVGKVKAPLLLQKFPSIQQLSNASIGELEQVVGQAVAQQIHAFFTQPR

SEQ ID NO: 66770 - protein, 131 aa, Homo sapiens
MSPVLHFYVRPSGHEGAAPGHTRRKLQGKLPELQGVETELCYNVNWTAEALPSAEETKKLMWLFGCPLLLDDVARESWLLPGSNDLLLEVGPRLNFSTPTSTNIVSVCRATGLGPVDRVETTRRYRLSVWL

SEQ ID NO: 66771 - protein, 68 aa, Homo sapiens
MHQTYSRHCRPEERWSQEGWNIPANGFNICRCLNIGMKLRLWNNLNKSNILGALKIKRREIRAPFLLP

SEQ ID NO: 66772 - protein, 64 aa, Homo sapiens
MPTKTLRITTRKTPCGEGSKTWDRFQMRIHKRLIDLHSPSEIVKQITSISIEPGVEVEVTIADA

SEQ ID NO: 66773 - protein, 4404 aa, Homo sapiens
  MOD_RES (1)..(1): Any amino acid
XTTEDTLITGSKTAAPVTSTGSTTATLEGQSTAASSRTSNQDISASSQNHQTKSTETTSKAQTDTLTQMMTSTLFSSPSVHNVMETAPPDEMTTSFPSSVTNTLMMTSKTITMTTSTDSTLGNTEETSTAGTESSTPVTSAVSITAGQEGQSRTTSWRTSIQDTSASSQNHWTRSTQTTRESQTSTLTHRTTSTPSFSPSVHNVTGTVSQKTSPSGETATSSLCSVTNTSMMTSEKITVTTSTGSTLGNPGETSSVPVTGSLMPVTSAALVTFDPEGQSPATFSRTSTQDTTAFSKNHQTQSVETTRVSQINTLNTLTPVTTSTVLSSPSGFNPSGTVSQETFPSGETTTSSPSSVSNTFLVTSKVFRMPTSRDSTLGNTEETSLSVSGTISAITSKVSTIWWSDTLSTALSPSSLPPKISTAFHTQQSEGAETTGRPHERSSFSPGVSQEIFTLHETTTWPSSFSSKGHTTWSQTELPSTSTGAATRLVTGNPSTGTAGTIPRVPSKVSAIGEPGEPTTYSSHSTTLPKTTGAGAQTQWTQETGTTGEALLSSPSYSVTQMIKTATSPSSSPMLDRHTSQQITTAPSTNHSTIHSTSTSPQESPAVSQRGHTQAPQTTQESQTTRSVSPMTDTKTVTTPGSSFTASGHSPSEIVPQDAPTISAATTFAPAPTGDGHTTQAPTTALQAAPSSHDATLGPSGGTSLSKTGALTLANSVVSTPGGPEGQWTSASASTSPDTAAAMTHTHQAESTEASGQTQTSEPASSGSRTTSAGTATPSSSGASGTTPSGSEGISTSGETTRFSSNPSRDSHTTQSTTELLSASASHGAIPVSTGMASSIVPGTFHPTLSEASTAGRPTGQSSPTSPSASPQETAAISRMAQTQRTRTSRGSDTISLASQATDTFSTVPPTPPSITSTGLTSPQTETHTLSPSGSGKTFTTALISNATPLPVTYASSASTGHTTPLHVTDASSVSTGHATPLPVTSPSSVSTGHTTPLPVTDTSSESTGHVTPLPVTSFSSASTGDSTPLPVTDTSSASTGHVTPLPVTSLSSASTGDTTPLPVTDTSSASTGHATSLPVTDTSSVSTGHTTPLPVTDTSSASTGHATSLPVTDTSSVSTGHTTPLHVTDASSASTGQATPLPVTSLSSVSTGDTTPLPVTSPSSASTGHATPLLVTDTSSASTGHATPLPVTDASSVSTDHATSLPVTIPSAASTGHTTPLPVTDTSSASTGQATSLLVTDTSSVSTGDTTPLPVTSTSSASTGHVTPLHVTSPSSASTGHATPLPVTSLSSASTGDTMPLPVTSPSSASTGDTTPLPVTDASSVSTGHTTPLHVTDASSASTGQATPLPVTSLSSVSTGDTTPLPVTSPSSASTGHATPLLVTDTSSASTGHATPLPVTDASSVSTDHATSLPVTIPSAASTGHTTPLPVTDTSSASTGQATSLLVTDTSSVSTGDTTPLPVTSTSSASTGHVTPLHVTSPSSASTGHATPLPVTSLSSASTGDTMPLPVTSPSSASTGDTTPLPVTDASSVSTGHTTPLPVTSPSSASTGHTTPLPVTDTSSASKGDTTPLPVTSPSSASTGHTTPLPVTDTSSASTGDTTPLPVTNASSLSTGHATPLHVTSPSSASTGHATPLPVTSTSSASTGHATPLPVTGLSSATTDDTTRLPVTDVSSASTGQATPLPVTSLSSVSTGDTTPLPVTSPSSASTGHASPLLVTDASSASTGQATPLPVTDTSSVSTAHATPLPVTGLSSASTDDTTRLPVTDVSSASTGQAIPLPVTSPSSASTGDTTPLPVTDASSASTGDTTSLPVTIPSSASSGHTTSLPVTDASSVSTGHATSLLVTDASSVSTGDTTPLPVTDTNSASTGDTTPLHVTDASSVSTGHATSLPVTSLSSASTGDTTPLPVTSPSSASSGHTTPLPVTDASSVPTGHATSLPVTDASSVSTGHATPLPVTDASSVSTGHATPLPVTDTSSVSTGQATPLPVTSLSSASTGDTTPLPVTDTSSASTGHAPHLPVTGLSSASTGDTTRLPVTNVSSASTGHATPLPVTSTSSASTGDTTPLPGTDTSSVSTGHTTPLLVTDASSVSTGDTTRLPVTSPSSASTGHTTPLHVTDASSVSTGHTTPLPVTDTSSASTGQATSLLVTDTSSVSTGDTTPLPVTSTSSASTGHVTPLHVTSPSSASTGHATPLPVTSLSSASTGDTTPLPVTDTSSVSTGHTTPLPVTSPSSASTGHTTPLPVTDTSSASKGDTTPLPVTSPSSASTGHTTPLPVTDTSSASTGDTTPLPVTNASSLSTGHATPLHVTSPSSASTGHATPLPVTSTSSASTGHATPLPVTSTSSASTGHATPLPVTDNSSVSTGHATPLPVTGLSSATTDDTTRLPVTDVSSASTGQATPLPVTSLSSVSTGDTTPLPVTSPSSASTGHASPLLVTDASSASTGQATPLPVTDTSSVSTAHATPLPVTGLSSASTDDTTRLPVTDVSSASTGQAIPLPVTSPSSASTGDTTPLPVTDASSASTGDTTSLPVTIPSSASSGHTTSLPVTDASSVSTGHATSLLVTDASSVSTGDTTPLPVTDTNSASTGDTTPLHVTDASSVSTGHATSLPVTSLSSASTGDTTPLPVTSPSSASSGHTTSLPVTDASSVSTGHATSLPVTIPSSASSGHTTPLPVTDASSVPTGHATSLPVTDASSVSTGHATPLPVTDASSVSTGHATPLPVTDTSSVSTGQATPLPVTSLSSASSTGDTTPLPVTDTSSASTGQDTPLPVTSLFSVSTGDTTPLPVTSPSSASTGHATHLLVTDASSVSTGHATSLLVTDASSVSTGHATALHVTDASSLSTGDTTPLPVTSPSSASTGDTTPLPVTDTSSVSTGHATSLPVTDTSSASTGHATSLPVTDTSSASTGQATPLPVTSPSSASTGHAIPLLVTDTSSASTGQATPLPVTSLSSASTGDTTPLPVTDASSVSTGHATSLPVTSLSSVSTGDTTPLPVTSPSSASTGHATPLHVTSPSSASTGHATPLPVTSLSSASTGDTTPLPVTSPSSASTGHATPLHVTDASSVSTGDTTPLPVTSPSSASSGHTTPLPVTDASSASTGDTTPLPVTDTSSASTGHATHLPVTGLSSASTGDTTRLPVTDVSSASTGHATPLPVTSTSSASTGDTTPLPGTDTSSVSTGHTTPLLVTDASSVSTGDTTRLPVTSPSSASTGHTTPLPVTDTPSASTGDTTPLPVTNASSLSTRHATSLHVTSPSSASTGHATPLPVTDTSAASTGHATPLPVTSTSSASTGDTTPLPVTDTSSASTGHATPLPVTNTSSVSTGHATPLHVTSPSSASTGHTTPLPVTDASSVSTGHATSLPVTDASSVSTGHATPLPVTDASSVSTGHATPLPLTSLSSVSTGDTTPLPVTDTSSASTGQATPLPVTSLSSVSTGDTTPLPVTDTSSASTGHATSLPVTDTSSASTGHATPLHVTSPSSASTGHATPLPVTDTSSASTGHATPLPVTSLSSVSTGDTTPLPVTSPSSASTGHATPLLVTDASSASTGQATPLPVTSLSSVSTGDTTPLPVTSPSSASTGHATSLPVTDTSSASTGDTTSLPVTDTSSAYTGDTTSLPVTDTSSSSTGDTTPLLVTETSSASTGDTTPVPVTDTSSVSTGHATPLPVTGLSSASTGDTTRLPVTDISSASTGQATPLPVTNTSSVSTGDTMPLPVTSPSSASTGHATPLPVTSTSSASTGHATPVPVTSTSSASTGHTTPLPVTSPSSASTGHTTPLPVTDTSSASTGDTTPLPVTNASSLSTGHTTPLHVTIPSSASTGDTSTLPVTGASSASTGHATPLPVTDTSSVSTGHATPLPVTSFSSVSTGDTTPLPVTDASSASTGHATPLPVTDTSSASTGDTTPLPVTDASSASTGQATPLPVTSLSSVSTGDTTPLPVTIPSSASSGHTTSLPVSDTSSASTGQATPLPVTSLSSVSTGDTTPLLVTDASSVSTGHATPLPVTDTSSASTGDTTRLPVTDTSSASTGQATPLPVTSLSSVSTGDTTPLLVTNTSSVSTGHATSLPVTIPSSSSSGHTTPLPVTSTSSVSTGHVTPLHVTSPSSSSTGQATPLPVTSTSSSSTGQATPLPVTSTSSASTGHATPLPVTDASSVSTGHATPLPVTDTSSASTGDTTPLPVTDTSSASTGQATPLPVTSLSSVSTGHATPLAVSSATSASTVSSDSPLKMETSGMTTPSLKTDGGRRTATSPPPTTSQTIISTIPSTAMHTRSTAAPIPILPERGEAIQEFPSSPMGQTPGTWSSSGGPWTSPPHSSSRRLASPLAPLSVIPSTSQTMARSSSQSQTTRFSPTPTHSQQASQAGTLWPWWLRSGTMLTSPLVGGPHFIRNTRRSMVNTAC

SEQ ID NO: 66774 - protein, 203 aa, Homo sapiens
MDTLEEVTWANGSTALPPPLAPNISVPHRCLLLLYEDIGTSRVRYWDLLLLIPNVLFLIFLLWKLPSARAKIRITSSPIFITFYILVFVVALVGIARAVVSMTVSTSNAATVADKILWEITRFFLLAIELSVIILGLAFGHLESKSSIKRVLAITTVLSLAYSVTQGTLEILYPDAHLSAEDFNIYGHGGRQFWLVSSCFFFL

SEQ ID NO: 66775 - protein, 412 aa, Homo sapiens
MAHSPVQSGLPGMQNLKADPEELFTKLEKIGKGSFGEVFKGIDNRTQKVVAIKIIDLEEAEDEIEDIQQEITVLSQCDSPYVTKYYGSYLKLEPGPLDETQIATILREILKGLDYLHSEKKIHRDIKAANVLLSEHGEVKLADFGVAGQLTDTQIKRNTFVGTPFWMAPEVIKQSAYDSKADIWSLGITAIELARGEPPHSELHPMKVLFLIPKNNPPTLEGNYSKPLKEFVEACLNKEPSFRPTAKELLKHKFILRNAKKTSYLTELIDRYKRWKAEQSHDDSSSEDSDAETDGQASGGSDSGDWIFTIREKDPKNLENGALQPSDLDRNKMKDIPKRPFSQCLSTIISPLFAELKEKSQACGGNLGSIEELRGAIYLAEEACPGISDTMVAQLVQRLQRYSLSGGGTSSH

SEQ ID NO: 66776 - protein, 353 aa, Homo sapiens
MASLYQRFTGKINTSRSFPAPPEASHLLGGQGPEEDGGAGAKPLGPRAQAAAPRERGGGGGGAGGRPRFQYQARSDGDEEDELVGSNPPQRNWKGIAIALLVILVICSLIVTSVILLTPAEDNSLSQKKKVTVEDLFSEDFKIHDPEAKWISDTEFIYREQKGTVRLWNVETNTSTVLIEGKKIESLRAIRYEISPDREYALFSYNVEPMKKVKSRKLTLPHSKSCDSLAVSQACSPACHQGCFLHYITMSLPLHCLRDYVSAVNGYSTALPACHVQGGPVSDIPWRPWLEDCRRVPGGRTANGTRLRSHAPAALRQHCPLSYECGRCEASHLLTPGIMHSSYRQISGQRATE

SEQ ID NO: 66777 - protein, 75 aa, Homo sapiens
MAFSGCQAPYLSPAVPFSGTIQGGLQDGFQITVNGAVLSCSGTRRRVCGVQHEAERNMGARGEEDAHALPEGDAL

SEQ ID NO: 66778 - protein, 71 aa, Homo sapiens
MERQQQQQQQLRNEACLHSCAGKLIHSNHRLMAAYVQLMPALVQRRIADYEAASAVPGVAAEQPGVSPSGS

SEQ ID NO: 66779 - protein, 420 aa, Homo sapiens
MAQAGVVGEVTQVLCAAGGALELPELRRRLRMGLSADALERLLRQRGRFVVAVRAGGAAAAPERVVLAASPLRLCRAHQGSKPGCVGLCAQLHLCRFMVYGACKFLRAGKNCRNSHSLTTEHNLSVLRTHGVDHLSYNELCQLLFQNDPWLLPEICQHYNKGDGPHGSCAFQKQCIKLHICQYFLQGECKFGTSCKRSHDFSNSENLEKLEKLGMSSDLVSRLPTIYRNAHDIKNKSSAPSRVPPLFVPQGTSERKDSSGSVSPNTLSQEEGDQICLYHIRKSCSFQDKCHRVHFHLPYRWQFLDRGKWEDLDNMELIEEAYCNPKIERILCSESASTFHSHCLNFNAMTYGATQARRLSTASSVTKPPHFILTTDWIWYWSDEFGSWQEYGRQPSFRKTWSMAQLKRFAADPNTCLPRM

SEQ ID NO: 66780 - protein, 823 aa, Homo sapiens
MTVLQEPVQAAIWQALNHYAYRDAVFLAERLYAEVHSEEALFLLATCYYRSGKAYKAYRLLKGHSCTTPQCKYLLAKCCVDLSKLAEGEQILSGGVFNKQKSHDDIVTEFGDSACFTLSLLGHVYCKTDRLAKGSECYQKSLSLNPFLWSPFESLCEIGEKPDPDQTFKFTSLQNFSNCLPNSCTTQVPNHSLSHRQPETVLTETPQDTIELNRLNLESSNSKYSLNTDSSVSYIDSAVISPDTVPLGTGTSILSKQVQNKPKTGRSLLGGPAALSPLTPSFGILPLETPSPGDGSYLQNYTNTPPVIDVPSTGAPSKKSVARIGQTGTKSVFSQSGNSREVTPILAQTQSSGPQTSTTPQVLSPTITSPPNALPRRSSRLFTSDSSTTKENSKKLKMKFPPKIPNRKTKSKTNKGGITQPNINDSLEITKLDSSIISEGKISTITPQIQAFNLQKAAAGLMSLLREMGKGYLALCSYNCKEAINILSHLPSHHYNTGWVLCQIGRAYFELSEYMQAERIFSEVRRIENYRVEGMEIYSTTLWHLQKDVALSVLSKDLTDMDKNSPEAWCAAGNCFSLQREHDIAIKFFQRAIQVDPNYAYAYTLLGHEFVLTEELDKALACFRNAIRVNPRHYNAWYGLGMIYYKQEKFSLAEMHFQKALDINPQSSVLLCHIGVVQHALKKSEKALDTLNKAIVIDPKNPLCKFHRASVLFANEKYKSALQELEELKQIVPKESLVYFLIGKVYKKLGQTHLALMNFSWAMDLDPKGANNQIKEAIDKRYLPDDEEPITQEEQIMGTDESQESSMTDADDTQLHAAESDEF

SEQ ID NO: 66781 - protein, 141 aa, Homo sapiens
MQLRFARLSEHATAPTRGSARAAGYDLYSAYDYTIPPMEKAVVKTDIQIALPSGCYGRVAPRSGLAAKHFIDVGAGVIDEDYRGNVGVVLFNFGKEKFEVKKGDRIAQLICERIFYPEIEEVQALDDTERGSGGFGSTGKN

SEQ ID NO: 66782 - protein, 254 aa, Homo sapiens
MGCSAKARWAAGALGVAGLLCAVLGAVMIVMVPSLIKQQVLKNVRIDPSSLSFNMWKEIPIPFYLSVYFFDVMNPSEILKGEKPQVRERGPYVYREFRHKSNITFNNNDTVSFLEYRTFQFQPSKSHGSESDYIVMPNILVLGAAVMMENKPMTLKLIMTLAFTTLGERAFMNRTVGEIMWGYKDPLVNLINKYFPGMFPFKDKFGLFAELNNSDSGLFTVFTGVQNISRIHLVDKWNGLSKIHEANVQGVRGV

SEQ ID NO: 66783 - protein, 174 aa, Homo sapiens
MSSDRQRSDDESPSTSSGSSDADQRDPAAPEPEEQEERKPSATQQKKNTKLSSKTTAKLSTSAKRIQKELAEITLDPPPNCSAGPKGDNIYEWRSTILGPPGSVYEGGVFFLDITFSSDYPFKPPKVTFRTRIYHCNINSQGVICLDILKDNWSPALTISKVLLSICSLLTDCN

SEQ ID NO: 66784 - protein, 46 aa, Homo sapiens
  MOD_RES (1)..(1): Any amino acid
XVYDIICNLGFQLRENCDINSIVTQNGEVCWKTITDCVSYTESVIS

SEQ ID NO: 66785 - protein, 105 aa, Homo sapiens
MTLTRWTGMIIGPPRTNYENRIYSLKVECGPKYPEAPPSVRFVTKINMNGINNSSGMVDARSIPVLAKWQNSYSIKVVLQELRRLMMSKENMKLPQPPEGQTYNN

SEQ ID NO: 66786 - protein, 644 aa, Homo sapiens
MAEGEDMQTFTSIMDALVRISTSMKNMEKELLCPVCQEMYKQPLVLPCTHNVCQACAREVLGQQGYIGHGGDPSSEPTSPASTPSTRSPRLSRRTLPKPDRLDRLLKSGFGTYPGRKRGALHPQVIMFPCPACQGDVELGERGLAGLFRNLTLERVVERYRQSVSVGGAILCQLCKPPPLEATKGCTECRATFCNECFKLFHPWGTQKAQHEPTLPTLSFRPKGLMCPDHKEEVTHYCKTCQRLVCQLCRVRRTHSGHKITPVLSAYQALKDKLTKSLTYILGNQDTVQTQICELEEAVRHTEVSGQQAKEEVSQLVRGLGAVLEEKRASLLQAIEECQQERLARLSAQIQEHRSLLDGSGLVGYAQEVLKETDQPCFVQAAKQLHNRIARATEALQTFRPAASSSFRHCQLDVGREMKLLTELNFLRVPEAPVIDTQRTFAYDQIFLCWRLPPHSPPAWHYTVEFRRTDVPAQPGPTRWQRREEVRGTSALLENPDTGSVYVLRVRGCNKAGYGEYSEDVHLHTPPAPVLHFFLDSRWGASRERLAISKDQRAVRSVPGLPLLLAADRLLTGCHLSVDVVLGDVAVTQGRSYWACAVDPASYLVKVGVGLESKLQESFQGAPDVISPRSDPSGRDGVWGSWWE

SEQ ID NO: 66787 - protein, 581 aa, Homo sapiens
MGFQPPAALLLRLFLLQGILRLLWGDLAFIPPFIRMSGPAVSASLVGDTEGVTVSLAVLQDEAGILPIPTCGVLNNETEDWSVTVIPGAKVLEVTVRWKRGLDWCSSNETDSFSESPCILQTLLVSASHNSSCSAHLLIQVEIYANSSLTHNASENVTVIPNQVYQPLGPCPCNLTAGACDVRCCCDQECSSNLTTLFRRSCFTGVFGGDVNPPFDQLCSAGTTTRGVPDWFPFLCVQSPLANTPFLGYFYHGAVSPKQDSSFEVYVDTDAKDFADFGYKQGDPIMTVKKAYFTIPQVSLAGQCMQNAPVAFLHNFDVKCVTNLELYQERDGIINAKIKNVALGGIVTPKVIYEEATDLDKFITNTETPLNNGSTPRIVNVEEHYIFKWNNNTISEINVKIFRAEINAHQKGIMTQRFVVKFLSYNSGNEEELSGNPGYQLGKPVRALNINRMNNVTTLHLWQSAGRGLCTSATFKPILFGENVLSGCLLEVGINENCTQLRENAVERLDSLIQATHVAMRGNSDYADLSDGWLEIIRFHSVTQAGVQWCNHSSLPPHPPRLKGSSRLSLPSSWNHRCRCP

SEQ ID NO: 66788 - protein, 371 aa, Homo sapiens
MWQLWASLCCLLVLANARSRPSFHPLSDELVNYVNKRNTTWQAGHNFYNVDMSYLKRLCGTFLGGPKPPQRVMFTEDLKLPASFDAREQWPQCPTIKEIRDQGSCGSCWAFGAVEAISDRICIHTNAHVSVEVSAEDLLTCCGSMCGDGELVVFLSTLGKFSVCSVENQCSTRKGTRSLVCCNGGYPAEAWNFWTRKGLVSGGLYESHVGCRPYSIPPCEHHVNGSRPPCTGEGDTPKCSKICEPGYSPTYKQDKHYGYNSYSVSNSEKDIMAEIYKNGPVEGAFSVYSDFLLYKSGVYQHVTGEMMGGHAIRILGWGVENGTPYWLVANSWNTDWGDNGFFKILRGQDHCGIESEVVAGIPRTDQYWEKI

SEQ ID NO: 66789 - protein, 301 aa, Homo sapiens
MAVTDSLSRAATVLATVLLLSFGSVAASHIEVTVENFLRVLTGRIPPSTPRSKRLLSDDRSNILIYMTGHGGNGFLKFQDSEEITNIELADAFEQMWQKRRYNELLFIIDTCQGASMYERFYSPNIMALASSQVGEDSLSHQPDPAIGVHLMDRYTFYVLEFLEEINPASQTNMNDLFQVCPKSLCVSTPGHRTDLFQRDPKNVLITDFFGSVRKVEITTETIKLQQDSEIMESSYKEDQMDEKLMEPLKYAEQLPVAQIIHQKPKLKDWHPPGGFILGLWALIIMVFFKTYGIKHMKFIF

SEQ ID NO: 66790 - protein, 7 aa, Homo sapiens
GYSSSWY

SEQ ID NO: 66791 - protein, 158 aa, Homo sapiens
MLGLWGQRLPAAWVLLLLPFLPLLLLAAPAPHRESYKPVIVVHGLFDSSYSFRHLLEYINEMGQYGDTDYLKWLFPTSMRSNLYRICYSPWGQEFSICNYWHDPHHDDLYLNASSFLALINGERDHPNATVWRKNFLRVGHLVLIGGPDDGVITPWQS

SEQ ID NO: 66792 - protein, 65 aa, Homo sapiens
MKISVAAIPFFLLITIALGTKTESSSRGPYHPSECCFTYTTYKIPRQRIMDYYETNSQCSKPGIV

SEQ ID NO: 66793 - protein, 299 aa, Homo sapiens
MDKLNKITVPASQKLRQLQKMVHDIKNNEGGIMNKIKKLKVKAPPSVPRRDYASESPADEEEQWSDDFDSDYENPDEHSDSEMYVMPAEENADDSYEPPPVEQETRPVHPALPFARGTASGRNSGAWETKSPPPAAPSPLPRAGKKPTTPLKTTPVASQQNASSVCEEKPIPAERHRGSSHRQEAVQSPVFPPAQKQIHQKPIPLPRFTEGGNPTVDGPLPSFSSNSTISEQEAGVLCKPWYAGACDRKSAEEALHRSNKYFGSVAEIIRNHQHSPLVLIDSQNNTKDSTRLKYAVKVS

SEQ ID NO: 66794 - protein, 275 aa, Homo sapiens
MLLMVVSMACVGNHRKPSLLAHPGPLVKSGERVILQCWSDIMFEHFFLHKEWISKDPSRLVGQIHDGVSKANFSIGSMMRALAGTYRCYGSVTHTPYQLSAPSDPLDIVVTGLYEKPSLSAQPGPKVQAGESVTLSCSSRSSYDMYHLSREGGAHERRLPAVRKVNRTFQADFPLGPATHGGTYRCFGSFRHSPYEWSDPSDPLLVSVTGNPSSSWPSPTEPSSKSGNLRHLHILIGTSVVKIPFTILLFFLLHRWCSNKKKCCCNGPRACREQK

SEQ ID NO: 66795 - protein, 87 aa, Homo sapiens
MGSGCRIECIFFSEFHPTLGPKITYQVPEDFISRELFDTVQVYIITKPELQNKLITVYGKEADRLSCVHRTQEVQPQCSPLQPGLRV

SEQ ID NO: 66796 - protein, 128 aa, Homo sapiens
MVKLLTDSRLPEEEHEFFHILNLFFPSIYDVKYLMKSCKNLKGGLQEVADQLDLQRIGRQHQAGSDSLLTGMAFFRMKELFFEDSIDDAKYCGRLYGLGTGVAQKQNEDVDSAQEKMSILAIINNMQQ

SEQ ID NO: 66797 - protein, 141 aa, Homo sapiens
MVTIILLLSCDFWAVKNVTGRLMVGLRWWNHIDEDGKSHWVFESRKESSQENKTVSEAESRIFWLGLIACPVLWVIFAFSALFSFRVKWLAVVIMGVVLQGANLYGYIRCKVRSRKHLTSMATSYFGKQFLRQNTGDDQTS

SEQ ID NO: 66798 - protein, 55 aa, Homo sapiens
MAQLRIKHQEELTELHKKRGELAQLVIDLNNQMQRKDREMQMNEAKIAECLQTIS

SEQ ID NO: 66799 - protein, 331 aa, Homo sapiens
MAFNKFNVLHWHIVDDQSFPYQSITFPELSNKGSYSLSHVYTPNDVRMVIEYARLRGIRVLPEFDTPGHTLSWGKGQKDLLTPCYSRQNKLDSFGPINPTLNTTYSFLTTFFKEISEVFPDQFIHLGGDEVEFKCWESNPKIQDFMRQKGFGTDFKKLESFYIQKVLDIIATINKGSIVWQEVFDDKAKLAPGTIVEVWKDSAYPEELSRVTASGFPVILSAPWYLDLISYGQDWRKYYKVEPLDFGGTQKQKQLFIGGEACLWGEYVDATNLTPRLWPRASAVGERLWSSKDVRDMDDAYDRLTRHRCRMVERGIAAQPLYAGYCNHENM

SEQ ID NO: 66800 - protein, 374 aa, Homo sapiens
MSLLVVSMACVGFFLLQGAWPHEGVHRKPSLLAHPGRLVKSEETVILQCWSDVMFEHFLLHREGMFNDTLRLIGEHHDGVSKANFSISRMTQDLAGTYRCYGSVTHSPYQVSAPSDPLDIVIIGLYEKPSLSAQLGPTVLAGENVTLSCSSRSSYDMYHLSREGEAHERRLPAGPKVNGTFQADFPLGPATHGGTYRCFGSFHDSPYEWSKSSDPLLVSVTGNPSNSWPSPTEPSSKTERMFHHVGQACLKLPTSSDPTVSACQSNPRHLHILIGTSVVIILFILLFFLLHRWCSNKKNAAVMDQESAGNRTANSEDSDEQDPQEVTYTQLNHCVFTQRKITRPSQRPKTPPTDIIVYTELPNAESRSKVVSCP

SEQ ID NO: 66801 - protein, 898 aa, Homo sapiens
MPILLFLIDTSASMNQRTDLGTSYLDIAKGAVELFLKLRARDPASRGDRYMLVTYDEPPYCIKAGWKENHATFMSELKNLQASGLTTLGQALRSSFDLLNLNRLISGIDNYGQGRNPFFLEPSILITITDGNKLTSTAGVQEELHLPLNSPLPGSELTKEPFRWDQRLFALVLRLPGVASTEPEQLGSVPTDESAITQMCEVTGGRSYCVRTQRMLNQCLESLVQKVQSGVVINFEKTGPDPLPIGEDGLMDSSRPSNSFAAQPWHSCHKLIYVRPNSKTGVPVGHWPIPESFWPDQNLPSLPPRTSHPVVRFSCVDCEPMVIDKLPFDKYELEPSPLTQYILERKSPHTCWQVFVTSSGKYNELGYPFGYLKASTTLTCVNLFVMPYNYPVLLPLLDDLFKVHKLKPNLKWRQAFDSYLKTLPPYYLLPLKKALRMMGAPNLISDNLDCGLSYSVISYLKKLSQQTKLESERILASVGKKPPQEIGIKVKNHSGGGMSLTHNKNFRKLLKEITGETALRLTELNTKEFAGFQIGLLNKDLKPQTYRNAYDIPRRGLLDQLTRMRSNLLKTHKFIVGQDEDSLHSVPVAQMGNYQEYLKTLASPLREIDPDQPKRLHTFGNPFKQDKKGMMIDEADEFVAGPQNKVKRPGEPNSPMSSKRRRSMSLLLRKPQTPPTVTNHVGGKGPPSASWFPSYPNLIKPTLVHTDATIIHDGHEEKMENGQITPDGFLSKSAPSELINMTGDLMPPNQVDSLSDDFTSLSKDGLIQKPGSNAFVGGAKNCSLSVDDQKDPVASTLGAMPNTLQITPAMAQGINADIKHQLMKEVRKFGRKYERIFILLEEVQGPLEMKKQFVEFTIKEAARFKRRVLIQYLEKVLEKINSHHLHNNISHINSRSSC

SEQ ID NO: 66802 - protein, 228 aa, Homo sapiens
MRTHTRGAPSVFFIYLLCFVSAYITDENPEVMIPFTNANYDSHPMLYFSRAEVAELQLRAASSHEHIAARLTEAVHTMLSSPLEYLPPWDPKDYSARWNEIFGNNLGALAMFCVLYPENIEARDMAKDYMERMAAQPSWLVKDAPWDEVPLAHSLVGFATAYDFLYNYLSKTQQEKFLEVIANASGYMYETSYRRGWGFQYLHNHQPTNCMALLTGSLVLMNQGMMAA

SEQ ID NO: 66803 - protein, 89 aa, Homo sapiens
MELGLGGLSTLSHCPWPRQQAPLGLSAQPALWPTLAALALLSSVAEASLGSAPRSPAPREGPPPVLASPAGHLPGGRTARWCSGRARRP

SEQ ID NO: 66804 - protein, 307 aa, Homo sapiens
MATQVMGQSSGGGGLFTSSGNIGMALPNDMYDLHDLSKAELAAPQLIMLANVALTGEVNGSCCDYLVGEERQMAELMPVGDNNFSDSEEGEGLEESADIKGEPHGLENMELRSLELSVVEPQPVFEASGAPDIYSSNKDLPPETPGAEDKGKSSKTKPFRCKPCQYEAESEEQFVHHIRVHSAKKFFVEESAEKQAKARESGSSTAEEGDFSKGPIRCDRCGYNTNRYDHYTAHLKHHTRAGDNERVYKCIICTYTTVSEYHWRKHLRNHFPRKVYTCGKCNYFSDRKNNYVQHVRTHTERLPCPRR

SEQ ID NO: 66805 - protein, 205 aa, Homo sapiens
  MOD_RES (1)..(1): Any amino acid
XWQGETWYYGPCGKRMKQFPEVIKYLSRNVVHSVRREHFSFSPRMPVGDFFEERDTPEWVQLSAEEIPSRIQAITGKRGRPRNTEKAKTKEVPKVKRGRGRPPKVKITELLNKTDNRPLKKLEAQETLNEEDKAKIAKSKKKMRQKVQRGECQTTIQGQARNKRKQETKSLKQKEAKKKSKAEKEKGKTKQEKLKEKVKREKKEK

SEQ ID NO: 66806 - protein, 263 aa, Homo sapiens
MEEELAIQQGQLETTLKELQTLRNMQKEAIAAHKDITTLLHSLEQGMKVLATRELISRKLNLGQYKGPIQYMVWREMQDTLCPGLSPLTLDPKTAHPNLVLSKSQTSVWHGDIKKIMPDDPERFDSSVAVLGSRGFTSGKWYWEVEVAKKTKWTVGVVRESIIRKGSCPLTPEQGFWLLRLRNQTDLKALDLPSFSLTLTNNLDKVGIYLDYEGGQLSFYNAKTMTHIYTFSNTFMEKLYPYFCPCLNDGGENKEPLHILHPQ

SEQ ID NO: 66807 - protein, 153 aa, Homo sapiens
TSALRSLRFLQILRMIRMDRRGGTWKLLGSVVYAHSKELVTAWYIGFLCLILASFLVYLAEKGENDHFDTYADALWWGLPRVASGRPACPQGCEQALRVTRACGPTDHADHHWLRGQVPPDLERQAPCGNLHPHRCLLLRAACSSGAAQAEAL

SEQ ID NO: 66808 - protein, 139 aa, Homo sapiens
MATNFLAHEKIWFDKFKYDDAERRFYEQMNGPVAGASRQENGASVILRDIARARENIQKSLAGSSGPGASSGTSGDHVVQELQQAISKLEARLNVLEKSSPGHRATAPQTQHVSPMRQVEPPAKKPATPAEDDEDDDID

SEQ ID NO: 66809 - protein, 65 aa, Homo sapiens
MVLVLHHILIAVVQFLRRGQQVFLKPDEPPPPPQPCADSLQPAWTPLQRSQDPQGVETTDWRTPC

SEQ ID NO: 66810 - protein, 146 aa, Homo sapiens
MGSTVPRSASVLLLLLLLRRAEQPCGAELTFELPDNAKQCFHEEVEQGVKFSLDYQVITGGHYDVDCYVEDPQGNTIYRETKKQYDSFTYRAEVKGVYQFCFSNEFSTFSHKTVYFDFQVGDEPPILPDMGNRVTALTQGFRVFCL

SEQ ID NO: 66811 - protein, 88 aa, Homo sapiens
MELWGRMLWALLSGPGRRGSTRGWAFSSWQPQPPLAGLSSAIELVSHWTGVFEKRGIPEARESISEPEAGTLDPALDLSATTVYPGAE

SEQ ID NO: 66812 - protein, 127 aa, Homo sapiens
MAGAIIENMSTKKLCIVGGILLVFQIIAFLVGGLIAPGPTTAVSYMSVKCVDARKNHHKTKWFVPWGPNHCDKIRDIEEAIPREIEANDIVFSVHIPLPHMEMSPWFQFMLFILQLDIAFKLNNQIS

SEQ ID NO: 66813 - protein, 493 aa, Homo sapiens
MAQHDFAPAWLNFPTPPSSTKSSLNFEKHSENFAWTENRYDVNRRRHNSSDGFDSAIGRPNGGNFGRKEKNGWRTHGRNGTENINHRGGYHGGSSRSRSSIFHAGKSQGLHENNIPDNETGRKEDKRERKQFEAEDFPSLNPEYEREPNHNKSLAAGVWGLHAQTHTYPTKKISQAPLLEYPPNPKSRAPRMLVIKKGNTKDLQLSGFPVVGNLPSQPVKNGTGPSVYKGLVPKPAAPPTKPTQWKSQTKENKVGTSFPHESTFGVGNFNAFKSTAKNFSPSTNSVKECNRSNSSSPVDKLNQQPRLTKLTRMRTDKKSEFLKALKRDRVEEEHEDESRAGSEKDDDSFNLHNSNSTHQERDINRNFDENEIPQENGNASVISQQIIRSSTFPQTDVLSSSLEAEHRLLKEMGWQEDSENDETCAPLTEDEMREFQVISEQLQKNGLRKNGILKNGLICDFKFGPWKNSTFKPTTENDDTETSSSDTSDDDDV

SEQ ID NO: 66814 - protein, 403 aa, Homo sapiens
MKPVKKKKTEEPELEPLCCCEYIDRNGEKNHVATCLCDCQDLDEGCDRWITCKSLQPETCERIMDTISDRLRIPWLRGAKKVNISIIPPLVLLPVFLHVASWHFLLGVVVLTSLPVLALWYYYLTHRRKEQTLFFLSLGLFSLGYMYYVFLQEVVPKGRVGPVQLAVLTCGLFLILLALHRAKKNPGYLSNPASGDRSLSSSQLECLSRKGQEKTKGFPGADMSGSLNNRTTKDDPKGSSKMPAGSPTKAKEDWCAKCQLVRPARAWHCRICGICVRRMDHHCVWINSCVGESNHQAFILALLIFLLTSVYGITLTLDTICRDRSVFTALFYCPGVYANYSSALSFTCVWYSVIITAGMAYIFLIQLINISYNVTEREVQQALRQKTGRRLLCGLIVDTGLLG

SEQ ID NO: 66815 - protein, 154 aa, Homo sapiens
MPPNINWKEIMKVDPDDLPRQEELADNLLISLSKVEVNELKSEKQENVIHLFRITQSLMKMKAQEVELALEEVEKAGEEQAKFENQLKTKVMKLENELEMAQQSAGGRDTRFLRNEICQLEKQLEQKDRELEDMEKELEKEKKVNEQVKHFFFP

SEQ ID NO: 66816 - protein, 821 aa, Homo sapiens
MASLGANPRRTPQGPRPGAASSGFPSPAPVPGPREAEEEEVEEEEELAEIHLCVLWNSGYLGIAYYDTSDSTIHFMPDAPDHESLKLLQRVLDEINPQSVVTSAKQDENMTRFLGKLASQEHREPKRPEIIFLPSVDFGLEISKQRLLSGNYSFIPDAMTATEKILFLSSIIPFDCLLTPPGDLRFTPIPLLIPSQVRALGGLLKFLGRRRIGVELEDYNVSVPILGFKKFMLTHLVNIDQDTYSVLQIFKSESHPSVYKVASGLKEGLSLFGILNRCHCKWGEKLLRLWFTRPTHDLGELSSRLDVIQFFLLPQNLDMAQMLHRLLGHIKNVPLILKRMKLSHTKVSDWQVLYKTVYSALGLRDACRSLPQSIQLFRDIAQEFSDDLHHIASLIGKVVDFEGSLAENRFTVLPNIDPEIDEKKRRLMGLPSFLTEVARKELENLDSRIPSCSVIYIPLIGFLLSIPRLPSMVEASDFEINGLDFMFLSEEKLHYRSARTKELDALLGDLHCEIRDQETLLMYQLQCQVLARAAVLTRVLDLASRLDVLLALASAARDYGYSRPRYSPQVLGVRIQNGRHPLMELCARTFVPNSTECGGDKGRVKVITGPNSSGKSIYLKQVGLITFMALVGSFVPAEEAEIGAVDAIFTRIHSCESISLGLSTFMIDLNQVAKAVNNATAQSLVLIDEFGKGTNTVDGLALLAAVLRHWLARGPTCPHIFVATNFLSLVQLQLLPQGPLVQYLTMETCEDGNDLVFFYQVSDLIRSGKPIKPVKDLLKKNQMENCQTLVDKFMKLDLEDPNLDLNVFMSQEVLPAATSIL

SEQ ID NO: 66817 - protein, 179 aa, Homo sapiens
MQYVIYGIASFFFLYGIILLAEGFYTTSAVKELHGEFKTTACGRCISGMFVFLTYVLGVAWLGVFGFSAVPVFMFYNIWSTCEVIKSPQTNGTTGVEQICVDIRQYGIIPWNAFPGKICGSALENICNTNEFYMSYHLFIVACAGAGATVIALLIYMMATTYNYAVLKFKSREDCCTKF

SEQ ID NO: 66818 - protein, 116 aa, Homo sapiens
MDAELEFAIQPNTTGKQLFDQVVKTVGLREVWFFGLQYVDSKGYSTWLKLNKKVTQQDVKKENPLQFKFRAKFFPEDVSEELIQEITQRLFFLQVKEAILNDEIYCPPETAVLLAS

SEQ ID NO: 66819 - protein, 178 aa, Homo sapiens
MHRPEAMLLLLTLALLGGPTWAGKMYGPGGGKYFSTTEDYDHEITGLRVSVGLLLVKSVQVKLGDSWDVKLGALGGNTQEVTLQPGEYITKVFVAFQAFLRGMVMYTSKDRYFYFGKLDGQISSAYPSQEGQVLVGIYGQYQLLGIKSIGFEWNYPLEEPTTEPPVNLTYSANSPVGR

SEQ ID NO: 66820 - protein, 152 aa, Homo sapiens
MFPPSGSTGLIPPSHFQARPLSTLPRMAPTWLSDIPLVQPPGHQDVSERRLDTQRPQVTMWERDVSSDRQEPGRRGRSWGLEGSQALSQQAEVIVRQLQELRRLEEEVRLLRETSLQQKMRLEAQAMELEALARAEKAGRAEAEGLRAALAG

SEQ ID NO: 66821 - protein, 575 aa, Homo sapiens
MGSGARFPSGTLRVRWLLLLGLVGPVLGAARPGFQQTSHLSSYEIITPWRLTRERREAPRPYSKQVSYVIQAEGKEHIIHLERNKDLLPEDFVVYTYNKEGTLITDHPNIQNHCHYRGYVEGVHNSSIALSDCFGLRGLLHLENASYGIEPLQNSSHFEHIIYRMDDVYKEPLKCGVSNKDIEKETAKDEEEEPPSMTQLLRRRRAVLPQTRYVELFIVVDKERYDMMGRNQTAVREEMILLANYLDSMYIMLNIRIVLVGLEIWTNGNLINIVGGAGDVLGNFVQWREKFLITRRRHDSAQLVLKKGFGGTAGMAFVGTVCSRSHAGGINVFGQITVETFASIVAHELGHNLGMNHDDGRDCSCGAKSCIMNSGASGSRNFSSCSAEDFEKLTLNKGGNCLLNIPKPDEAYSAPSCGNKLVDAGEECDCGTPKECELDPCCEGSTCKLKSFAECAYGDCCKDCRFLPGGTLCRGKTSECDVPEYCNGSSQFCQPDVFIQNGYPCQNNKAYCYNGMCQYYDAQCQVIFGSKAKAAPKDCFIEVNSKGDRFGNCGFSGNEYKKCATGLSLKFHAPF

SEQ ID NO: 66822 - protein, 179 aa, Homo sapiens
MRSGKASCTLETVWEDKHKYEEAERRFYEHEATQAAASAQQLPAEGPAMNGPGQDDPEDADEAEAPDGGSRRDPRKSQDSRKPLQKKRKRSPKSGLGPADLALLGLSAERVWLDKSLFDQAESSYRQKLADVAAQAAWPPALAPWGLCTHGNQVACHHVTWGIWVNKSSFDQAERAFVE

SEQ ID NO: 66823 - protein, 245 aa, Homo sapiens
PPRHLHVVRPMSHYTTPMVLQQAAIPIQINVGTTVTMTGPAPPPATSHPRVIRISHQSVEPVVMMHMNIQDSGTQPGGVPSAPTGPLGPPGHGQTLGQQVPGFPTAPTRVVIARPTPPQARPSHPGGPPVSGTLQGAGLGTNASLAQMVSGLVGQLLMQPVLVAQGTPGMAPPPAPATASASAGTTNTATTAGPAPGGPAQPPPTPQPSMADLQFSQLLGNLLGPAGPGAGGSGVASPTITVAMP

SEQ ID NO: 66824 - protein, 295 aa, Homo sapiens
MGQTGKKSEKGPVCWRKRVKSEYMRLRQLKRFRRADEVKSMFSSNRQKILERTEILNQEWKQRRIQPVHILTSVSSLRGTREVEDETVLHNIPYMGDEVLDQDGTFIEELIKNYDGKVHGDRECGFINDEIFVELVNALGQYNDDDDDDDGDDPEEREEKQKDLEDHRDDKESRPPRKFPSDKIFEAISSMFPDKGTAEELKEKYKELTEQQLPGALPPECTPNIDGPNAKSVQREQSLHSFHTLFCRRCFKYDCFLHPFHATPNTYKRKNTETALDNKPCGPQCYQHLPLLPRN

SEQ ID NO: 66825 - protein, 196 aa, Homo sapiens
MAVEFDGGVVMGSDSRVSAGEAVVNRVFDKLSPLHERIYCALSGSAADAQAVADMAAYQLELHGIELEEPPLVLAAANVVRNISYKYREDLSAHLMVAGWDQREGGQVYGTLGGMLTRQPFAIGGSGSTFIYGYVDAAYKPGMSPEECRRFTTDAIALAMSRDGSSGGVIYLVTITAAGVDHRVILGNELPKFYDE

SEQ ID NO: 66826 - protein, 152 aa, Homo sapiens
MRAATFTYSPLLYWINKRRRYGMNAAINTGPAPAVTKTETEVQNPDVLWDLDIPEGRSHADQDSNPKAEAPAPLQPALQLAPQQPQARSPFPLPIFQEVPFAPPLCNLPPLLNHSVSYPLATCPERNVLFHSLLNLAQEDHSFNAKPFPSEL

SEQ ID NO: 66827 - protein, 469 aa, Homo sapiens
MLQVHRTGLGRLGVSLSKGLHHKAVLAVRREDVNAWERRAPLAPKHIKGITNLGYKVLIQPSNRRAIHDKDYVKAGGILQEDISEACLILGVKRPPEEKLMSRKTYAFFSHTIKAQEANMGLLDEILKQEIRLIDYEKMVDHRGVRVVAFGQWAGVAGMINILHGMGLRLLALGHHTPFMHIGMAHNYRNSSQAVQAVRDAGYEISLGLMPKSIGPLTFVFTGTGNVSKGAQAIFNELPCEYVEPHELKEVSQTGDLRKVYGTVLSRHHHLVRKTDAVYDPAEYDKHPERYISRFNTDIAPYTTCLINGIYWEQNTPRLLTRQDAQSLLAPGKFSPAGVEGCPALPHKLVAICDISADTGGSIEFMTECTTIEHPFCMYDADQHIIHDSVEGSGILMCSIDNLPAQLPIEATECFGDMLYPYVEEMILSDATQPLESQNFSPVVRDGTCSVTFNGHQEKGFGSWIWLHI

SEQ ID NO: 66828 - protein, 339 aa, Homo sapiens
MEKGLSSTIRVVGHVPGEFPVSVWVTAADCWMCQPVARGFVVLPITEFLVGDLVVTQNTSLPWPSSYLTKTVLKVSFLLHDPSNFLKTALFLYSWDFGDGTQMVTEDSVVYYNYSIIGTFTVKLKVVAEWEEVEPDATRAVKQKTGDFSASLKLQETLRGIQVLGPTLIQTFQKMTVTLNFLGSPPLTVCWRLKPECLPLEEGECHPVSVASTAYNLTHTFRDPGDYCFSIRAENIISKTHQYHKIQVWPSRIQPAVFAFPCATLITVMLAFIMYMTLRNATQQKDMVENPEPPSGVRCCCQMCCGPFLLETPSEYLEIVRENHGLLPPLYKSVKTYTV

SEQ ID NO: 66829 - protein, 121 aa, Homo sapiens
MAETYDFLFKFLVIGSAGTGKSCLLHQFIENKFKQDSNHTIGVEFGSRVVNVGGKTVKLQIWDTAGQERFRSVTRSYYRGAAGALLVYDITRADVPGDQRSHRRERGGGVPQVCPHYPQQD

SEQ ID NO: 66830 - protein, 214 aa, Homo sapiens
  MOD_RES (1)..(1): Any amino acid
XKIIRARKSIPDTYAEHLIAGGLMTQEEVSEIKSSYYAKLNDHLNNMAHYRPPALNLQAHWQGLAQPEAQITTWSTGVPLDLLRFVGMKSVEVPRELQMHSHLLKTHVQSRMEKMMDGIKLDWATAEALALGSLLAQGFNVRLSGQDVGRGTFSQRHAIVVCQETDDTYIPLNHMDPNQKGFLEERPSGSYKAASSSSFHMATMGLGQTTHPVE

SEQ ID NO: 66831 - protein, 171 aa, Homo sapiens
MKPVKHLLTTSNKSANVPALTTKKGLHNLPLSPELKEKHNAKLIHDKIEPMVLRSPPTGESILRYALPIPSSKTKNLLPEDEMIGKIIKHLKMVVSTLEETYGHCDQNGEEPFVKHEHEELSLSVGDDMNSFLTYCSQFAAQLEEALKEEQNILESLFKWFQWQVNQMEEG

SEQ ID NO: 66832 - protein, 115 aa, Homo sapiens
MDSFDLALLQEWDLESLWGEDILNQRNDSLVVEFQSSASRCRSVYEPDRNALRRKERERRNQETQQDDGTFNSSYSLFSEPYKTNKGDELSNRIQNTLGNYDEMKDFLTDRSNQS

SEQ ID NO: 66833 - protein, 234 aa, Homo sapiens
MEKCKGTSRMAGTTSADVKMSSSEEVSWISWFCGLRGNEFFCEVDEDYIQDKFNLTGLNEQVPHYRQALDMILDLEPDEELEDNPNQSDLIEQAAEMLYGLIHARYILTNRGIAQMLEKYQQGDFGYCPRVYCENQPMLPIGLSDIPGEAMVKLYCPKCMDVYTPKSSRHHHTDGAYFGTGFPHMLFMVHPEYRPKRPANQFVPRLYGFKIHPMAYQLQLQAASNFKSPVKTIR

SEQ ID NO: 66834 - protein, 90 aa, Homo sapiens
MEAVNLLSSNRYTEKQIGYLFISVLVNSNSELIRLINNAIKNDLASRNPTFMGLALHCIASVGSREMAEAFAGEIPKVLVAGDTMDSVKQ

SEQ ID NO: 66835 - protein, 7 aa, Homo sapiens
MMPAQYA

SEQ ID NO: 66836 - protein, 294 aa, Homo sapiens
MNRNGKETKSNYRVRVYQIPGKPEIVDSASELTAGVPNKVGTCVSEGSYPAGTLSWHLDGKPLVPNEKGVSVKEQTRRHPETGLFTLQSELMVTPARGGDPRPTFSCSFSPGLPRHRALRTAPIQPRVWEPVPLEEVQLVVEPEGGAVAPGGTVTLTCEVPAQPSPQIHWMKDGVPLPLPPSPVLILPEIGPQDQGTYSCVATHSSHGPQESRAVSISIIGSVGGSGLGTLALALGILGGLGTAALLIGVILWQRRQRRGEERKAPENQEEEEERAELNQSEEPEAGESSTGGP

SEQ ID NO: 66837 - protein, 122 aa, Homo sapiens
  MOD_RES (1)..(1): Any amino acid
XNTSESFVLNWYRMSPSNQTDKLAAFPEDRSQPGQDCRFRVTQLPNGRDFHMSVVRARRNDSGTYLCGAISLAPKAQIKESLRAELRVTGTIGARRTGQPLKEDPSAVPVFSVDYGELDFQW

SEQ ID NO: 66838 - protein, 271 aa, Homo sapiens
MMLSRAKPAVGRGVQHTDKRKKKGRKIPKLEELLSKRDFTGAITLLEFKRHVGEEEEDTNLWIGYCAFHLGDYKRALEEYENATKEENCNSEVWVNLACTYFFLGMYKQAEAAGFKASKSRLQNRLLFHLAHKFNDEKKLMSFHQNLQDVTEDQLSLASIHYMRSHYQEAIDIYKRILLDNREYLALNVYVALCYYKLDYYDVSQEVLAVYLQQIPDSTIALNLKACNHFRLYNGRAAEAELKSLMDNASSSFEFAKELIRHNLVNNDFPS

SEQ ID NO: 66839 - protein, 654 aa, Homo sapiens
MEMETTEPEPDCVVQPPSPPDDFSCQMRLSEKITPLKTCFKKKDQKRLGTGTLRSLRPILNTLLESGSLDGVFRSRNQSTDENSLHEPMMKKAMEINSSCPPAENNMSVLIPDRTNVGDQIPEAHPSTEAPERVVPIQDHSFPSETLSGTVADSTPAHFQTDLLHPVSSDVPTSPDCLDKVIDYVPGIFQENSFTIQYILDTSDKLSTELFQDKSEEASLDLVFELVNQLQYHTHQENGIEICMDFLQGTCIYGRDCLKHHTVLPYHWQIKRTTTQKWQSVFNDSQEHLERFYCNPENDRMRMKYGGQEFWADLNAMNVYETTEFDQLRRLSTPPSSNVNSIYHTVWKFFCRDHFGWREYPESVIRLIEEANSRGLKEVRFMMWNNHYILHNSFFRREIKRRPLFRSCFILLPYLQTLGGVPTQAPPPLEATSSSQIICPDGVTSANFYPETWVYMHPSQDFIQVPVSAEDKSYRIIYNLFHKTVPEFKYRILQILRVQNQFLWEKYKRKKEYMNRKMFGRDRIINERHLFHGTSQDVVDGICKHNFDPRVCGKHATMFGQGSYFAKKASYSHNFSKKSSKGVHFMFLAKVLTGRYTMGSHGMRRPPPVNPGSVTSDLYDSCVDNFFEPQIFVIFNDDQSYPYFVIQYEEVSNT

SEQ ID NO: 66840 - protein, 78 aa, Homo sapiens
MVWKVAVFLSVALGIGAVPIDDPEDGGKHWVVIVAGSNGWYNYRHQADACHAYQIIHRNGIPDEQIVVMMYDDIAYSE

SEQ ID NO: 66841 - protein, 85 aa, Homo sapiens
MLSSTAILDHPPSPMDTSELHFVPEPSSTMGLDLADGHLDSMDWLELSSGGPVLSLAPLSTTAPSLFSTDFLDGHDLQLHWDSCL

SEQ ID NO: 66842 - protein, 53 aa, Homo sapiens
MRAKLFRFASENDLPEWKERGTGDVKLLKHKEKGAIRLLMRRDKTLKICANHY

SEQ ID NO: 66843 - protein, 83 aa, Homo sapiens
MAARRGALIVLEGVDRAGKSTQSRKLVEALCAAGHRAELLRFPERSTEIGKLLSSYLQKKSDVEDHSVHLLFSANRWEQVIFP

SEQ ID NO: 66844 - protein, 196 aa, Homo sapiens
MFKNEYQGGAFVEIFSAQGKNPGAKWKILGSPSVIWKEFDKEVKSFVFVLEGSSQTNKIQLPKENKQSLGLIQRFLVLQIYVPLGQDFSTELLITDLGNIKRRLYLSTVHKELSSTPLHAKIPLFMIKRKIWCNLCIDLVAFTSEIFKGAVFQSLDGIVVSANCKLRKIFTLKSKPQDTADKDGMFSCLWCSLFNR

SEQ ID NO: 66845 - protein, 38 aa, Homo sapiens
MILLEVNNRIIEETLALKFENAAAGNKPEAVEVTFAGE

SEQ ID NO: 66846 - protein, 309 aa, Homo sapiens
MALDVKSRAKRYEKLDFLGEGQFATVYKARDKNTNQIVAIKKIKLGHRSEAKDGINRTALREIKLLQELSHPNIIGLLDAFGHKSNISLVFDFMETDLEDLKPNNLLLDENGVLKLADFGLAKSFGSPNRAYTHQVVTRWYRAPELLFGARMYGVGVDMWAVGCILAELLLRVPFLPGDSDLDQLTRIFETLGTPTEEQWPDMCSLPDYVTFKSFPGIPLHHIFSAAGDDLLDLIQGLFLFNPCARITATQALKMKYFSNRPGPTPGCQLPRPNCPVETLKEQSNPALAIKRKRTEALEQGGLPKKLIF

SEQ ID NO: 66847 - protein, 131 aa, Homo sapiens
MKNWDSLDEHGVCTADKDCEDAYRVCQILDIPFHQVSYVKEYWNDVFSDFLNEYEKGRTPNPDIVCNKHIKFSCFFHYAVDNLGADAIATGHYARTSLEDEEVFEQKHVKKPEGLFRNRFEVRNARFPRMP

SEQ ID NO: 66848 - protein, 555 aa, Homo sapiens
MAGGGSDLSTRLFTEDQDVDEGLVYDTVFKHFKRHKLEISNAIKKTFPFLEGLRDRELITNKMFEDSEDSCRNLVPVQRVVYNVLSELEKTFNLSVLEALFSEVNMQEYPDLIHIYKSFKNAIQDKLSFQESDRKEREERPDIKLSLKQGEVPESPEARKESDQACGKMDTVDIANNSTLGKPKRKRRKKKGHGWSRMGTRTQKNNQQNDNSKADGQLVSSEKKANMNLKDLSKIRGRKRGKPGTHFTQSDRAPQKRVRSRASRKHKDETVDFQAPLLPVTCGGVKGILHKEKLEQGTLAKCIQTEDGKWFTPMEFEIKGGYARSKNWRLSVRCGGWPLRRLMEEGSLPNPPRIYYRNKKRILKSQNNSSVDPCMRNLDECEVCRDGGELFCCDTCSRVFHEDCHIPPVESEKTPWNCIFCRMKESPGSQQCCQESEVLERQMCPEEQLKCEFLLLKVYCCSESSFFAKIPYYYYIREACQGLKEPMWLDKIKKRLNEHGYPQVEGFVQDMRLIFQNHRASYKYKDFGQMGLRLEAEFEKDFKEVFAIQETNGNS

SEQ ID NO: 66849 - protein, 278 aa, Homo sapiens
MDPLRRSPSPCLSSQPSSPSTPPCEMLGPVGIEAVLDQLKIKAMKMGFEFNIMVVGQSGLGKSTMVNTLFKSKVWKSNPPGLGVPTPQTLQLHSLTHVIEEKGVKLKLTVTDTPGFGDQINNDNCWDPILGYINEQYEQYLQEEILITRQRHIPDTRVHCCVYFVPPTGHCLRPLDIEFLQRLCRTVNVVPVIARADSLTMEEREAFRRRIQQNLRTHCIDVYPQMCFDEDINDKILNSKLRVRGCGAGGGRGDFLPTHPFHPKTHLSLHLREMCTYS

SEQ ID NO: 66850 - protein, 672 aa, Homo sapiens
MDPSAPQPRAETSGKDIWHPGERCLAPSPDNGKLCEASIKSITVDENGKSFAVVLYADFQERKIPLKQLQEVKFVKDCPRNLIFDDEDLEKPYFPNRKFPSSSVAFKLSDNGDSIPYTINRYLRDYQREGTRFLYGHYIHGGGCILGDDMGLGKTVQVISFLAAVLHKKGTREDIENNMPEFLLRSMKKEPLSSTAKKMFLIVAPLSVLYNWKDELDTWGYFRVTVLHGNRKDNELIRVKQRKCEIALTTYETLRLCLDELNSLEWSAVIVDEAHRIKNPKARVTEVMKALKCNVRIGLTGTILQNNMKELWCVMDWAVPGLLGSGTYFKKQFSDPVEHGQRHTATKRELATGRKAMQRLAKKMSGWFLRRTKTLIKDQLPKKEDRMVYCSLTDFQKAVYQTVLETEDVTLILQSSEPCTCRSGQKRRNCCYKTNSHGETVKTLYLSYLTVLQKVANHVALLQAASTSKQQETLIKRICDQVFSRFPDFVQKSKDAAFETLSDPKYSGKMKVLQQLLNHCRKNRDKVLLFSFSTKLLDVLQQYCMASGLDYRRLDGSTKSEERLKIVKEFNSTQDVNICLVSTMAGGLGLNFVGANVVVLFDPTWNPANDLQAIDRTQTHCRRERDAEPLSSAPGLQNGSENAVPYPWWCCVTGASISCWRCEICRIQDVLE

SEQ ID NO: 66851 - protein, 157 aa, Homo sapiens
MASKGPSASASPENSSAGGPSGSSNGAGESGGQDSTFECNICLDTAKDAVISLCGHLFCWPCLHQWLETRPNRQVCPVCKAGISRDKVIPLYGRGSTGQQDPREKTPPRPQGQRPEPENRGVRNILGEASTNELMALEVSFLALQFFSLIIKVKENL

SEQ ID NO: 66852 - protein, 134 aa, Homo sapiens
MAENGDNEKMAALEAKICHQIEYYFGDFNLPRDKFLKEQIKLDEGWVPLEIMIKFNRLNRLTTDFNVIVEALSKSKAELMEISEDKTKIRRSPSKPLPEVTDEYKNDVKNRSVYISHPVAHVGVQWCDHGPLQS

SEQ ID NO: 66853 - protein, 199 aa, Homo sapiens
GVHRKPSLLAHPGRLVKSEETVILQCWSDVRFEHFLLHREGKFKDTLHLIGEHHDGVSKANFSIGPMMQDLAGTYRCYGSVTHSPYQLSAPSDPLDIVITGLYEKPSLSAQPGPTVLAGESVTLSCSSRSSYDMYHLSREGEAHECRFSAGPKVNGTFQADFPLGPATHGGTYRCFGSFRDSPYEWSNSSDPLLVSVTG

SEQ ID NO: 66854 - protein, 93 aa, Homo sapiens
MASELCKTISVARLEKHKNLFLNYRNLHHFPLELLKDEGLQYLERLYMKRNSLTSLPENLAQKLPNLVELKTTVSFVAYCCSTQCLQTFDLLS

SEQ ID NO: 66855 - protein, 208 aa, Homo sapiens
MVQEHDEPILKHLKDIKVKFSDAGQPMSFVLEFHFEPNEYFTNEVLTKTYRMRSEPDDSDPFSFDGPEIMGCTGCQIDWKKGKNVTLKTIKKKQKHKGRGTVRTVTKTVSNDSFFNFFAPPEVPESGDLDDDAEAILAADFEIGHFLRERIIPRSVLYFTGEAIEDDDDDYDEEGEEADEEGEEEGDEENDPDYDPKKDQNPAECKQQ

SEQ ID NO: 66856 - protein, 75 aa, Homo sapiens
MPSEKTFKQRRTFEQRVEDVRLIREQHPTKIPVIIERYKGEKQLPVLDKTKFLVPDHVNMSELIKIIRYSVTFVS

SEQ ID NO: 66857 - protein, 39 aa, Homo sapiens
MADQIPLYPVRSAAAAAANRKRAAYYSAAGPRPGADRHS

SEQ ID NO: 66858 - protein, 374 aa, Homo sapiens
MDRAPQRQHRASRELLAAKKTHTSQIEVIPCKICGDKSSGIHYGVITCEGCKGFFRRSQRCNAAYSCTRQQNCPIDRTSRNRCQHCRLQKCLALGMSRDAVKFGRMSKKQRDSLHAEVQKQLQQRQQQQQEPVVKTPPAGAQGADTLTYTLGLPDGQLPLGSSPDLPEASACPPGLLKASGSGPSYSNNLAKAGLNGASCHLEYSPERGKAEGRESFYSTGSQLTPDRCGLRFEEHRHPGLGELGQGPDSYGSPSFRSTPEAPYASLTEIEHLVQSVCKSYRETCQLRLEDLLRQRSNIFSREEVTGYQRKFIRWGSRAQEDHRATQSATAGPSSLPAVHVGDVGTVCPPPHRGHSVRGGVRQEALRLYGALPE

SEQ ID NO: 66859 - protein, 489 aa, Homo sapiens
MTPILTVLICLGLSLDPRTHVQAGPLPKPTLWAEPGSVITQGSPVTLRCQGSLETQEYHLYREKKTALWITRIPQELVKKGQFPILSITWEHAGRYCCIYGSHTAGLSESSDPLELVVTGAYSKPTLSALPSPVVTSGGNVTIQCDSQVAFDGFILCKEGEDEHPQCLNSHSHARGSSRAIFSVGPVSPSRRWSYRCYGYDSRAPYVWSLPSDLLGLLVPGVSKKPSLSVQPGPVVAPGEKLTFQCGSDAGYDRFVLYKEWGRDFLQRPGRQPQAGLSQANFTLGPVSRSYGGQYTCSGAYNLSSEWSAPSDPLDILITGQIRARPFLSVRPGPTVASGENVTLLCQSQGGMHTFLLTKEGAADSPLRLKSKRQSHKYQAEFPMSPVTSAHAGTYRCYGSLSSNPYLLTHPSDPLELVVSGAAETLSPPQNKSDSKAGAADTLSPSQNNPTSHPQDYTVENLIHMGKAGLILVVLRILLFEAQHSQRSP

SEQ ID NO: 66860 - protein, 464 aa, Homo sapiens
MAGTSAPGSKRRSEPPAPRPGPPPGTGHPPSKRARGFSAAAAPDPDDPFGAHGDFTADDLEELDTLASQALSQCPAAARDVSSDHKVHRLLDGMSKNPSGKNRETVPIKDNFELEVLQAQYKELKEKMKVMEEEVLIKNGEIKILRDSLHQTESVLEEQRRSHFLLEQEKTQALSDKEKEFSKKLQSLQSELQFKDAEMNELRTKLQTSERANKLAAPSVSHVSPRKNPSVVIKPEACSPQFGKTSFPTKESFSANMSLPHPCQTESGYKPLVGREDSKPHSLRGDSIKQEEAQKSFVDSWRQRSNTQGSILINLLLKQPLIPGSSLSLCHLLSSSSESPAGTPLQPPGFGSTLAGMSGLRTTGSYDGSFSLSALREAQNLAFTGLNLVARNECSRDGDPAEGGRRAFPLCQLPGAVHFLPLVQFFIGLHCQALQDLAAAKRSGAPGDSPTHSSCQQVTFKPVS

SEQ ID NO: 66861 - protein, 154 aa, Homo sapiens
RNRTLQKWHDKTKLASGKLGKGFGAFERSILTQIDHILMDKERLLRRTQTKRSVYRVLGKPEPAAQPVPESLPGEPEILPQAPANAHLKDLDEEIFDDDDFYHQLLRELIERKTSSLDPNDQVAMGRQWLAIQKLRSKIHKKVDRKASKGRKLR

SEQ ID NO: 66862 - protein, 102 aa, Homo sapiens
MHSTMVFLPWELHTKKGKMALLASNSCFIRCNEAGDIEAKSKTAGEEEMIKIRSCAERETKKKDDIPEEDKGNVKQCEINYVKKFQSFQDHKLKISKEDSKI

SEQ ID NO: 66863 - protein, 674 aa, Homo sapiens
MVVAHPTATATTTPTATVTATVVMTTATMDLRDWLFLCYGLIAFLTEVIDSTTCPSVCRCDNGFIYCNDRGLTSIPADIPDDATTLYLQNNQINNAGIPQDLKTKVNVQVIYLYENDLDEFPINLPRSLRELHLQDNNVRTIARDSLARIPLLEKLHLDDNSVSTVSIEEDAFADSKQLKLLFLSRNHLSSIPSGLPHTLEELRLDDNRISTIPLHAFKGLNSLRRLVLDGNLLANQRIADDTFSRLQNLTELSLVRNSLAAPPLNLPSAHLQKLYLQDNAISHIPYNTLAKMRELERLDLSNNNLTTLPRGLFDDLGNLAQLLLRNNPWFCGCNLMWLRDWVKARAAVVNVRGLMCQGPEKVRGMAIKDITSEMDECFETGPQGGVANAAAKTTASNHASATTPQGSLFTLKAKRPGLRLPDSNIDYPMATGDGAKTLAIHVKALTADSIRITWKATLPASSFRLSWLRLGHSPAVGSITETLVQGDKTEYLLTALEPKSTYIICMVTMETSNAYVADETPVCAKAETADSYGPTTTLNQEQNAGPMASLPLAGIIGGAVALVFLFLVLGAICWYVHQAGELLTRERAYNRGSRKKDDYMESGTKKDNSILEIRGPGLQMLPINPYRAKEEYVVHTIFPSNGSSLCKATHTIGYGTTRGYRDGGIPDIDYSYT

SEQ ID NO: 66864 - protein, 182 aa, Homo sapiens
MRRWEGGDPGVSNQKTPTTILLTPERKFHSFGYAARDFYHDLDPNEAKQWLYLEKFKMKLHTTGDLTMDTDLTAANGKKVKALEIFAYALQYFKEQALKELSDQAGSEFENSDVRWVITVPAIWKQPAKQFMRQAAYQAGLASPENSEQLIIALEPEAASIYCRKLRLHQMIELSSKAAVNG

SEQ ID NO: 66865 - protein, 311 aa, Homo sapiens
MPDGSVLLVDNVCHQSGEVSMGSFCRLPGTSGCFPCPLNALEEHNFLFQLRGGEQPPPGAKEGLEVPLIAVVQWSTPKLPFTQSIYTHYRLPSVRLDRPCFVMTASCKSPVRTYERFTVTYTLLNNLQDFLAVRLVWTPEHAQAGKQLCEEERRAMQAALDSVVCHTPLNNLGFSRKGSALTFSVAFQALRTGLFELSQHMKLKLQFTASVSHPPPEARPLSRKSSPSSPAVRDLVERHQASLGRSQSFSHQQPSRSHLMRSGSVMERRAITPPVASPVGRPLYLPPDKAVLSLDKIAKRECKVLVVEPVK

SEQ ID NO: 66866 - protein, 225 aa, Homo sapiens
MASGCKIGPSILNSDLANLGAECLRMLDSGADYLHLDVMDGHFVPNITFGHPVVESLRKQLGQDPFFDMHMMVSKPEQWVKPMAVAGANQYTFHLEATENPGALIKDIRENGMKVGLAIKPGTSVEYLAPWANQIDMALVMTVEPGFGGQKFMEDMMPKVHWLRTQFPSLDIEVDGGVGPDTVHKCAEIGVQWRDLCSLQSLPAGFKRFSCLSLLSSWDYRQELT

SEQ ID NO: 66867 - protein, 834 aa, Homo sapiens
MRSAAKPWNPAIRAGGHGPDRVRPLPAASSGMKSSKSSTSLAFESRLSRLKRASSEDTLNKPGSTAASGVVRLKKTATAGAISELTESRLRSGTGAFTTTKRTGIPAPREFSVTVSRERSVPRGPSNPRKSVSSPTSSNTPTPTKHLRTPSTKPKQENEGGEKAALESQVRELLAEAKAKDSEINRLRSELKKYKEKRTLNAEGTDALGPNVDGTSVSPGDTEPMIRALEEKNKNFQKELSDLEEENRVLKEKLIYLEHSPNSEGAASHTGDSSCPTSITQESSFGSPTGNQMSSDIDEYKKNIHGNALRTSGSSSSDVTKASLSPDASDFEHITAETPSRPLSSTSNPFKSSKCSTAGSSPNSVSELSLASLTEKIQKMEENHHSTAEELQATLQELSDQQQMVQELTAENEKLVDEKTILETSFHQHRERAEQLSQENEKLMNLLQERVKNEEPTTQEGKIIELEQKCTGILEQGRFEREKLLNIQQQLTCSLRKVEEENQGALEMIKRLKEENEKLNEFLELERHNNNMMAKTLEECRVTLEGLKMENGSLKSHLQGEKQKATEASAVEQTAESCEVQEMLKVARAEKDLLELSCNELRQELLKANGEIKHVSSLLAKVEKDYSYLKEICDHQAEQLSRTSLKLQEKASESDAEIKDMKETIFELEDQVEQHRAVKLHNNQLISELESSVIKLEEQKSDLERQLKTLTKQMKEETEEWRRFQADLQTAVVVANDIKCEAQQELRTVKRKLLEEEEKNARLQKELGDVQGHGRVVTSRAAPPPVDEEPESSEVDAAGRWPGVCVSRTSPTPPESATTVKSLIKSFDLGRPGI

SEQ ID NO: 66868 - protein, 193 aa, Homo sapiens
MELEQREGTMAAVGFEEFSAPPGSELALPPLFGGHILESELETEVEFVSGGLGGSGLRERDEEEEAARGRRRRQRELNRRKYQALGRRCREIEQVNERVLNRLHQVQRITRRLQQERRFLMRVLDSYGDDYRASQFTIVLEAMRRMSLQRKRHCPRPEGLLHPQNPAAQPPVRGPVGGRGGECHGMDAEQEMR

SEQ ID NO: 66869 - protein, 58 aa, Homo sapiens
MLQKKIEEKDLKVIYTCIWWLFQGCENNLCLFFHSAEMDIYFCAFSFFLNCCQVFFPL

SEQ ID NO: 66870 - protein, 874 aa, Homo sapiens
MRTYYFCTDTGKEMELWMKAMLDAALVQTEPVKRVDKITSENAPTKETNNIPNHRVLIKPEIQNNQKNKEMSKIEEKKALEAEKYGFQKDGQDRPLTKINSVKLNSLPSEYESGSACPAQTVHYRPINLSSSENKIVNVSLADLRGGNRPNTGPLYTEADRVIQRTNSMQQLEQWIKIQKGRGHEEETRGVISYQTLPRNMPSHRAQIMARYPEGYRTLPRNSKTRPESICSVTPSTHDKTLGPGAEEKRRSMRDDTMWQLYEWQQRQFYNKQSTLPRHSTLSSPKTMVNISDQTMHSIPTSPSHGSIAAYQGYSPQRTYRSEVSSPIQRGDVTIDRRHRAHHPKHVYVPDRRSVPAGLTLQSVSPQSLQGKTLSQDEGRGTLYKYRPEEVDIDAKLSRLCEQDKVVHALEEKLQQLHKEKYTLEQALLSASQEIEMHADNPAAIQTVVLQRDDLQNGLLSTCRELSRATAELERAWREYDKLEYDVTVTRNQMQEQLDHLGEVQTESAGIQRAQIQKELWRIQDVMEGLSKHKQQRGTTEIGMIGSKPFSTVKYKNEGPDYRLYKSEPELTTVAEVDESNGEEKSEPVSEIETSVVKGSHFPVGVVPPRAKSPTPESSTIASYVTLRKTKKMMDLRTERPRSAVEQLCLAESTRPRMTVEEQMERIRRHQQACLREKKKGLNVIGASDQSPLQSPSNLRDNPFRTTQTRRRDDKELDTAIRENDVKPDHETPATEIVQLKETEPQNVDFSKELKKTENISYEMLFEPEPNGVNSVEMMDKERNKDKMPEDVTFSPQDETQTANHKPEEHPEENTKNSVDEQEETVISYESTPEVSRGNQTMAVKSLSPSPESSASPVPSTQPQLTEGSHFMCV

SEQ ID NO: 66871 - protein, 131 aa, Homo sapiens
  MOD_RES (1)..(1): Any amino acid
XIMMLSVLKNTKTPVKFWFLKNYLSPTFKDLPNNMIHQVPIKSLPQEWLWCETWCDDASKKRAKTIDLCNNPMTKEPKLEAAVRIVPEWQDYDQEIKQLQIRFQKEKETGALYKEKTKEPSREGPQKREEL

SEQ ID NO: 66872 - protein, 266 aa, Homo sapiens
MPAAGMPPLPQSPPEIPPQGPPKISPQGPPQSPPQSPLDSCSSPLLWTRLDEESSSEEEDTATWHALPESESLPRYALDEKVAELVQFLLLKYQTKEPVTKAEMLTTVIKKYKDYFPMIFGKAHEFIELIFGIALTDMDPDNHSYFFEDTLDLTYEGSLIDDQGMPKNCLLILILSMIFIKGSCVPEEVIWEVLSAIGVCAGREHFIYGDPRKLLTIHWVQRKYLEYREVPNSAPPRYEFLWGPRAHSEASKRSLRVFIQAIQYHP

SEQ ID NO: 66873 - protein, 134 aa, Homo sapiens
MTSSRLWFSLLLAAAFAGRATALWPWPQNFQTSDQRYVLYPNNFQFQYDVSSAAQPGCSVLDEAFQRYRDLLFGSGSWPRPYLTGKRHTLEKNVLVVSVVTPGCNQLPTLESVENCIPVPFARRRLLSSFCCGN

SEQ ID NO: 66874 - protein, 54 aa, Homo sapiens
MLRRALLCLAVAALVRADAPEEEDHVLVLRKSNFAEALAAHKCPLVWPLQGSGP

SEQ ID NO: 66875 - protein, 473 aa, Homo sapiens
MAAPQDLDIAVWLATVHLEQYADTFRRHGLATAGAARGLGHEELKQLGISATGHRKRILRLLQTGTEEGSLDPKSDSAMEPSPSPAPQAQPPKPVPKPRTVFGGLSGPATTQRPGLSPALGGPGVSRSPEPSPRPPPLPTSSSEQSSALNTVEMMPNSIYFGLDSRGRAQAAQDKAPDSSQISAPTPALRPTTGTVHIMDPGCLYYGVQPVGTPGAPDRRESRGVCQGRAEHRLSRQDLEAREDAGYASLELPGDSTLLSPTLETEETSDDLISPYASFSFTADRLTPLLSGWLDKLSPQGNYVFQRRFVQFNGRSLMYFGSDKDPFPKGVIPLTAIEMTRSSKDNKFQVITGQRVFVFRTESEAQRDMWCSTLQSCLKEQRLLGHPRPPQPPRPLRTGMLELRGHKAKVFAALSPGELALYKSEQAFSLGIGICFIELQGCSVRETKSRSFDLLTPHRCFSFTAESGGARQS

SEQ ID NO: 66876 - protein, 1761 aa, Homo sapiens
MVDKNIYIIQGEINIVVGAIKRNARWSTHTPLDEERDPLLHSFGHLKEVLNSITELSEIEPNVFLRPFLEVIRSEDTTGPITGLALTSVNKFLSYALIDPTHEGTAEGMENMADAVTHARFVGTDPASDEVVLMKILQVLRTLLLTPVGAHLTNESVCEIMQSCFRICFEMRLSELLRKSAEHTLVDMVQLLFTRLPQFKEEPKNYVGTNMKKLKMRAGGMSDSSKWKKQKRSPRPPRHMTKVTPGSELPTPNGTTLSSNLTGGMPFIDVPTPISSASSEAASAVVSPSTDSGLEFSSQTTSKEDLTDLEQPGSPGYSTATEPGSSELGVPEQPDLQEGTHVEKSQSASVESIPEVLEECTSPADHSDSASVHDMDYVNPRGVRFTQSSQKEGTALVPYGLPCIRELFRFLISLTNPHDRHNSEVMIHMGLHLLTVALESAPVAQCQTLLGLIKDEMCRHLFQLLSIERLNLYAASLRVCFLLFESMREHLKFQMEMYIKKLMEIITVENPKMPYEMKEMALEAIVQLWRIPSFVTELYINYDCDYYCSNLFEELTKLLSKNAFPVSGQLYTTHLLSLDALLTVIDSTEAHCQAKVLNSLTQQEKKETARPSCEIVDGTREASNTERTASDGKAVGMASDIPGLHLPGGGRLPPEHGKSGCSDLEEAVDSGADKKFARKPPRFSCLLPDPRELIEIKNKKKLLITGTEQFNQKPKKGIQFLQEKGLLTIPMDNTEVAQWLRENPRLDKKMIGEFVSDRKNIDLLESFVSTFSFQGLRLDEALRLYLEAFRLPGEAPVIQRLLEAFTERWMNCNGSPFANSDACFSLAYAVIMLNTDQHNHNVRKQNAPMTLEEFRKNLKGVNGGKDFEQDILEDMYHAIKNEEIVMPEEQTGLVRENYVWNVLLHRGATPEGIFLRVPTASYDLDLFTMTWGPTIAALSYVFDKSLEETIIQKAISGFRKCAMISAHYGLSDVFDNLIISLCKFTALSSESIENLPSVFGSNPKAHIAAKTVFHLAHRHGDILREGWKNIMEAMLQLFRAQLLPKAMIEVEDFVDPNGKISLQREETPSNRGESTVLSFVSWLTLSGPEQSSVRGPSTENQEAKRVALECIKQCDPEKMITESKFLQLESLQELMKALVSVTPDEETYDEEDAAFCLEMLLRIVLENRDRVGCVWQTVRDHLYHLCVQAQDFCFLVERAVVGLLRLAIRLLRREEISAQVLLSLRILLLMKPSVLSRVSHQVAYGLHELLKTNAANIHSGDDWATLFTLLECIGSGVKPPAALQATARADAPDAGAQSDSELPSYHQNDVSLDRGYTSDSEVYTDHGRPGKIHRSATDADVVNSGWLVVGKDDVDNSKPGPSRPGPSPLINQYSLTVGLDLGPHDTKSLLKCVESLSFIVRDAAHITPDNFELCVKTLRIFVEASLNGGCKSQEKRGKSHKYDSKGNRFKKKSKEGSMLRRPRTSSQHASRGGQSDDDEDEGVPASYHTVSLQVLFPLLTKLLENISPADVGGMEETRMRASTLLSKVFLQHLSPLLSLSTFAALWLTILDFMDKYMHAGSSDLLSEAIPESLKNMLLVMDTAEIFHSADARGGGPSALWEITWERIDCFLPHLRDELFKQTVIQDPMPMEPQGQKPLASAHLTSAAGDTRTPGHPPPPEIPSELGACDFEKPESPRAASSSSPGSPVASSPSRLSPTPDGPPPLAQPPLILQPLASPLQVGVPPMTLPIILNPALIEATSPVPLLATPRPTDPIPTSEVN

SEQ ID NO: 66877 - protein, 31 aa, Homo sapiens
MEPNSLRTKVPAFLSDLGKATLRGIRKCPRC

SEQ ID NO: 66878 - protein, 188 aa, Homo sapiens
MAGWQSYVDNLMCDGCCQEAAIVGYCDAKYVWAATAGGVFQSITPIEIDMIVGKDREGFFTNGLTLGAKKCSVIRDSLYVDGDCTMDIRTKSQGGEPTYNVAVGRAGRALVIVMGKEGVHGGTLNKKAYELALYLRRYPNITIWSVSSLFFIGPIFICSLSFYMKLHYCGLGCLVMNFFHMYSVPYYC

SEQ ID NO: 66879 - protein, 248 aa, Homo sapiens
MWLAIEDGNLEEMEEEVRLKKRKRRRNVDKDPAKEDVEKAKKRRGRPPAEKLSPNPPKLTKQMNAIIDTVINYKDSSGRQLSEVFIQLPSRKELPEYYELIRKPVDFKKIKERIRNHKYRSLGDLEKDVMLLCHNAQTFNLEGSQIYEDSIVLQSVFKSARQKIAKEEESEDESNEEEEEEDEEESESEAKSVKVKIKLNKKDDKGRDKGKGKKRPNRGKAKPVVSDFDSDEEQDEREQSEGSGTDDE

SEQ ID NO: 66880 - protein, 53 aa, Homo sapiens
MAATQKLVKDIIDSKTGETASKRWKGAKNSETAAKVALMKLKMHADGDKSLPQ

SEQ ID NO: 66881 - protein, 25 aa, Homo sapiens
  MOD_RES (1)..(1): Any amino acid
XAKKPRKCSLCHQPGHTRPFCPQNR

SEQ ID NO: 66882 - protein, 83 aa, Homo sapiens
MSRKLNSVHLTQFSGKFFSLCLFELGNVSHRLGTQDITSPLMADLIVSVIVIGPDSLQQLSQSSFVFQVNLCEGDSGAGLPVE

SEQ ID NO: 66883 - protein, 498 aa, Homo sapiens
MDASLEKIADPTLAEMGKNLKEAVKMLEDSQRRTEEENGKKLISGDIPGPLQGSGQDMVSILQLVQNLMHGDEDEEPQSPRIQNIGEQGHMALLGHSLGAYISTLDKEKLRKLTTRILSDTTLWLCRIFRYENGCAYFHEEEREGLAKICRLAIHSRYEDFVVDGFNVLYNKKPVIYLSAAARPGLGQYLCNQLGLPFPCLCRVPCNTVFGSQHQMDVAFLEKLIKDDIERGRLPLLLVANAGTAAVGHTDKIGRLKELCEQYGIWLHVEGVNLATLALGYVSSSVLAAAKCDSMTMTPGPWLGLPAVPAVTLYKHDDPALTLVAGLTSNKPTDKLRALPLWLSLQYLGLDGFVERIKHACQLSQRLQESLKKVNYIKILVEDELSSPVVVFRFFQELPGSDPVFKAVPVPNMTPSGVGRERHSCDALNRWLGEQLKQLVPASGLTVMDLEAEGTCLRFSPLMTAAGWSHCGTTTRYDCVRSRLTTRLPGSTGEQAPP

SEQ ID NO: 66884 - protein, 150 aa, Homo sapiens
MESPLIYVSVLLLNIFEFSSGIVYNKDDTEKRFACSNKGFPQENEIIKLYLFLENLFSDRILWLVDIPRENITQSTDIAAVEEWLVRITLHHGLNIYATEGTLLDVIREPILQWTPGDVIPESEISKLYPHVVDLKVTKCPCANDVALLG

SEQ ID NO: 66885 - protein, 83 aa, Homo sapiens
MTALVLQIEYTEDEARKIGVVGWVKNTSKGTVTGQVQGPEDKVNSMKSWLSKVGSPSSRIDRTNFSNEKTISKLEYSNFSIRY

SEQ ID NO: 66886 - protein, 107 aa, Homo sapiens
MGRASYGGSPVGHQSSSDHPRAKTCRSPVRDGPRTLCGVPTVALSLHFLREASSGSRTCGRRTSLCTSAKSSWTYRSGRLSWQSIKGTHLTITQALRQPLHRAPLLP

SEQ ID NO: 66887 - protein, 17 aa, Homo sapiens
IYSTFIFGSGTRLSVKP

SEQ ID NO: 66888 - protein, 157 aa, Homo sapiens
MPEQFSVAEFLAVTAEDLSSPAGAAAFAAKMPRYRGAALAREEILEGDQAILQRIKKAVRAIHSSGLGHVENEEQYREAVESLGNSHLSQNSHELSTGFLNLAVFTREVAALFKNLIQNLNNIVSFPLDSLMKGQLRDGRQDSKKQLEKAWKDYEAK

SEQ ID NO: 66889 - protein, 312 aa, Homo sapiens
MAPWLQLLSLLGLLPGAVAAPAQPRAASFQAWGPPSPELLAPTRFALEMFNRGRAAGTRAVLGLVRGRVRRAGQGSLYSLEATLEEPPCNDPMVCRLPVSKKTLLCSFQVLDELGRHVLLRKDCGPVDTKVPGAGEPKSAFTQGSAMISSLSQNHPDNRNETFSSVISLLNEDPLSQDLPVKMASIFKNFVITYNRTYESKEEARWRLSVFVNNMVRAQKIQALDRGTAQYGVTKFSDLTEEEFRTIYLNTLLRKEPGNKMKQAKSVGDLAPPEWDWRSKGAVTKVKDQSSWTVTRWTRPAWAACPPMPTRP

SEQ ID NO: 66890 - protein, 334 aa, Homo sapiens
MPLLGLLPRRAWASLLSQLLRPPCASCTGAVRCQSQDFDIAGQFDPMIPDAECLKIMCEILSGLQLGDFLIKMAWKDVRHEMVVKKGLAPEVADRIGDYVQCHGGVSLVEQMFQDPRLSQNKQALEGLGDLKLLFEYLTLFGIADKISFDLSLARGLDYYTGVIYEAVLLQTPTQAGEEPLNVGSVAAGGRYDGLVGMFDPKGHKVPCVGLSIGVERIFYIVEQRMKTKGEKVRTTETQVFVATPQKNFLQERLKLIAELWDSGIKAEMLYKNNPKLLTQLHYCESTGIPLVVIIGEQELKEGVIKIRSVASREEVAIKRENFVAEIQKRLSES

SEQ ID NO: 66891 - protein, 38 aa, Homo sapiens
MWATLPLLCAGAWLLGVPVCGAAELCVNSLVSLQVMDV

SEQ ID NO: 66892 - protein, 625 aa, Homo sapiens
MRLETAEAYVGPGGPECPMRTPQLALLQVFFLVFPDGVRPQPSSSPSGAVPTSLELQRGTDGGTLQSPSEATATRPAVPGLPTVVPTLVTPSAPGNRTVDLFPVLPICVCDLTPGACDINCCCDRDCYLLHPRTVFSFCLPGSVRSSSWVCVDNSVIFRSNSPFPSRVFMDSNGIRQFCVHVNNSNLNYFQKLQKVNATNFQALAAEFGGESFTSTFQTQSPPSFYRAGDPILTYFPKWSVISLLRQPAGVGAGGLCAESNPAGFLESKSTTCTRFFKNLASSCTLDSALNAASYYNFTVLKVPRSMTDPQNMEFQVPVILTSQANAPLLAGNTCQNVVSQVTYEIETNGTFGIQKVSVSLGQTNLTVEPGASLQQHFILRFRAFQQSTAASLTSPRSGNPGYIVGKPLLALTDDISYSMTLLQSQGNGSCSVKRHEVQFGVNAISGCKLRLKKADCSHLQQEIYQTLHGRPRPEYVAIFGNADPAQKGGWTRILNRHCSISAINCTSCCLIPVSLEIQVLWAYVGLLSNPQAHVSGVRFLYQCQSIQDSQQVTEVSLTTLVNFVDITQKPQPPRGQPKMDWKWPFDFFPFKVAFSRGVFSQKCSVSPILILCLLLLGVLNLETM

SEQ ID NO: 66893 - protein, 60 aa, Homo sapiens
MEKAVNDGSHSEELFCHLKTISEKEDLPRCTSESHLSWYSHQYQGKSKFPILGFPVLSII

SEQ ID NO: 66894 - protein, 315 aa, Homo sapiens
MEPEAGTNRTAVAEFILLGLVQTEEMQPVVFVLLLFAYLVTTGGNLSILAAVLVEPKLHAPMYFFLGNLSVLDVGCITVTVPAMLGRLLSHKSTISYDACLSQLFFFHLLAGMDCFLLTAMAYDRLLAICQPLTYSTRMSQTVQRMLVAASLACAFTNALTHTVAMSTLNFCGPNEVNHFYCDLPQLFQLSCSSTQLNELLLFAVGFIMAGTPLVLIITAYSHVAAAVLRIRSVEGRKKAFSTCGSHLTVVCLFFGRGIFNYMRLGSEEASDKDKGVGVFNTVINPMLNPLIYSLRNPDVQGALWQIFLGRRSLT

SEQ ID NO: 66895 - protein, 448 aa, Homo sapiens
MKSLSLLLAVALGLATAVSAGPAVIECWFVEDASGKGLAKRPGALLLRQGPGEPPPRPDLDPELYLSVHDPAGALQAAFRRYPRGAPAPHCEMSRFVPLPASAKWASGLTPAQNCPRALDGAWLMVSISSPVLSLSSLLRPQPEPQQEPVLITMATVVLTVLTHTPAPRVRLGQDALLDLSFAYMPPTSEAASSLAPGPPPFGLEWRRQHLGKGHLLLAATPGLNGQMPAAQEGAVAFAAWDDDEPWGPWTGNGTFWLPRVQPFQEGTYLATIHLPYLQGQVTLELAVYKPPKVSLMPATLARAAPGEAPPELLCLVSHFYPSGGLEVEWELRGGPGGRSQKAEGQRWLSALRHHSDGSVSLSGHLQPPPVTTEQHGARYACRIHHPSLPASGRSAEVTLEVAGLSGPSLEDSVGLFLSAFLLLGLFKALGWAAVYLSTCKDSKKHAT

SEQ ID NO: 66896 - protein, 140 aa, Homo sapiens
MSLNLPEASLLRASWPEQAKEPRREGHTDKQQTEDVLAAGLRCLPHLPAICARRMSPAFRAMDVEPRAKGVLLEPFVHQVGGHSCVLRFNETTLCKPLVPREHQFYETLPAEMRKFTPQYKGVVSVRFEEDEDRNLCLIA

SEQ ID NO: 66897 - protein, 1440 aa, Homo sapiens
  MOD_RES (1)..(1): Any amino acid
XAPVFLVSPTLLGITMLLATFLIQLERRKGVQSSGIMLTFWLVALVCALAILRSKIMTALKEDAQVDLFRDITFYVYFSLLLIQLVLSCFSDRSPLFSETIHDPNPCPESSASFLSRITFWWITGLIVRGYRQPLEGSDLWSLNKEDTSEQVVPVLVKNWKKECAKTRKQPVKVVYSSKDPAQPKESSKVDANEEVEALIVKSPQKEWNPSLFKVLYKTFGPYFLMSFFFKAIHDLMMFSGPQILKLLIKFVNDTKAPDWQGYFYTVLLFVTACLQTLVLHQYFHICFVSGMRIKTAVIGAVYRKALVITNSARKSSTVGEIVNLMSVDAQRFMDLATYINMIWSAPLQVILALYLLWLNLGPSVLAGVAVMVLMVPVNAVMAMKTKTYQVAHMKSKDNRIKLMNEILNGIKVLKLYAWELAFKDKVLAIRQEELKVLKKSAYLSAVGTFTWVCTPFLVALCTFAVYVTIDENNILDAQTAFVSLALFNILRFPLNILPMVISSIVQASVSLKRLRIFLSHEELEPDSIERRPVKDGGGTNSITVRNATFTWARSDPPTLNGITFSIPEGALVAVVGQVGCGKSSLLSALLAEMDKVEGHVAIKGSVAYVPQQAWIQNDSLRENILFGCQLEEPYYRSVIQACALLPDLEILPSGDRTEIGEKGVNLSGGQKQRVSLARAVYSNADIYLFDDPLSAVDAHVGKHIFENVIGPKGMLKNKTRILVTHSMSYLPQVDVIIVMSGGKISEMGSYQELLARDGAFAEFLRTYASTEQEQDAEENGSTVMDEEEAGVTGVSGPGKEAKQMENGMLVTDSAGKQLQRQLSSSSSYSGDISRHHNSTAELQKAEAKKEETWKLMEADKAQTGQVKLSVYWDYMKAIGLFISFLSIFLFMCNHVSALASNYWLSLWTDDPIVNGTQEHTKVRLSVYGALGISQGIAVFGYSMAVSIGGILASRCLHVDLLHSILRSPMSFFERTPSGNLVNRFSKELDTVDSMIPEVIKMFMGSLFNVIGACIVILLATPIAAIIIPPLGLIYFFVQRFYVASSRQLKRLESVSRSPVYSHFNETLLGVSVIRAFEEQERFIHQSDLKVDENQKAYYPSIVANRWLAVRLECVGNCIVLFAALFAVISRHSLSAGLVGLSVSYSLQVTTYLNWLVRMSSEMETNIVAVERLKEYSETEKEAPWQIQETAPPSSWPQVGRVEFRNYCLRYREDLDFVLRHINVTINGGEKVGIVGRTGAGKSSLTLGLFRINESAEGEIIIDGINIAKIGLHDLRFKITIIPQDPVLFSGSLRMNLDPFSQYSDEEVWTSLELAHLKDFVSALPDKLDHECAEGGENLSVGQRQLVCLARALLRKTKILVLDEATAAVDLETDDLIQSTIRTQFEDCTVLTIAHRLNTIMDYTRVIVLDKGEIQEYGAPSDLLQQRGLFYSMAKDAGLV

SEQ ID NO: 66898 - protein, 149 aa, Homo sapiens
MKVRKSSTPEEVKKRKKAVLFCLSEDKKNIILEEGKEILVGDVGQTVDDPYATFVKMLPDKDCRYALYDATYETKESKKEDLVFIFWAPESAPLKSKMIYASSKDAIKKKLTGIKHELQANCYEEVKDRCTLAEKLGGSAVISLEGKPL

SEQ ID NO: 66899 - protein, 111 aa, Homo sapiens
MGLFQGVMQKYSSSLFKTSQLAPADPLIKAIKDGDEEALKTMIKEGKNLAEPNKEGWLPLHEAAYYGQVGCLKVLQRAYPGTIDQRTLQEETAVYLATCRGHLDCLLSLLQ

SEQ ID NO: 66900 - protein, 95 aa, Homo sapiens
MDAANFEQFLQERIKVNGKAGNLGGGVVTIERSKSKITVTSEVPFSKRYLKYLTKKYLKKNNLRDWLRVVANSKESYELRYFQINQDEEEEEDED

SEQ ID NO: 66901 - protein, 321 aa, Homo sapiens
MSDPSQLTQNVCLTQEMELSKAFSGQRTLLSAILSMLSLSFSTTSLLSNYWFVGTQKVPKPLCEKGLAAKCFDMPVSLDGDTNTSTQEVVQYNWETGDDRFSFRSFRSGMWLSCEETVEEPALLHPQSWKQFRALRSSGTAAAKGERCRSFIELTPPAKRGEKGLLEFATLQGPCHPTLRFGGKRLMEKASLPSPPLGLCGKNPMVIPGNADHLHRTSIHQLPPATNRLATHWEPCLWAQTERLCCCFLCPVRSPGDGGPHDVFTSLPSDCQLGSRRLETTCLELWLGLLHGLALLHLLHGVGCHHLQHVHQDGAGVQVQA

SEQ ID NO: 66902 - protein, 416 aa, Homo sapiens
MVAKDYPFYLTVKRANCSLELPPASGPAKDAEEPSNKRVKPLSRVTSLANLIPPVKATPLKRFSQTLQRSISFRSESRPDILAPRPWSRNAAPSSTKRRDSKLWSETFDVCVNQMLTSKEIKRQEAIFELSQGEEDLIEDLKLAKKAYHDPMLKLSIMTEQELNQIFGTLDSLIPLHEELLSQLRDVRKPDGSTEHVGPILVGWLPCLSSYDSYCSNQVAAKALLDHKKQDHRVQDFLQRCLESPFSRKLDLWNFLDIPRSRLVKYPLLLREILRHTPNDNPDQQHLEEAINIIQGIVAEINTKTGESECRYYKERLLYLEEGQKDSLIDSSRVLCCHGELKNNRGVKLHVFLFQEVLVITRAVTHNEQLCYQLYRQPIPVKDLLLEDLQDGEVRLGGSLRGAFSNNERSMDSSRG

SEQ ID NO: 66903 - protein, 67 aa, Homo sapiens
MKTYRQREKQGTKVADSSKGPDEAKIKALLERTGYTLDVTTGQRKYGGPPPDSVYSDICGKDPKRSI

SEQ ID NO: 66904 - protein, 165 aa, Homo sapiens
MAPNASCLCVHVRSEEWDLMTFDANPYDSVKKIKEHVRSKTKVPVQDQVLLLGSKILKPRRSLSSYGTDKEKTIHLTLKVVKPSDEELPLFLVESGDEAKRHLLQVRRSSSVAQVKAMIETKTGIIPETQIVTCNGKRLEDGKMMADYGIRKGNLLFLASYCIGG

SEQ ID NO: 66905 - protein, 118 aa, Homo sapiens
MNTSLSWFEQLDVLLNATDGNVVRNKQWLYPLGVSTELIGLCICFFCSSGCIFLGSPPQNSTAVTPAVLWEESEIMQKELKLLQYQLSQHQELLLKQLAEGRQAQVGSWKDLHSCCPI

SEQ ID NO: 66906 - protein, 179 aa, Homo sapiens
MPKKRQALVEFEDVLGACNAVNYAADNQIYIAGHPAFVNYSTSQKISRPGDSDDSRSVNSVLLFTILNPIYSITTDVLYTICNPCGPVQRIVIFRKNGVQAMVEFDSVQSAQRAKASLNGADIYSGCCTLKIEYAKPTRLNVFKNDQDTWDYTNPNLSGQGSQCMFDGTPSFRTVLTHC

SEQ ID NO: 66907 - protein, 61 aa, Homo sapiens
MTVPLNGVIRQHKTDKPDQVFLKDLSSTPMASNNTASIAQARKLVEQLKMEANIDRIKEVH

SEQ ID NO: 66908 - protein, 166 aa, Homo sapiens
GYSRPRYSPQVLGVRIQNGRHPLMELCARTFVPNSTECGGDKGRVKVITGPNSSGKSIYLKQVAKAVNNATAQSLVLIDEFGKGTNTVDGLALLAAVLRHWLARGPTCPHIFVATNFLSLVQLQLLPQGPLVQYLDWPRVSGQEGGLRRCCEGQPCLPHSCPGWAS

SEQ ID NO: 66909 - protein, 455 aa, Homo sapiens
MLNTPETLQCSAKDSKHFIPKECSIPGENRPPSDTGKTVKIYNEKELLQGKLDLLSDTNMVDFAMDVYKNLYSDDIPHALREKRTTVVAQLKQLQAETEPIVKMFEDPETTRQMQSTRDGRMLFDYLADKHGFRQEYLDTLYRYAKFQYECGNYSGAAEYLYFFRVLVPATDRNALSSLWGKLASEILMQNWDAAMEDLTRLKETIDNNSVSSPLQSLQQRTWLIHWSLFVFFNHPKGRDNIIDLFLYQPQYLNAIQTMCPHILRYLTTAVITNKDVRKRRQVLKDLVKVIQQESYTYKDPITEFVECLYVNFDFDGAQKKLRECESVLVNDFFLVACLEDFIENARLFIFETFCRIHQCISINMLADKLNMTPEEAERWIVNLIRNARLDAKIDSKLGHVVMGNNAVSPYQQVIEKTKSLSFRSQMLAMNIEKKLNQNSRSEAPNWATQDSGFY

SEQ ID NO: 66910 - protein, 997 aa, Homo sapiens
MPLAFCGSENHSAAYRVDQGVLNNGCFVDALNVVPHVFLLFITFPILFIGWGSQSSKVHIHHSTWLHFPGHNLRWILTFMLLFVLVCEIAEGILSDGVTESHHLHLYMPAGMAFMAAVTSVVYYHNIETSNFPKLLIALLVYWTLAFITKTIKFVKFLDHAIGFSQLRFCLTGLLVILYGMLLLVEVNVIRVRRYIFFKTPREVKPPEDLQDLGVRFLQPFVNLLSKGTYWWMNAFIKTAHKKPIDLRAIGKLPIAMRALTNYQRLCEAFDAQVRKDIQGTQGARAIWQALSHAFGRRLVLSSTFRILADLLGFAGPLCIFGIVDHLGKENDVFQPKTQFLGVYFVSSQEFLANAYVLAVLLFLALLLQRTFLQASYYVAIETGINLRGAIQTKIYNKIMHLSTSNLSMGEMTAGQICNLVAIDTNQLMWFFFLCPNLWAMPVQIIVGVILLYYILGVSALIGAAVIILLAPVQYFVATKLSQAQRSTLEYSNERLKQTNEMLRGIKLLKLYAWENIFRTRVETTRRKEMTSLRAFAIYTSISIFMNTAIPIAAVLITFVGHVSFFKEADFSPSVAFASLSLFHILVTPLFLLSSVVRSTVKALVSAEIREEQCAPHEPTPQGPASKYQAVPLRVVNRKRPAREDCRGLTGPLQSLVPSADGDADNCCVQIMGGYFTWTPDGIPTLSNITIRIPRGQLTMIVGQVGCGKSSLLLAALGEMQKVSGAVFWSSLPDSEIGEDPSPERETATDLDIRKRGPVAYASQKPWLLNATVEENIIFESPFNKQRYKMVIEACSLQPDIDILPHGDQTQIGERGINLSGGQRQRISVARALYQHANVVFLDDPFSALDIHLSDHLMQAGILELLRDDKRTVVLVTHKLQYLPHADWIIAMKDGTIQREGTLKDFQRSECQLFEHWKTLMNRQDQELEKRRQLRARRMTTCRPCCTSVLRSHGEPAPSTCPPPASCSCRCWSSHSCSSTWSWWPSTTGWPSGPTAP

SEQ ID NO: 66911 - protein, 219 aa, Homo sapiens
  MOD_RES (1)..(1): Any amino acid
XSSREPVGHKEESPKGPGGGPAASGGVAEGIANGRLVQHHGAEPSSLDKRKEIFSKDTLFKPLHSTLSVNSYHKSSLSLLKSHPKTPADTLPGRCEKLEPSLGTSAAQAMPASQRQQESGGNQEASFDYYNVSDDDDSEEGANKNTEEEKNREDVGTMQWLLEREKERDLQRKFEKNLTLLAPKETDSSSNQRATHSARLDSMDSSSITVDSGFNSPRN

SEQ ID NO: 66912 - protein, 130 aa, Homo sapiens
MGPSASSHGSPVPLPSDLSFRSPTPSNLPMVQLWAAHAHEGFSHLPSGLYPSYLHLNHLEPPSSGSPLLSQLGQPSIFDTQKGQGPGGGKTGVRGWGWHRGLLRGFWGLWQHPGSPQLCPGCWLFFFFFF

SEQ ID NO: 66913 - protein, 549 aa, Homo sapiens
MDVVEVAGSWWAQEREDIIMKYEKGHRAGLPEDKGPKPFRSYNNNVDHLGIVHETELPPLTAREAKQIRREISRKSKWVDMLGDWEKYKSSRKLIDRAYKGMPMNIRGPMWSVLLNIEEMKLKNPGRYQIMKEKGKRSSEHIQRIDRDISGTLRKHMFFRDRYGTKQRELLHILLAYEEYNPEVGYCRDLSHIAALFLLYFPEEDAFWALVQLLASERHSLQGFHSPNGGTVQGLQDQQEHVVATSQSKTMGHQDKKDLCGQCSPLGCLIRILIDGISLGLTLRLWDVYLVEGEQALMPITRIAFKVQQKRLTKTSRCGPWARFCNRFVDTWARDEDTVLKHLRASMKKLTRKQGDLPPPAKPEQGSSASRPVPASRGGKTLCKGDRQAPPGPPARFPRPIWSASPPRAPRSSTPCPGGAVREDTYPVGTQGVPSPALAQGGPQGSWRFLQWNSMPRLPTDLDVEGPWFRHYDFRQSCWVRAISQEDQLAPCWQAEHPAERVRSAFAAPSTDSDQGTPFRARDEQQYAPTSGPCLCGLHLESSQFPPGF

SEQ ID NO: 66914 - protein, 1162 aa, Homo sapiens
MKKFNFRKVLDGLTASSPGSGSSSGSNSGGGAGSGSVHPAGTAGVLREEIQETLTSEYFQICKTVRHGFPHQPTALAFDPVQKILAIGTRTGAIRILGRPGVDCYCQHESGAAVLQLQFLINEGALVSASSDDTLHLWNLRQKRPAILHSLKFNRERITYCHLPFQSKWLYVGTERGNTHIVNIESFILSGYVIMWNKAIELSTKTHPGPVVHLSDSPRDEGKLLIGYENGTVVFWDLKSKRAELRVYYDEAIHSIDWHHEGKQFMCSHSDGSLTLWNLKSPSRPFQTTIPHGKSQREGRKSESCKPILKVEYKTCKNSEPFIIFSGGLSYDKACRRPSLTIMHGKAITVLEMDHPIVEFLTLCETPYPNEFQEPYAVVVLLEKDLIVVDLTQSNFPIFENPYPMDIHESPVTCTAYFADCPPDLILVLYSIGVKHKKQGYSNKEWPISGGAWNLGAQTYPEIIITGHADGSIKFWDASAITLQMLYKLKTSKVFEKQKVGEGKQTCEIVEEDPFAIQMIYWCPESRIFCVSGVSAYVIIYKFSRHEITTEIVSLEVRLQYDVEDIITPEPETSPPFPDLSAQLPSSRSLSGSTNTVASEGVTKDSIPCLNVKTRPVRMPPGYQAELVIQLVWVDGEPPQQITSLAVSSAYGIVAFGNCNGLAVVDFIQKTVLLSMGTIDLYRSSDLYQRQPRSPRKNKQFIAGLTELNDSPVPLELERCKSPTSDHVNGHCTSPTSQSCSSGKRLSSADVSKVNRWGPGRPPFRKAQSAACMEISLPVTTEENRENSYNRSRSSSISSIDKDSKEAITALYFMDSFARKNDSTISPCLFVGTSLGMVLIISLNLPLADEQRFTEPVMVLPSGTFLSLKGAVLTFSCMDRMGGLMQPPYEVWRDPNNIDENEKSWRRKVVMNSSSASQEIGDHQYTIICSEKQAKVFSLPSQTCLYVHNITETSFILQANVVVMCSSACLACFCANGHIMIMSLPSLRPMLDVNYLPLTDMRIARTFCFTNEGQALYLVSPTEIQRLTYSQEMCDNLQDMLGDLFTPIETPEAQNRGFLKGLFGGSGQTFDREELFGEASAGKASRSLAQHIPGPGSIEGMKGAAGGVMGELTRARIALDERGQRLGELEEKTAGMMTSAEAFSKHAHELMLKYKDKKWYQF

SEQ ID NO: 66915 - protein, 426 aa, Homo sapiens
MVKHPNILQLVDVFVTRKEYFIFLELATGREVFDWILDQGYYSERDTSNVVRQVLEAVAYLHSLKIVHRNLKLENLVYYNRLKNSKIVISDFHLAKLENGLIKEPCGTPEYLAPEVVGRQRYGRPVDCWAIGVIMYILLSGNPPFYEEVEEDDYENHDKNLFRKILAGDYEFDSPYWDDISQAAKDLVTRLMEVEQDQRITAEEAISHEWISGNAASDKNIKDGVCAQIEKNFARAKWKKAVRVTTLMKRLRAPEQSSTAAAQSASATDTATPGAAGGATAAAASGATSAPEGDAARAAKSDNVAPADRSATPATDGSATPATDGSVTPATDGSITPATDGSVTPATDRSATPATDGRATPATEESTVPTTQSSAMLATKAAATPEPAMAQPDSTAPEGATGQAPPSSKGEEAAGYAQESQREEAS

SEQ ID NO: 66916 - protein, 70 aa, Homo sapiens
MAEQATKSVLFVCLGNICRSPIAEAVFRKLVTDQNISENWRVDSAATSGGSLTAVLFLTGTWAGPQTQEL

SEQ ID NO: 66917 - protein, 45 aa, Homo sapiens
MAAPSPSGGGGSGGGSGSGTPGPVGSPAPGHPAVSSMQENSVNSG

SEQ ID NO: 66918 - protein, 78 aa, Homo sapiens
MGSGLPLVLLLTLLGSSHGTGPGMTLQLKLKESFLTSSSYESSFLELLEKLCLLLHLPSGTSVTLHHARSQHHVVCNT

SEQ ID NO: 66919 - protein, 892 aa, Homo sapiens
MSVPDSGPRPPAAPAPFPPGPPMMPPPFMPPPGIPPPFPPMGLPPMSQRPPAIPPMPPGILPPMLPPMGAPPPLTQIPGMVPPMMPGMLMPAVPVTAATAPGADTASSAVAGTGPPRALWSEHVAPDGRIYYYNADDKQSVWEKPSVLKSKAELLLSQCPWKEYKSDTGKPYYYNNQSKESRWTRPKDLDDLEVLVKQEAAGKQQQQLPQTLQPQPPQPQPDPPPVPPGPTPVPTGLLEPEPGGSEDCDVLEATQPLEQGFLQQLEEGPSSSGQHQPQQEEEESKPEPERSGLSWSNREKAKQAFKELLRDKAVPSNASWEQAMKMVVTDPRYSALPKLSEKKQAFNAYKAQREKEEKEEARLRAKEAKQTLQHFLEQHERMTSTTRYRRAEQTFGELEVWAVVPERDRKEVYDDVLFFLAKKEKEQAKQLRRRNIQALKSILDGMSSVNFQTTWSQAQQYLMDNPSFAQDHQLQNMDKEDALICFEEHIRALEREEEEERERARLRERRQQRKNREAFQTFLDELHETGQLHSMSTWMELYPAVSTDVRFANMLGQPGSTPLDLFKFYVEELKARFHDEKKIIKDILKDRGFCVEVNTAFEDFAHVISFDKRAAALDAGNIKLTFNSLLEKAEAREREREKEEARRMRRREAAFRSMLRQAVPALELGTAWEEVRERFVCDSAFEQITLESERIRLFREFLQVLETECQHLHTKGRKHGRKGKKHHHKRSHSPSGSESEEEELPPPSLRPPKRRRRNPSESGSEPSSSLDSVESGGAALGGRGSPSSHLLGADHGLRKAKKPKKKTKKRRHKSNSPESETDPEEKAGKESDEKEQEQDKDRELQQAELPNRSPGFGIKKEKTGWDTSESELSEGELERRRRTLLQQLDDHQ

SEQ ID NO: 66920 - protein, 58 aa, Homo sapiens
MERQTAEQRVSFRHHESCAAQGWRHGPWGREAVPGGLGEEPEAQELQPVSAGETWACL

SEQ ID NO: 66921 - protein, 110 aa, Homo sapiens
MTTAQRDSLLWKLAGLLRESGDVVLSGCSTLSLLTPTLQQLNHVFELHLGPWGPGQTGFVALPSHPADSPVILQLQFLFDVLQKTLSLKVLGVGKRQDVQGAQENDGSWG

SEQ ID NO: 66922 - protein, 219 aa, Homo sapiens
MELAAGSFSEEQFWEACAELQQPALAGADWQLLVETSGISIYRLLDKKTGLYEYKVFGVLEDCSPTLLADIYMDSDYRKQWDQYVKELYEQECNGETVVYWEVKYPFPMSNRDYVYLRQRRDLDMEGRKIHVILARSTSMPQLGERSGVIRVKQYKQSLAIESDGKKGSKVFMYYFDNPGGQIPSWLINWAAKNQSRTKREAQNQRDLIKFLANPNILQ

SEQ ID NO: 66923 - protein, 241 aa, Homo sapiens
MWNWLRLVKDSVSEKTIGLMRMQFWKKTVEDIYCDNPPHQPVAIELWKAVKRHNLTKRWLMKIVDEREKNLDDKAYRNIKELENYAENTQSSLLYLTLEILGIKDLHADHAASHIGKAQGIVTCLRATPYHGSRRKVFLPMDICMLHGVSQEDFLRRNQDKNVRDVIYDIASQAHLHLKHARSFHKTVPVKAFPAFLQTVSLEDFLKKIQRVDFDIFHPSLQQKNTLLPLYLYIQSWRKTY

SEQ ID NO: 66924 - protein, 674 aa, Homo sapiens
KAEGPGSQLQKLLPSFLVREQDWDQHLDKLHMLQQKRILESPLLRASKENDLSVLRQLLLDCTCDVRQRGALGETALHIAALYDNLEAALVLMEAAPELVFEPTTCEAFAGQTALHIAVVNQNVNLVRALLTRRASVSARATGTAFRHSPRNLIYFGEHPLSFAACVNSEEIVRLLIEHGADIRAQDSLGNTVLHILILQPNKTFACQMYNLLLSYDGHGDHLQPLDLVPNHQGLTPFKLAGVEGNTVARQILEQTPVKELVSFKWNKYGRPYFCILAALYLLYMICFTTCCVYRPLKFRGGNRTHSRDITILQQKLLQEAYETREDIIRLVGELVSIVGAVIILLLEIPDIFRVGASRYFGKTILGGPFHVIIITYASLVLVTMVMRLTNTNGEVVPMSFALVLGWCSVMYFTRGFQMLGPFTIMIQKMIFGDLMRFCWLMAVVILGFASAFYIIFQTEDPTSLGQFYDYPMALFTTFELFLTVIDAPANYDVDLPFMFSIVNFAFTIIATLLMLNLFIAMMGDTHWRVAQERDELWRAQVVATTVMLERKLPRCLWPRSGICGCEFGLGDRWFLRVENHNDQNPLRVLRYVEVFKNSDKEDDQEHPSEKQPSGAESGTLARASLALPTSSLSRTASQSSSHRGWEILRQNTLGHLNLGLNLSEGDGEEVYHF

SEQ ID NO: 66925 - protein, 115 aa, Homo sapiens
MTTFSQLRELHLEGNFLHRLPSEVSALQHLKAIDLSRNQFQDFPEQLTALPALETINLEENEIVDVPVEKLAAMPALRSINLRFNPLNAEVRVIAPPLIKFDMLMSPEGARAPLP

SEQ ID NO: 66926 - protein, 664 aa, Homo sapiens
MGDILAHESELLGLVKEYLDFAEFEDTLKTFSKECKIKGKPLCKTVGGSFRDSKSLTIQDLVAAFDNGDQKVFFDLWEEHISSSIRDGDSFAQKLEFYLHIHFAIYLLKYSVGRPDKEELDEKISYFKTYLETKGAALSQTTEFLPFYALPFVPNPMVHPSFKELFQDSWTPELKLKLIKFLALISKASNTPKLLTIYKENGQSNKEILQQLHQQLVEAERRSVTYLKRYNKIQADYHNLIGVTAELVDSLEATVSGKMITPEYLQSVCVRLFSNQMRQSLAHSVDFTRPGTASTMLRASLAPVKLKDVPLLPSLDYEKLKKDLILGSDRLKAFLLQALRWRLTTSHPGEQRETVLQAYISNDLLDCYSHNQRSVLQLLHSTSDVVRQYMARLINAFASLAEGRLYLAQNTKVLQMLEGRLKEEDKDIITRENVLGALQKFSLRRPLQTAMIQDGLIFWLVDVLKDPDCLSDYTLEYSVALLMNLCLRSTGKNMCAKVAGLVLKVLSDLLGHENHEIQPYVNGALYSILSVPSIREEARAMGMEDILRCFIKEGNAEMIRQIEFIIKQLNSEELPDGVLESDDDEDEDDEEDHDIMEADLDKDELIQPQLGELSGEKLLTTEYLGIMTNTGKTRRKGLANVQWSGDEPLQRPVTPGGHRNGYPV

SEQ ID NO: 66927 - protein, 150 aa, Homo sapiens
MILWLHGENGTGPAKFNIPHSVTLDSAGRVWVADRGNKRIQVFDKDTGEWLGAWNNCFTEEGPSSVRFTPDGKYLIVAQLNLSRLSVVAAPPVGSIGECSVISTIQLADQVLPHLLEVDRKTGAVYVAEIGAKQVQKYVPLNSYVPSFGS

SEQ ID NO: 66928 - protein, 147 aa, Homo sapiens
MARHRNVRGYNYDEDFEDDDLYGQSVEDDYCISPSTAAQFIYSRRDKPSVEPVEEYDYEDLKESSNSVSNHQLSGFDQARLYSCLDHMREVLGDAVPDEILIEAVLKNKFDVQKALSGVLEQDRVQSLKDKNEATVSTGKIAKGPCC

SEQ ID NO: 66929 - protein, 833 aa, Homo sapiens
RTFANQRRLVQGDSKLFFNNVFTVEPLEGDVWPNSSAEITVYFNPLEAKLYQQTIYCDILGREIRLPLRIKGEGMGPKIHFNFELLDIGKVFTGSAHCYEAILYNKGSIDALFNMTPPTSALGACFVFSPKEGIIEPSGVQAIQISFSSTILGNFEEEFLVNVNGSPEPVKLTIRGCVIGPTFHFNVPALHFGDVSFGFPHTLICSLNNTSLIPMTYKLRIPGDGLGHKSISYCEQHVDYKRPSWTKEEISSMKPKEFTISPDCGTIRPQGFAAIRVTLCSNTVQKYELALVVDVEGIGEEVLALLITARCVVPALHLVNTEVDFGHCFLKYPYEKTLQLANQDDLPGFYEVQPQVCEEVPTVLFSSPTPSGVISPSSTIHIPLVLETQVTGEHRSTVYISIFGSQDPPLVCHLKSAGEGPVIYVHPNQVDFGNIYVLKDSSRILNLCNQSFIPAFFQAHMAHKKSLWTIEPNEGMVPPETDVQLALTANLNDTLTFKDCVILDIENSSTYRIPVQASGTGSTIVSDKPFAPELNLGAHFSLDTHYYHFKLINKGRRIQQLFWMNDSFRPQAKLSKKGRVKKGHAHVQPQPSGSQEPRDPQSPVFHLHPASMELYPGQAIDVILEGYSATPRKPNSILKPDYQPLAIKNISTLPVNLLLSTSGPFFICETDKSLLPATPEPIKLEIDEEKNLLIKFDPSYRNDLNNWVAEEILAIKYVEHPQIDSLDLRGEVHYPNLSFETKELDFGCILNDTELIRYVTITNCSPLVVKFRWFFLVNDEENQIRFVTLPKKPYSAPVSQMESIPATSEAASPPAILVTVESPEMDLNDFVKK

SEQ ID NO: 66930 - protein, 119 aa, Homo sapiens
  MOD_RES (1)..(1): Any amino acid
XPFLGSQNMYFVFIQLLSSGSAWFAIILMVVTCLFLDIIKKVFDRHLHPTSTEKAQMYSNTVALSDEFIALQPLSRARNQLSKLSLLKQMQVSSAWTPCAVSRKEKQRVHLLEECWNEL

SEQ ID NO: 66931 - protein, 107 aa, Homo sapiens
MAWIKRKFGERPPPKRLTREAMRNYLKERGDQTVLILHAKVAQKSYGNEKRFFCPPPCVYLMGSGWKKKKEQMERDGCSEQESQPCAFIGIGNSDQEMQQLNLEGKN

SEQ ID NO: 66932 - protein, 410 aa, Homo sapiens
MSLMVVSMACVGFFLLEGPWPHVGGQDKPFLSAWPGTVVSEGQHVTLQCRSRLGFNEFSLSKEDGMPVPELYNRIFRNSFLMGPVTPAHAGTYRCCSSHPHSPTGWSAPSNPVVIMVTGVHRKPSLLAHPGPLVKSGETVILQCWSDVRFERFLLHREGITEDPLRLIGQLHDAGSQVNYSMGPMTPALAGTYRCFGSVTHLPYELSAPSDPLDIVVVGLYGKPSLSAQPGPTVQAGENVTLSCSSRSLFDIYHLSREAEAGELRLTAVLRVNGTFQANFPLGPVTHGGNYRCFGSFRALPHAWSDPSDPLPVSVTGNSRNLHVLIGTSVVIIPFAILLFFLLHRWCANKKNAVVMDQEPAGNRTVNREDSDEQDPQEVTYAQLNHCVFTQRKITRPSQRPKTPPTDTSV

SEQ ID NO: 66933 - protein, 695 aa, Homo sapiens
MGPPGPPGFPGERGQKGDEGPPGISIPGPPGLDGQPGAPGLPGPPGPAGPHIPPSDEICEPGPPGPPGSPGDKGLQGEQGVKGDKGDTCFNCIGTGISGPPGQPGLPGLPGPPGSLGFPGQKGEKGQAGATGPKGLPGIPGAPGAPGFPGSKGEPGDILTFPGMKGDKGELGSPGAPGLPGLPGTPGQDGLPGLPGPKGEPGGITFKGERGPPGNPGLPGLPGNIGPMGPPGFGPPGPVGEKGIQGVAGNPGQPGIPGPKGDPGQTITQPGKPGLPGNPGRDGDVGLPGDPGLPGQPGLPGIPGSKGEPGIPGIGLPGPPGPKGFPGIPGPPGAPGTPGRIGLEGPPGPPGFPGPKGEPGFALPGPPGPPGLPGFKGALGPKGDRGFPGPPGPPGRTGLDGLPGPKGDVGPNGQPGPMGPPGLPGIGVQGPPGPPGIPGPIGQPGLHGIPGEKGDPGPPGLDVPGPPGERGSPGIPGAPGPIGPPGSPGLPGKAGASGFPGTKGEMGMMGPPGPPGPLGIPGRSGVPGLKGDDGLQGQPGLPGPTGEKGSKGEPGLPGPPGPMDPNLLGSKGEKGEPGLPGIPGVSGPKGYQGLPGDPGQPGLSGQPGLPGPPGPKGNPGLPGQPGLIGPPGLKGTIGDMGFPGPQGVEGPPGPSGVPGQPGSPGLPGQKGDKGDPGISSIGLPGLPGPKVIFGI

SEQ ID NO: 66934 - protein, 1365 aa, Homo sapiens
MGTSSHGLATNSSGAKVAERDGFQDVLAPGEGSAGRICGAQPVPFVPQVLGVMIGAGVAVVVTAVLILLVVRRLRVPKTPAPDGPRYRFRKRDKVLFYGRKIMRKVSQSTSSLVDTSVSATSRPRMRKKLKMLNIAKKILRIQKETPTLQRKEPPPAVLEADLTEGDLANSHLPSEVLYMLKNVRVLGHFEKPLFLELCRHMVFQRLGQGDYVFRPGQPDASIYVVQDGLLELCLPGPDGKECVVKEVVPGDSVNSLLSILDVITGHQHPQRTVSARAARDSTVLRLPVEAFSAVFTKYPESLVRVVQIIMVRLQRVTFLALHNYLGLTNELFSHEIQPLRLFPSPGLPTRTSPVRGSKRMVSTSATDEPRETPGRPPDPTGAPLPGPTGDPVKPTSLETPSAPLLSRCVSMPGDISGLQGGPRSDFDMAYERGRISVSLQEEASGGSLAAPARTPTQEPREQPAGACEYSYCEDESATGGCPFGPYQGRQTSSIFEAAKQELAKLMRIEDPSLLNSRVLLHHAKAGTIIARQGDQDVSLHFVLWGCLHVYQRMIDKAEDVCLFVAQPGELVGQLAVLTGEPLIFTLRAQRDCTFLRISKSDFYEIMRAQPSVVLSAAHTVAARMSPFVRQMDFAIDWTAVEAGRALYRQGDRSDCTYIVLNGRLRSVIQRGSGKKELVGEYGRGDLIGVVEALTRQPRATTVHAVRDTELAKLPEGTLGHIKRRYPQVVTRLIHLLSQKILGNLQQLQGPFPGSGLGVPPHSELTNPASNLATVAILPVCAEVPMVAFTLELQHALQAIGPTLLLNSDIIRARLGASALDSIQEFRLSGWLAQQEDAHRIVLYQTDASLTPWTVRCLRQADCILIVGLGDQEPTLGQLEQMLENTAVRALKQLVLLHREEGAGPTRTVEWLNMRSWCSGHLHLRCPRRLFSRRSPAKLHELYEKVFSRRADRHSDFSRLARVLTGNTIALVLGGGGARGCSHIGVLKALEEAGVPVDLVGGTSIGSFIGALYAEERSASRTKQRAREWAKSMTSVLEPVLDLTYPVTSMFTGSAFNRSIHRVFQDKQIEDLWLPYFNVTTDITASAMRVHKDGSLWRYVRASMTLSGYLPPLCDPKDGHLLMDGGYINNLPADIARSMGAKTVIAIDVGSQDETDLSTYGDSLSGWWLLWKRLNPWADKVKVPDMAEIQSRLAYVSCVRQLEVVKSSSYCEYLRPPIDCFKTMDFGKFDQIYDVGYQYGKAVFGGWSRGNVIEKMLTDRRSTDLNESRRADVLAFPSSGFTDLAEIVSRIEPPTSYVSDGCADGEESDCLTEYEEDAGPDCSRDEGGSPEGASPSTASEMEEEKSILRQRRCLPQEPPGSATDA

SEQ ID NO: 66935 - protein, 147 aa, Homo sapiens
MAAPMNGQVCVVTGASRGIGRGIALQLCKAGATVYITGRHLDTLRVVAQEAQSLGGQCVPVVCDSSQESEVRSLFEQVDREQQGRLDVLVNNAYAGVQTILNTRNKAFWETPASMWDDINNVGLRKPAVYVQCPLWCGQSCGEDPVA

SEQ ID NO: 66936 - protein, 147 aa, Homo sapiens
MHSFRLARLSSWRVHAGLVSHSAVRPHQGALVERIIPHPLYSAQNHDYDVALLRLQTALNFSDTVGAVCLPAKEQHFPKGSRCWVSGWGHTHPSHTYSSDMLQDTVVPLFSTQLCNSSCVYSGALTPRMLCAGYLDGRADACQDSLL

SEQ ID NO: 66937 - protein, 18 aa, Homo sapiens
MKLTSCLERALGDVFLLI

SEQ ID NO: 66938 - protein, 953 aa, Homo sapiens
MDSLLPPSRFSYFKKYPLHAIRRYLSTLRNQRAEEQVARFQKIPNGENETMIPVLTSKKASELPVSEVASILQADLQNGLNKCEVSHRRAFHGWNEFDISEDEPLWKKYISQFKNPLIMLLLASAVISVLMHQFDDAVSITVAILIVVTVAFVQEYRSEKSLEELSKLVPPECHCVREGKLEHTLARDLVPGDTVCLSVGDRVPADLRLFEAVDLSIDESSLTGETTPCSKVTAPQPAATNGDLASRSNIAFMGTLVRCGKAKGVVIGTGENSEFGEVFKMMQAEEAPKTPLQKSMDLLGKQLSFYSFGIIGIIMLVGWLLGKDILEMFTISVSLAVAAIPEGLPIVVTVTLALGVMRMVKKRAIVKKLPIVETLGCCNVICSDKTGTLTKNEMTVTHIFTSDGLHAEVTGVGYNQFGEVIVDGDVVHGFYNPAVSRIVEAGCVCNDAVIRNNTLMGKPTEGALIALAMKMGLDGLQQDYIRKAEYPFSSEQKWMAVKCVHRTQQDRPEICFMKGAYEQVIKYCTTYQSKGQTLTLTQQQRDVYQQEKARMGSAGLRVLALASGPELGQLTFLGLVGIIDPPRTGVKEAVTTLIASGVSIKMITGDSQETAVAIASRLGLYSKTSQSVSGEEIDAMDVQQLSQIVPKVAVFYRASPRHKMKIIKSLQKNGSVVAMTGDGVNDAVALKAADIGVAMGQTGTDVCKEAADMILVDDDFQTIMSAIEEGKGIYNNIKNFVRFQLSTSIAALTLISLATLMNFPNPLNAMQILWINIIMDGPPAQSLGVEPVDKDVIRKPPRNWKDSILTKNLILKILVSSIIIVCGTLFVFWRELRDNVITPRDTTMTFTCFVFFDMFNALSSRSQTKSVFEIGLCSNRMFCYAVLGSIMGQLLVIYFPPLQKVFQTESLSILDLLFLLGLTSSVCIVAEIIKKVERSREKIQKHVSSTSSSFLEV

SEQ ID NO: 66939 - protein, 46 aa, Homo sapiens
MDDYMVLRMIGEGSFGRALLVQHESSNQMFAMKEIRLPKLKDTCIL

SEQ ID NO: 66940 - protein, 69 aa, Homo sapiens
MLRWLRDFVLPTAACQDAEQPTRYETLFQALDRNGDGVVDIGELQEGLRNLGIPLGQDAEEVGRRRGAA

SEQ ID NO: 66941 - protein, 295 aa, Homo sapiens [sequence omitted]

SEQ ID NO: 66942 - protein, 87 aa, Homo sapiens
MTNTKGKRRGTRYMFSRPFRKHGVVPLATYMRIYKKGDIVDIKGMGTVQKGMPHKCYHGKTGRVYNVTQHAVGIVVNKQGQDSCQEN

SEQ ID NO: 66943 - protein, 673 aa, Homo sapiens
MAAQNQMECEEEKAATLSSDTSIQASEPLLDTHIVNGERDETATAPASPTTDSCDGNASDSSYRTPGIGPVLPLEERGAETETKVQERENGESPLELEQLDQHHEMKETNEQKLHKIANELLLTERAYVNRLDLLDQVFYCKLLEEANRGSFPAEMVNKIFSNISSINAFHSKFLLPELEKRMQEWETTPRIGDILQKLAPFLKMYGEYVKGFDNAMELVKNMTERIPQFKSVVEEIQKQKICGSLTLQHHMLEPVQRIPRYEMLLKDYLRKLPPDSLDWNDAKKSLEIISTAASHSNSAIRKMENLKKLLEIYEMLGEEEDIVNPSNELIKEGQILKLAARNTSAQERYLFLFNNMLLYCVPKFSLVGSKFTVRTRVGIDGMKIVETQNEEYPHTFQVSGKERTLELQASSAQDKEEWIKALQETIDAFHQRHETFRNAIAKDNDIHSEVSTAELGKRAPRWIRDNEVTMCMKCKEPFNALTRRRHHCRACGYVVCWKCSDYKAQLEYDGGKLSKVCKDCYQIISGFTDSEEKKRKGILEIESAEVSGNSVVCSFLQYMEKSKPWQKAWCVIPKQDPLVLYMYGAPQDVRAQATIPLLGYVVDEMPRSADLPHSFKLTQSKSVHSFAADSEELKQKWLKVILLAVTGETPGGPNEHPATLDDHPEPKKKSEC

SEQ ID NO: 66944 - protein, 107 aa, Homo sapiens
MRTKAAGCAERRPLQPRTEAAAAPAGRAMPSEYTYVKLRSDCSRPSLQWYTRAQSKMRRPSLLLKDILKCTLLVFGVWILYILKLNYTTEECDMKKMHYVDPDHVKS

SEQ ID NO: 66945 - protein, 98 aa, Homo sapiens
MGLIYKCLPEKVTVNIETRCLPGVFQGSQHQWDQWVSPRWLHLLPPLSALAGCPTSARAATLWGSPGPPQMGPHCRTLSKGGAQSLPRQARPRACGSW

SEQ ID NO: 66946 - protein, 148 aa, Homo sapiens
MFEQAQIQEFKEAFSCIDQNRDGIICKADLRETYSQLGKVSVPEEELDAMLQEGKGPINFTVFLTLFGEKLNGTDPEEAILSAFRMFDPSGKGVVNKDEFKQLLLTQADKFSPAEVEQMFALTPMDLAGNIDYKSLCYIITHGDEKEE

SEQ ID NO: 66947 - protein, 88 aa, Homo sapiens
MTTLVLDNGAYNAKIGYSHENVSVIPNCQFRSKTARLKTFTANQIDEIKDPSGLFYILPFQKGYLVNWDVQRQVWDYLFGKEMYQVTN

SEQ ID NO: 66948 - protein, 92 aa, Homo sapiens
MGKESGWDSGRAAVAAVVGGVVAVGTVLVALSAMGFTSVGIAASSIAAKMMSTAAIANGGGVAAGSLVAILQSVGECSGQDDQSQEMIQPRG

SEQ ID NO: 66949 - protein, 808 aa, Homo sapiens
MPTAESEAKVKTKVRFEELLKTHSDLMREKKKLKKKLVRSEENISPDTIRSNLHYMKETTSDDPDTIRSNLPHIKETTSDDVSAANTNNLKKSTRVTKNKLRNTQLATENPNGDASVEEDKQGKPNKKVIKTVPQLTTQDLKPETPENKVDSTHQKTHTKPQPGVDHQKSEKANEGREETDLEEDEELMQAYQCHVTEEMAKEIKRKIRKKLKEQLTYFPSDTLFHDDKLSSEKRKKKKEVPVFSKAETSTLTISGDTVEGEQKKESSVRSVSSDSHQDDEISSMEQSTEDSMQDDTKPKPKKTKKKTKAVADNNEDVDGDGVHEITSRDSPVYPKCLLDDDLVLGVYIHRTDRLKSDFMISHPMVKIHVVDEHTGQYVKKDDSGRPVSSYYEKENVDYILPIMTQPYDFKQLKSRLPEWEEQIVFNENFPYLLRGSDESPKVILFFEILDFLSVDEIKNNSEVQNQECGFRKIAWAFLKLLGANGNANINSKLRLQLYYPPTKPRSPLSVVEAFEWWSKCPRNHYPSTLYVTVRGLKVPDCIKPSYRSMMALQEEKGKPVHCERHHESSSVDTEPGLEESKEVIKWKRLPGQACRIPNKHLFSLNAGERGCFCLDFSHNGRILAAACASRDGYPIILYEIPSGRFMRELCGHLNIIYDLSWSKDDHYILTSSSDGTARIWKNEINNTNTFRVLPHPSFVYTAKFHPAVRELVVTGCYDSMIRIWKVEMREDSAILVRQFDVHKSFINSLCFDTEGHHMYSGDCTGVIVVWNTYVKINDLEHSVHHWTINKISSKEVCRSSKLSGEDS

SEQ ID NO: 66950 - protein, 472 aa, Homo sapiens
MWRLPRALCVHAAKTSKLSGPWSRPAAFMSTLLINQPQYAWLKELGLREENEGVYNGSWGGRGEVSLEMGKILVEGVGEVQEYVDICDYAVGLSRMIGGPILPSERSGHALIEQWNPVGLVGIITAFNFPVAVYGWNNAIAMICGNVCLWKGAPTTSLISVAVTKIIAKVLEDNKLPGAICSLTCGGADIGTAMAKDERVNLLSFTGSTQVGKQVGLMVQERFGRSLLELGGNNAIIAFEDADLSLVVPSALFAAVGTAGQRCTTARRLFIHESIHDEVVNRLKKAYAQIRVGNPWDPNVLYGPLHTKQAVSMFLGAVEEAKKEGGTVVYGGKVMDRPGNYVEPTIVTGLGHDASIAHTETFAPILYVFKFKNEEEVFAWNNEVKQGLSSSIFTKDLGRIFRWLGPKGSDCGIVNVNIPTSGAEIGGAFGGEKHTGGGRESGSDAWKQYMRRSTCTINYSKDLPLAQGIKFQ

SEQ ID NO: 66951 - protein, 435 aa, Homo sapiens
MAAPSLHPSLGPGIGSPGQLHSPISTLSSPINGMGPPFSVISSPMGPHSMSVPTTPTLGFSTGSPQLSSPMNPVSSSEDIKPPLGLNGVLKVPAHPSGNMASFTKHICAICGDRSSGKHYGVYSCEGCKGFFKRTVRKDLTYTCRDNKDCLIDKRQRNRCQYCRYQKCLAMGMKREAVQEERQRGKDRNENEVESTSSANEDMPVERILEAELAVEPKTETYVEANMGLNPSSPNDPVTNICQAADKQLFTLVEWAKRIPHFSELPLDDQVILLRAGWNELLIASFSHRSIAVKDGILLATGLHVHRNSAHSAGVGAIFDRVLTELVSKMRDMQMDKTELGCLRAIVLFNPDSKGLSNPAEVEALREKVYASLEAYCKHKYPEQPGRFAKLLLRLPALRSIGLKCLEHLFFFKLIGDTPIDTFLMEMLEAPHQMT

SEQ ID NO: 66952 - protein, 585 aa, Homo sapiens
MEIIRSNFKSNLHKVYQAIEEADFFAIDGEFSGISDGPSVSALTNGFDTPEERYQKLKKHSMDFLLFQFGLCTFKYDYTDSKYITKSFNFYVFPKPFNRSSPDVKFVCQSSSIDFLASQGFDFNKVFRNGIPYLNQEEERQLREQYDEKRSQANGAGALSYVSPNTSKCPVTIPEDQKKFIDQVVEKIEDLLQSEENKNLDLEPCTGFQRKLIYQTLSWKYPKGIHVETLETEKKERYIVISKVDEEERKRREQQKHAKEQEELNDAVGFSRVIHAIANSGKLVIGHNMLLDVMHTVHQFYCPLPADLSEFKEMTTCVFPRLLDTKLMASTQPFKDIINNTSLAELEKRLKETPFNPPKVESAEGFPSYDTASEQLHEAGYDAYITGLCFISMANYLGSFLSPPKIHVSARSKLIEPFFNKLFLMRVMDIPYLNLEGPDLQPKRDHVLHVTFPKEWKTSDLYQLFSAFGNIQISWIDDTSAFVSLSQPEQVKIAVNTSKYAESYRIQTYAEYMGRKQEEKQIKRKWTEDSWKEADSKRLNPQCIPYTLQNHYYRNNSDKPRQHSFQMDNQKRELINQDESVIRNQ

SEQ ID NO: 66953 - protein, 117 aa, Homo sapiens
MTAPSCAFPVQFRQPSVSGLSQITKSLYISNGVAANNKLMLSSNQITMVINVSVERGDEAGPYFAALCCWCEPLSCPVPRLPHEVPRHVPAGRPHVDQVMPAHHPTQQRLLGAAHPL

SEQ ID NO: 66954 - protein, 67 aa, Homo sapiens
MRLRFCISSQEYNINNAESFSASYPETYDVQGMFQLTNWTLTSEGRLDTTPVGDSFAQAVLPRQPPE

SEQ ID NO: 66955 - protein, 523 aa, Homo sapiens
MAEAATGFLEQLKSCIVWSWTYLWTVWFFIVLFLVYILRVPLKINDNLSTVSMFLNTLTPKFYVALTGTSSLISGLILIFEWWYFRKYGTSFIEQVSVSHLRPLLGGVDNNSSNNSNSSNGDSDSNRQSVSECKVWRNPLNLFRGAEYNRYTWVTGREPLTYYDMNLSAQDHQTFFTCDSDHLRPADAIMQKAWRERNPQARISAAHEALEINECATAYILLAEEEATTIAEAEKLFKQALKAGDGCYRRSQQLQHHGSQYEAQHRRDTNVLVYIKRRLAMCARRLGRTREAVKMMRDLMKEFPLLSMFNIHENLLEALLELQAYADVQAVLAKYDDISLPKSATICYTAALLKARAVSDKFSPEAASRRGLSTAEMNAVEAIHRAVEFNPHVPKYLLEMKSLILPPEHILKRGDSEAIAYAFFHLAHWKRVEGALNLLHCTWEGTFHEVSVYPKKELPFFILFTAGLCSFTAMLALLTHQFPELMGVFAKAFLSTLFAPLNFVMEKVESILPSSLWHQLTRI

SEQ ID NO: 66956 - protein, 824 aa, Homo sapiens
MGEAEKFHYIYSCDLDINVQLKIWNEWLKLPVKYPDLPRNAQVALTIWDVYGPGKAVPVGGTTVSLFGKYGMFRQGMHDLKVWPNVEADGSEPTKTPGRTSSTLSEDQMSRLAKLTKAHRQGHMVKVDWLDRLTFREIEMINESEKRSSNFMYLMVEFRCVKCDDKEYGIVYYEKDGDESSPILTSFELVKVPDPQMSMENLVESKHHKLARSLRSGPSDHDLKPNAATRDQLNIIVSYPPTKQLTYEEQDLVWKFRYYLTNQEKALTKFLKCVNWDLPQEAKQALELLGKWKPMDVEDSLELLSSHYTNPTVRRYAVARLRQADDEDLLMYLLQLVQALKYENFDDIKNGLEPTKKDSQSSVSENVSNSGINSAEIDSSQIITSPLPSVSSPPPASKTKEVPDGENLEQDLCTFLISRACKNSTLANYLYWYVIVECEDQDTQQRDPKTHEMYLNVMRRFSQALLKGDKSVRVMRSLLAAQQTFVDRLVHLMKAVQRESGNRKKKNERLQALLGDNEKMNLSDVELIPLPLEPQVKIRGIIPETATLFKSALMPAQLFFKTEDGGKYPVIFKHGDDLRQDQLILQIISLMDKLLRKENLDLKLTPYKVLATSTKHGFMQFIQSVPVAEVLDTEGSIQNFFRKYAPSENGPNGISAEVMDTYVKSCAGYCVITYILGVGDRHLDNLLLTKTGKLFHIDFGYILGRDPKPLPPPMKLNKEMVEGMGGTQSEQYQEFRKQCYTAFLHLRRYSNLILNLFSLMVDANIPDIALEPDKTVKKVQDKFRLDLSDEEAVHYMQSLIDESVHALFAAVVEQIHKFAQYWRK

SEQ ID NO: 66957 - protein, 17 aa, Homo sapiens
MAAAEAVHHIHLQNFSR

SEQ ID NO: 66958 - protein, 87 aa, Homo sapiens
MELAHSLLLNEEAYNQLGEVQKAEFIFEWLRYLEKLLLATSRNDVREKQKTLVEQLLSLLNSSPGPPTRKLLAKNLAILYSIGDTFS

SEQ ID NO: 66959 - protein, 388 aa, Homo sapiens
MSLMLDDQPPMEAQYAEEGPGPGIFRAEPGDQQHPISQAVCWRSMRRGCAVLGALGLLAGAGVGSWLLVLYLCPAASQPISGTLQDEEITLSCSEASAEEALLPALPKTVSFRINSEDFLLEAQVRDQPRWLLVCHEGWSPALGLQICWSLGHLRLTHHKGVNLTDIKLNSSQEFAQLSPRLGGFLEEAWQPSFRLARLSSWRVHAGLVSHSAVRPHQGALVERIIPHPLYSAQNHDYDVALLRLQTALNFSDTVGAVCLPAKEQHFPKGSRCWVSGWGHTHPSHTYSSDMLQDTVVPLFSTQLCNSSCVYSGALTPRMLCAGYLDGRADACQGDSGGPLVCPDGDTWRLVGVVSWGRGCAEPNHPGVYAKVAEFLDWIHDTAQDSLL

SEQ ID NO: 66960 - protein, 118 aa, Homo sapiens
MDFENQDKEKDSNSSSGSFNGNSTNNSIQTIDSTQALFLPIGASVSLLVMFFFFDSVQVVFTICTAVLATIAFAFLLLPMCQYLTRPCSPQNKISFGCCGRFTAAELLSFSLSVMLVL

SEQ ID NO: 66961 - protein, 836 aa, Homo sapiens
MYMCFLFCSRYCTSITNFLVMGGFQLLAKPAIDFLNKNQELLQDLSEVNDENTQLMEILNTLFFLPIRRLHNYAKVLLKLATCFEVASPEYQKLQDSSSCYECLALHLGRKRKEAEYTLGFWKTFPGKMTDSLRKPERRLLCESSNRALSLQHAGRFSVNWFILFNDALVHAQTKWLRAISQAVDQALRGMSDLPPYGSGSSVQRQEPPISRSAKYTFYKDPRLKDATYDGRWLSGKPHGRGVLKWPDGKMYSGMFRNGLEDGYGEYRIPNKAMNKEDHYVGHWKEGKMCGQGVYSYASGEVFEGCFQDNMRHGHGLLRSGKLTSSSPSMFIGQWVMDKKAGYGVFDDITRGEKYMGMWQDDVCQGNGVVVTQFGLYYEGNFHLNKMMGNGVLLSEDDTIYEGEFSDDWTLSGKGTLTMPNGDYIEGYFSGEWGSGIKITGTYFKPSLYESDKDRPKVLKLGNLAVPADEKWKAVFDECWRQLGCEGPGQGEVWKAWDNIAVALTTSRRQHRDSPEILSRSQTQTLESLEFIPQHVGAFSVEKYDDIRKYLIKACDTPLHPLGRLVETLVAVYRMTYVGVGANRRLLQEAVKEIKSYLKRIFQLVRFLFPELPEEGSTIPLSAPLPTERKSFCTGKSDSRSESPEPGYVVTSSGLLLPVLLPRLYPPLFMLYALDNDREEDIYWECVLRLNKQPDIALLGFLGVQRKFWPATLSILGESKKVLPTTKDACFASAVECLQQISTTFTPSDKLKVIQQTFEEISQSVLASLHEDFLWSMDDLFPVFLYVVLRARIRNLGSEVHLIEDLMDPYLQHGEQGIMFTTLKACYYQIQREKLN

SEQ ID NO: 66962 - protein, 225 aa, Homo sapiens; identical to SEQ ID NO: 43850
  MOD_RES (1)..(1): Any amino acid

SEQ ID NO: 66963 - protein, 141 aa, Homo sapiens
  MOD_RES (1)..(1): Any amino acid
XAVLVLPPSPGPRSSRPSMDSEGGSLLLDEDSEVFKMLQENREGRAAPRQSSSFRLLQEALEAEERGGTPAFLPSSLSPQSSLPASRALATPPKLHTCEKCSTSIAWGWRGPGTGLHSAWSHQHLQTDPRRCPRVLILGER

SEQ ID NO: 66964 - protein, 164 aa, Homo sapiens
MGGRVFLAFCVWLTLPGAETQDSRGCARWCPQNSSCVNATACRCNPGFSSFSEIITTPTETCDDINECATPSKVSCGKFSDCWNTEGSYDCVCSPGYEPVSGAKTFKNESENTCQDVNECTSGQNPCHSSTHCLNNVGSYQCRCRPGWQPIPGSPNGPNNTVCE

SEQ ID NO: 66965 - protein, 160 aa, Homo sapiens
MIILESGIGVPGERTRGWTARGVVAQGLSYPAILVFEIRVRGKGPDSAGDWDYSGDSHVNWMPRNNGDQERRGGRMAVEIDDGLKDGAQVGQGFRAGGACAGTGQHPQSIQQHIRLHLLHTTAIVRLPADTLGLCPDAAELPGVSRWFCLPGLDPVLRAL

SEQ ID NO: 66966 - protein, 787 aa, Homo sapiens
MKKEGTTLGLTVSGGIDKDGKPRVSNLRQGGIAARSDQLDVGDYIKAVNGINLAKFRHDEIISLLKNVGERVVLEVEYELPPVSVQGSSVIFRTVEVTLHKEGNTFGFVIRGGAHDDRNKSRPVVITCVRPGGPADREGTIKPGDRLLSVDGIRLLGTTHAEAMSILKQCGQEAALLIEYDVSVMDSVATASGPLLVEVAKTPGASLGVALTTSMCCNKQVIVIDKIKSASIADRCGALHVGDHILSIDGTSMEYCTLAEATQFLANTTDQVKLEILPHHQTRLALKGPDHVSLASSTVGLAGQVVHTETTEVVLTADPVTGFGIQLQGSVFATETLSSPPLISYIEADSPAERCGVLQIGDRVMAINGIPTEDSTFEEASQLLRDSSITSKVTLEIEFDVAESVIPSSGTFHVKLPKKHNVELGITISSPSSRKPGDPLVISDIKKGSVAHRTGTLELGDKLLAIDNIRLDNCSMEDAVQILQQCEDLVKLKIRKDEDNSDEQESSGAIIYTVELKRYGGPLGITISGTEEPFDPIIISSLTKGGLAERTGAIHIGDRILAINSSSLKGKPLSEAIHLLQMAGETVTLKIKKQTDAQSASSPKKFPISSHLSDLGDVEEDSSPAQKPGKLSDMYPSTVPSVDSAVDSWDGSAIDTSYGTQGTSFQASGYNFNTYDWRSPKQRGSLSPVTKPRSQTYPDVGLSYEDWDRSTASGFAGAADSAETEQEENFWSQALEDLETCGQSGILRELEATIMSGSTMSLNHEAPTPRSQLGRQASFQERSSSRP

SEQ ID NO: 66967 - protein, 370 aa, Homo sapiens [sequence omitted]

SEQ ID NO: 66968 - protein, 86 aa, Homo sapiens
MIILGLVFIFQFVISCSCLAINRSKQTDVINASWWVMSNKTRDELERSFDCCGLFNLTTLYQQDYDFCTAICKSQSPTCQMCGEKF

SEQ ID NO: 66969 - protein, 486 aa, Homo sapiens
MEENLANRSHAELETALRDSSRVLQAMLATQLRSFDDHFQHLLNDSERTLQATFPGAFGELYTQNARAFRDLYSELRLYYRGANLHLEETLAEFWARLLERLFKQLHPQLLLPDDYLDCLGKQAEALRPFGEAPRELRLRATRAFVAARSFVQGLGVASDVVRKVAQVPLGPECSRAVMKLVYCAHCLGVPGARPCPDYCRNVLKGCLANQADLDAEWRNLLDSMVLITDKFWGTSGVESVIGSVHTWLAEAINALQDNRDTLTAKVIQGCGNPKVNPQGPGPEEKRRRGKLAPRERPPSGTLEKLVSEAKAQLRDVQDFWISLPGTLCSEKMALSTASDDRCWNGMARGRYLPEVMGDGLANQINNPEVEVDITKPDMTIRQQIMQLKIMTNRLRSAYNGNDVDFQDASDDGSGSGSGDGCLDDLCSRKVSRKSSSSRTPLTHALPGLSEQEGQKTSAASCPQPPTFLLPLLLFLALTVARPRWR

SEQ ID NO: 66970 - protein, 56 aa, Homo sapiens
MEVDTEEKRHRTRSKGVRVPVEPAIQELFSCPTPGCDGSGHVSGKYARHRRRLFWS

SEQ ID NO: 66971 - protein, 170 aa, Homo sapiens
MPGEEEERAFLVAREELASALRRDSGQAFSLEQLRPLLASSLPLAARYLQLDAARLVRCNAHGEPRNYLNTLSTALNILEKYGRNLLSPQRPRYWRGVKFNNPVFRSTVDAVQGGRDVLRLYGYTEEQPDGLSFPEGQEEPDEHQVATVTLEVLLLRTELSLLLQNTHPR

SEQ ID NO: 66972 - protein, 642 aa, Homo sapiens
MFSPPVSSGKNGPTSLASGHFTGSNVEDRSSSGSWGNGGHPSPSRNYGDGTPYDHMTSRDLGSHDNLSPPFVNSRIQSKTERGSYSSYGRESNLQGCHQSLLGGDMDMGNPGTLSPTKPGSQYYQYSSNNPRRRPLHSSAMEVQTKKVRKVPPGLPSSVYAPSASTADYNRDSPGYPSSKPATSTFPSSFFMQDGHHSSDPWSSSSGMNQPGYAGMLGNSSHIPQSSSYCSLHPHERLSYPSHSSADINSSLPPMSTFHRSGTNHYSTSSCTPPANGTDSIMANRGSGAAGSSQTGDALGKALASIYSPDHTNNSFSSNPSTPVGSPPSLSAGTAVWSRNGGQASSSPNYEGPLHSLQSRIEDRLERLDDAIHVLRNHAVGPSTAMPGGHGDMHGIIGPSHNGAMGGLGSGYGTGLLSANRHSLMVGTHREDGVALRGSHSLLPNQVPVPQLPVQSATSPDLNPPQDPYRGMPPGLQGQSVSSGSSEIKSDDEGDENLQDTKSSEDKKLDDDKKDIKSITSNNDDEDLTPEQKAEREKERRMANNARERLRVRDINEAFKELGRMVQLHLKSDKPQTKLLILHQAVAVILSLEQQVRERNLNPKAACLKRREEEKVSSEPPPLSLAGPHPGMGDASNHMGQM

SEQ ID NO: 66973 - protein, 180 aa, Homo sapiens
MLSRPKPGESEVDLLHFQSQFLAAGAAPAVQLVKKGNRGGGDANSDRPPLQDHRDVVMLDNLPDLPPALVPSPPKRARPSPGHCLPEDEDPEERLRRHDQHITAVLTKIIERDTSSVAVNLPVPSGVAFPAVFLRSRDTQGKSATSGKRSIFAQEIAARRIAEAKGPSVGEVVPNVGPPE

SEQ ID NO: 66974 - protein, 15 aa, Homo sapiens
MDPQPPPPAQGSPPH

SEQ ID NO: 66975 - protein, 577 aa, Homo sapiens
MDPGAGSETSLTVNEQVIVMSGHETIRVLEVGVDAQLPAEEESKGLEGVAAEGSQSGDPAEASQAAGEAGPDNLGSSAEATVTPGDPSEPCHCHCHLQPSPKPASGIADPDATGCTSCPPGQVAGQQGLAVWTIPTATVAALPGLTAASPTGGVFKPPLAGLQAAAVLNTALPAPVQAAAPVQASSTAQPRPPAQPQTLFQTQPLLQTTPAILPQPTAATAAAPTPKPVDTPPQITVQPAGFAFSPGIISAASLGGQTQILGSLTTAPVITSAIPSMPGISSQILTNAQGQVIGTLPWVVNSASVAAPAPAQSLQVQAVTPQLLLNAQGQVIATLASSPLPPPVAVRKPSTPESPAKSEVQPIQPTPTVPQPAVVIASPAPAAKPSASAPIPITCSETPTVSQLVSKPHTPSLDEDGINLEEIREFAKNFKIRRLSLGLTQTQVGQALTATEGPAYSQSAICRFEKLDITPKSAQKLKPVLEKWLNEAELRNQEGQQNLMEFVGGEPSKKRKRRTSFTPQAIEALNAYFEKNPLPTGQEITEIAKELNYDREVVRVWFCNRRQTLKNTSKLNVFQIP

SEQ ID NO: 66976 - protein, 24 aa, Homo sapiens
  MOD_RES (1)..(1): Any amino acid
XLSISSGFSGSHLESQYFERQRRT

SEQ ID NO: 66977 - protein, 128 aa, Homo sapiens
EPVPSVRGSPSSETPSPGSDSSSVSSSSSTTSCRGCEISPALFEAPRGYSMMGGQREAATRDDDDDLLQFAIQQSLLEAGSEYDQVTIWEALTNSKPGTHPMSYEGRRQDRSVPAGPERILRRGSCLP

SEQ ID NO: 66978 - protein, 77 aa, Homo sapiens
  MOD_RES (1)..(1): Any amino acid
XCEVKTDFCQTVLPYLIHDILLQDTNESWRNLLSTHVQGFFTSCLRHFSQTSRSTTPANLDSDLLQEQFLMMLSGWI

SEQ ID NO: 66979 - protein, 82 aa, Homo sapiens
MRITAAILTARSRWRLRNSISAFLFTVTFAWCPPGLSNLTILSCPGLGISKQEEGLGEESDEQGEGSQGWSEIQEMRSCCVA

SEQ ID NO: 66980 - protein, 366 aa, Homo sapiens
MLTFMASDSEEEVCDERTSLMSAESPTPRSCQEGRQGPEDGENTAQWRSQENEEDGEEDPDRYVCSGVPGRPPGLEEELTLKYGAKHVIMLFVPVTLCMIVVVATIKSVRFYTEKNGQLIYTPFTEDTPSVGQRLLNSVLNTLIMISVIVVMTIFLVVLYKYRCYKFIHGWLIMSSLMLLFLFTYIYLGEVLKTYNVAMDYPTLLLTVWNFGAVGMVCIHWKGPLVLQQAYLIMISALMALVFIKYLPEWSAWVILGAISVYAAMVWTVGMAKLDPSSQGALQLPYDPEMEDSYDSFGEPSYPEVFEPPLTGYPGEELEEEEERGVKLGLGDFIFYSVLVGKAAATGSGDWNTTLACFVAILIICL

SEQ ID NO: 66981 - protein, 198 aa, Homo sapiens
MCPCRDRTLVNAAFSEIQDGAFSHLPLLQFLLLNSNKFTLIGDNAFTGLSHLQYLFIENNDIWALSKFTFRGLKSLTHLSLANNNLQTLPRDIFRPLDILNDLDLRGNSLNCDCKVKWLVEWLAHTNTTVAPIYCASPPRFQEHKVQDLPLREFDCITTDFVLYQTLAFPAVSAEPFLYSSDLYLALAQPGVSACTIL

SEQ ID NO: 66982 - protein, 170 aa, Homo sapiens
MKKDLKEGPSLCGLCLEELKGDFLVERLRENIPAVRRKPKAKAPLPPAETKYTDVSSAADSVESTAFIMEQKENMIDKDVELSVVLPGDIIKSTTVHGSKPMMDLLIFLCAQYHLNPSSYTIDLLSAEQNHIKFKPNTPIGMLEVEKVILKPKMLDKKKPTPIIPEKTVR

SEQ ID NO: 66983 - protein, 251 aa, Homo sapiens
MSIAAALELTGRSQFLQTHGRITWHDGSGSLHDIQLSLPSSPEPEDGDKVYKNEDLLNEIKQLKDEIKKKDEKIQLLELQLATQHICHQKCKEEKCTYADKYTQTPWRRIPPQVLQPSSSLPRPTDHTQGKLIKPQRIEARSECSIQDMHQGGAHPEESFTHVLHQESNYGLEEQPFSSGPQLTMDVAKSTPSEANLNITVNAQEPYHLANNQISDMQFIPTSLQTPPESSTVDQAKRVGRNQSPPVGYMS

SEQ ID NO: 66984 - protein, 319 aa, Homo sapiens
MAAVGSGGYARNDAGEKLPSVMAGVPARRGQSSPPPAPPICLRRRTRLSTASEETVQNRVSLEKVLGITAQNSSGLTCDPGTGHVAYLAGCVVVILDPKENKQQHIFNTARKSLSALAFSPDGKYIVTGENGHRPAVRIWDVEEKNQVAEMLGHKYGVACVAFSPNMKHIVSMGYQHDMVLNVWDWKKDIVVASNKVSCRVIALSFSEDSSYFVTVGNRHVRFWFLEVSTETKVTSTVPLVGRSGILGELHNNIFCGVACGRGRMAGSTFCVSYSGLLCQFNEKRVLEKWINLKEGGSSLPRYSGTDLRPHPPVAVLRV

SEQ ID NO: 66985 - protein, 160 aa, Homo sapiens
KQAEYEKQLEQLNKDNTASLKKKELTLKDVECKFSKMKTAYEDVTTELEEYKEAFAVALKANSSMSEKITKSDKKIAVISTKLFMEKERMEYFLSTLPMRPDPELPCVENLNSIELNRKYIPKMAIRIPTSNPQTSNNCKNSLTEVSYMTISLLGFISLI

SEQ ID NO: 66986 - protein, 71 aa, Homo sapiens
MKWKEKLGDGVYDTFMMIDETKCPPCSNVLCNPSEPPPPRRLNAGVQWCHVSSLQPPPPGSKQFSCLSLPE

SEQ ID NO: 66987 - protein, 555 aa, Homo sapiens
MFYTHVLMSKRGPLAKIWLAAHWEKKLTKAHVFECNLEITIEKILSPKVKIALRTSGHLLLGVVRIYNRKAKYLLADCSEAFLKMKMTFCPGLVDLPKENFEASYNAITLPEEFHDFDTQNMNAIDVSEHFTQNQSRPEEITLRENFDNDLIFQAESFGEESEILRRHSFFDDNILLNSSGPLIEHSSGSLTGERSLFYDSGDGFGDEGAAGEMIDNLLQDDQNILLEDMHLNREISLPSEPPNSLAVEPDNSECICVPENEKMNETILLSTEEEGFTLDPIDISDIAEKRKGKKRRLLIDPIKELSSKVIHKQLTSFADTLMVLELAPPTQRLMMWKKRGGVHTLLSTAAQDLIHAELKMLFTKCFLSSGFKLGRKMIQKESVREEVGNQNIVETSMMQEPNYQQELSKPQTWKDVIGGSQHSSHEDTNKNINSEDIVEMVSLAAEESSLMNDLFAQEIEYSPVELESLSNEENIETERWNGRILQMLNRLRESNKMGMQSFSLMKLCRNSDRKQAAAKFYSFLVLKKQLAIELSQSAPYADIIATMGPMFYNI

SEQ ID NO: 66988 - protein, 257 aa, Homo sapiens
MQRAVSVVARLGFRLQAFPPALCRPLSCAQEVLRRTPLYDFHLAHGGKMVAFAGWSLPVQYRDSHTDSHLHTRQHCSLFDVSHMLQISVPVAGAVHLATAILKNPEVKLAGLAARDSLRLEAGLCLYGNDIDEHTTPVEGSLSWTLGKRRRAAMDFPGAKVIVPQLKGRVQRRRVGLMCEGAPMRAHSPILNMEGTKIGTVTSGCPSPSLKKNVAMGYVPCEYSRPGTMLLVEVRRKQQMAVVSKMPFVPTNYYTLK

SEQ ID NO: 66989 - protein, 577 aa, Homo sapiens
MDLYSTPAAALDRFVARRLQPRKEFVEKARRALGALAAALRERGGRLGAAAPRVLKTVKGGSSGRGTALKGGCDSELVIFLDCFKSYVDQRARRAEILSEMRASLESWWQNPVPGLRLTFPEQSVPGALQFRLTSVDLEDWMDVSLVPAFNVLGQAGSGVKPKPQVYSTLLNSGCQGGEHAACFTELRRNFVNIRPAKLKNLILLVKHWYHQVCLQGLWKETLPPVYALELLTIFAWEQGCKKDAFSLAEGLRTVLGLIQQHQHLCVFWTVNYGFEDPAVGQFLQRQLKRPRPVILDPADPTWDLGNGAAWHWDLLAQEAASCYDHPCFLRGMGDPVQSWKGPGLPRAGCSGLGHPIQLDPNQKTPENSKSLNAVYPRAGSKPPSCPAPGPTGAASIVPSVPGMALDLSQIPTKELDRFIQDHLKPSPQFQEQVKKAIDIILRCLHENCVHKASRVSKGGSFGRGTDLRDGCDVELIIFLNCFTDYKDQGPRRAEILDEMRAQLESWWQDQVPSLSLQFPEQNVPEALQFQLVSTALKSWTDVSLLPAFDAVAQFWHQTKSPGLLEAPHQWLPGGRA

SEQ ID NO: 66990 - protein, 322 aa, Homo sapiens
MPSKESWSGRKTNRAAVHKSKQEGRQQDLLIAALGMKLGSPKSSVTIWQPLKLFAYSQLTSLVRRATLKENEQIPKYEKIHNFKVHTFRGPHWCEYCANFMWGLIAQGVKCADCGLNVHKQCSKMVPNDCKPDLKHVKKVYSCDLTTLVKAHTTKRPMVVDMCIREIESRGLNSEGLYRVSGFSDLIEDVKMAFDRDGEKADISVNMYEDINIITGALKLYFRDLPIPLITYDAYPKFIESANPSRPSSNAICSSLDLSAADHLSPLIPITSTWTSLLPPSFMLEEIMDPDEQLETLHEALKLLPPAHCETLRYLMAHLKRV

SEQ ID NO: 66991 - protein, 39 aa, Homo sapiens
MFPLVKSALNRLQAFSKQWQGRATRNVHLIFMTNTVMLY

SEQ ID NO: 66992 - protein, 112 aa, Homo sapiens
MSGPLEGADGGGDPRPGESFCPGGVPSPGPPQHRPCPGPSLADDTDANSNGSSGNESNGHESRGASQRSSHSSSSGNGKDSALLETTESSKSTNSQSPSPPSSSIAYSLLSA

SEQ ID NO: 66993 - protein, 285 aa, Homo sapiens
MPGARSGGSGGDGSNSGSYSGDASGAVTVWEVVSLLGKLLGTVVALKVVLYLLRVCLAMAWKSGGASHSELIHNLRKNGIIKTDKVFEVMLATDRSHYAKCNPYMDSPQSIGFQATISAPHMHAYALELLFDQLHEGAKALDVGSGSGILTACFARMVGCTGKVIGIDHIKELVDDSVNNVRKDDPTLLSSGRVQLVVGDGRMGYAEEAPYDAIHVGAAAPVVPQALIDQLKPGGRLILPVGPAGGNQMLEQYDKLQDGSIKMKPLMGVIYVPLTDKEKQWSRWK

SEQ ID NO: 66994 - protein, 81 aa, Homo sapiens
  MOD_RES (1)..(1): Any amino acid
XANLQLFWNMYNRPAPTQRAARGWARSTTPWRCPVEALDPADDAHVEAPPPSLRRLMFPLVYFCEGKGEEMGFCLKKMRGS

SEQ ID NO: 66995 - protein, 131 aa, Homo sapiens
  MOD_RES (1)..(1): Any amino acid
XFLWGLRARHETSKMRVLRFIAQNQNRDPREWKAHFLEAVDDAFKTMDVDMAEEHARAQMRAQMNIGDEALIGRWSWDDIQVELLTWDEDGDFGDAWARIPFAFWARYHQYILNSNRANRRATFFSWIQHR

SEQ ID NO: 66996 - protein, 478 aa, Homo sapiens
MADESETAVKPPAPPLPQMMEGNGNGHEHCSDCENEEDNSYNRGGLSPANDTGAKKKKKKQKKKKEKGSETDSAQDQPVKMNSLPAERIQEIQKAIELFSVGQGPAKTMEEASKRSYQFWDTQPVPKLGEVVNTHGPVEPDKDNIRQEPYTLPQGFTWDALDLGDRGVLKELYTLLNENYVEDDDNMFRFDYSPEFLLWALRPPGWLPQWHCGVRVVSSRKLVGFISAIPANIHIYDTEKKMVEINFLCVHKKLRSKRVAPVLIREITRRVHLEGIFQAVYTAGVVLPKPVGTCRYWHRSLNPRKLIEVKFSHLSRNMTMQRTMKLYRLPETPKTAGLRPMETKDIPVVHQLLTRYLKQFHLTPVMSQEEVEHWFYPQENIIDTFVVENANGEVTDFLSFYTLPSTIMNHPTHKSLKAAYSFYNVHTQTPLLDLMSDALVLAKMEAPPRSLNSQAFPGRTGLLLTAFPAWERGDCCLS

SEQ ID NO: 66997 - protein, 81 aa, Homo sapiens
MSTVHEILCKLSLEGDHSTPPSAYGSVKAYTNFDAERDALNIETAIKTKGVDEVTIVNILTNRSNAQRQDIAFAYQRRTKK

SEQ ID NO: 66998 - protein, 289 aa, Homo sapiens
MADGPRCKRRKQANPRRNNVTNYNTVVETNSDSDDEDKLHIVEEESVTDAADCEGVPEDDLPTDQTVLPGRSSEREGNAKNCWEDDTGKEGQEILGPEAQADEAGCTVKDDECESDAENEQNHDPNVEEFLQQQDTAVIFPEAPEEDQRQGTPEASGHDENGTPDAFSQLLTCPYCDRGYKRFTSLKEHIKYRHEKNEDNFSCSLCSYTFAYRTQLERHMTSHKSGRDQRHVTQSGCNRKFKCTECGKAFKYKHHLKEHLRIHSGEKPYECPNCKKRFSHSGSYSSHIS

SEQ ID NO: 66999 - protein, 39 aa, Homo sapiens
  MOD_RES (1)..(1): Any amino acid
XQQQSDTSSLLRQTHLGNGYDPQSHQITRAPMLLGPCAS

SEQ ID NO: 67000 - protein, 157 aa, Homo sapiens
MIPPGECTYAGRKRRRPLQKQRPAVGAEKSNPSKRHRDRLNAELDHLASLLPFPPDIISKLDKLSVLRLSVSYLRVKSFFQVVQEQSSRQPAAGAPSPGDSCPLAGSAVLEGRLLLESLNGFALVVSAEGTIFYASATIVDYLGFHQTDVMHQNIYD

SEQ ID NO: 67001 - protein, 75 aa, Homo sapiens
MVILKCLKMDMSHRQVDIKGPLAMAEMDPTQGRVVFEDVAIYFSQEEWGHLDEAQRLLYRDVMLENLALLSSLGS

SEQ ID NO: 67002 - protein, 212 aa, Homo sapiens
TSVNYLDSAFRNIRNLGIVSVTSTDISSLYAKAQHVARRHYGCNIVRTEYYKELAARIVVAAVARAAARCNKGIEVLFAVALEHFVLVVVRVLRGPTSADETAKKIQYLIHCQWCEERIFQKDGNMVEENPYRQLPCNCHGSMPGKTAIELGPLWSSSLFNTGFLKRMLFESLHHGLDDIQTLIKTLIFESECTPQSQFSIHASSNVNKQGD

SEQ ID NO: 67003 - protein, 95 aa, Homo sapiens
  MOD_RES (1)..(1): Any amino acid
XPRLGGFVMNILSRLIMKQVWKYPKVWEGFIKCCQRTKPQSFQVILQLPPQQLGAVFDKCPELREPLLAHVRSFTPHQSCPQRPLPALHPASSHP

SEQ ID NO: 67004 - protein, 122 aa, Homo sapiens
MDQMGKMRPQPYGGTNPYSQQQGPPSGPQQGHGYPGQPYGSQTPQRYPMTMQGRAQSAMGGLSYTQQIPPYGQQGPSGYGQQGQTPYYNQQSPHPQQQQPPYSQQPPSQTPHAQPSYQQQPQ

SEQ ID NO: 67005 - protein, 39 aa, Homo sapiens
  MOD_RES (1)..(1): Any amino acid
XEEEDEVIDDQEEDEEETDDSDTWEPPRHVKRKLSKSDD

SEQ ID NO: 67006 - protein, 956 aa, Homo sapiens
MEDCNVHSAASILASVKEQEARFERLTRALEQERRHVALQLERAQQPGMVSGGMGSGQPLPMAWQQLVLQEQSPGSQASLATMPEAPDVLEETVTVEEDPGTPTSHVSIVTSEDGTTRRTETKVTKTVKTVTTRTVRQVPVGPDGLPLLDGGPPLGPFADGALDRHFLLRGGGPVATLSRAYLSSGGGFPEGPEPRDSPSYGSLSRGLGMRPPRAGPLGPGPGDGCFTLPGHREAFPVGPEPGPPGGRSLPERFQAEPYGLEDDTRSLAADDEGGPELEPDYGTATRRRPECGRGLHTRAYEDTADDGGELADERPAFPMVTAPLAQPERGSMGSLDRLVRRSPSVDSARKEPRWRDPELPEVLAMLRHPVDPVKANAAAYLQHLCFENEGVKRRVRQLRGLPLLVALLDHPRAEVRRRACGALRNLSYGRDTDNKAAIRDCGGVPALVRLLRAARDNEVRELVTGTLWNLSSYEPLKMVIIDHGLQTLTHEVIVPHSGWEREPNEDSKPRDAEWTTVFKNTSGCLRNVSSDGAEARRRLRECEGLVDALLHALQSAVGRKDTDNKSVENCVCIMRNLSYHVHKEVPGADRYQEAEPGPLGSAVGSQRRRRDDASCFGGKKAKGKKDGEMDRNFDTLDLPKRTEAAKGFELLYQPEVVRLYLSLLTESRNFNTLEAAAGALQNLSAGNWMWATYIRATVRKERGLPVLVELLQSETDKVVRAVAIALRNLSLDRRNKDLIGSYAMAELVRNVRNAQAPPRPGACLEEDTVVAVLNTIHEIVSDSLDNARSLLQARGVPALVALVASSQSVREAKAASHVLQTVWSYKELRGTLQKDGWTKARFQSAAATAKGPKGALSPGGFDDSTLPLVDKSLEGEKTGSRDVIPMDALGPDGYSTVDRRERRPRGASSAGEASEKEPLKLDPSRKAPPPGPSRPAVRLVDAVGDAKPQPVDSWV

SEQ ID NO: 67007 - protein, 271 aa, Homo sapiens
MSASQDSRSRDNGPDGMEPEGVIESNWNEIVDSFDDMNLSESLLRGIYAYGFEKPSAIQQRAILPCIKGYDVIAQAQSGTGKTATFAISILQQIELDLKATQALVLAPTRELAQQIQKVVMALGDYMGASCHACIGGTNVRAEVQKLQMEAPHIIVGTPGRVFDMLNRRYLSPKYIKMFVLDEADEMLSRGFKDQIYDIFQKLNSNTQEELTLEGIRQFYINVEREEWKLDTLCDLYETLTITQAVIFINTRRKVDWLTEKMHARDFTVSA

SEQ ID NO: 67008 - protein, 306 aa, Homo sapiens
MSFLTNDASSESIASFSKQEVMSSFLPEGGCYELLTVIGKGFEDLMTVNLARYKPTGEYVTVRRINLEACSNEMVTFLQGELHVSKLFNHPNIVPYRATFIADNELWVVTSFMAYGSAKDLICTHFMDGMNELAIAYILQGVLKALDYIHHMGYVHRSVKASHILISVDGKVYLSGLRSNLSMISHGQRQRVVHDFPKYSVKVLPWLSPEVLQQNLQGYDAKSDIYSVGITACELANGHVPFKDMPATQMLLEKLNGTVPCLLDTSTIPAEELTMSPSRSVANSGLSDSLTTSTPRPSNGPVPAPS

SEQ ID NO: 67009 - protein, 191 aa, Homo sapiens
MDTKEEKKERKQSYFARLKKKKQAKQNAETASAVATRTHTGKEDNNTVVLEPDKCNIAVEEEYMTDEKKKRKSNQLKEIRRTELKRYYSIDDNQNKTHDKKEKKMVVQKPHGTMEYTAGNQDTLNSIALKFNITPNKLVELNKLFTHTIVPGQVLFVPDANSPSSTLRLSSSSPGATVSPSSSDAEYDKLP

SEQ ID NO: 67010 - protein, 130 aa, Homo sapiens
MGKLRPGRVEWLASGHTERPHLFQNLLLFLWALLNCGLGVSAQGPGEWTPWVSWTRCSSSCGRGVSVRSRRCLRLPGEEPCWGDSHEYRLCQLPDCPPGAVPFRDLQCALYNGRPVLGTQKTYQWVPFHG

SEQ ID NO: 67011 - protein, 4410 aa, Homo sapiens
MRLAEERAALAAENADGEPGADRRLRLLGTYVAMSLRPAAGAWERCAGSAEAEQLLQAFLGRDAAEGPRPLLVVRPGPRGLAIRPGLEVGPESGLAGAKALFFLRTGPEPPGPDSFRGAVVCGDLPAAPLEHLAALFSEVVLPVLANEKNRLNWPHMICEDVRRHAHSLQCDLSVILEQVKGKTLLPLPAGSEKMEFADSKSETVLDSIDKSVIYAIESAVIKWSYQVQVVLKRESSQPLLQGENPTPKVELEFWKSRYEDLKYIYNQLRTITVRGMAKLLDKLQSSYFPAFKAMYRDVVAALAEAQDIHVHLIPLQRHLEALENAEFPEVKPQLRPLLHVVCLIWATCKSYRSPGRLTVLLQEICNLLIQQASNYLSPEDLLRSEVEESQRKLQVVSDTLSFFKQEFQDRRENLHTYFKENQEVKEWDFQSSLVFVRLDGFLGQLHVVEGLLKTALDFHKLGKVEFSGVRGNALSQQVQQMHEEFQEMYRLLSGSSSDCLYLQSTDFENDVSEFNQKVEDLDRRLGTIFIQAFDDAPGLEHAFKLLDIAGNLLERPLVARDTSDKYLVLIQMFNKDLDAVRMIYSQHVQEEAELGFSPVHKNMPTVAGGLRWAQELRQRIQGPFSNFGRITHPCMESAEGKRMQQKYEDMLSLLEKYETRLYEDWCRTVSEKSQYNLSQPLLKRDPETKEITINFNPQLISVLKEMSYLEPREMKHMPETAAAMFSSRDFYRQLVANLELMANWYNKVMKTLLEVEFPLVEEELQNIDLRLRAAEETLNWKTEGICDYVTEITSSIHDLEQRIQKTKDNVEEIQNIMKTWVTPIFKTKDGKRESLLSLDDRHDRMEKYYNLIKESGLKIHALVQENLGLFSADPTSNIWKTYVNSIDNLLLNGFFLAIECSLKYLLENTECKAGLTPIFEAQLSLAIPELVFYPSLESGVKGGFCDIVEGLITSIFRIPSLVPRLSPQNGSPHYQVDLDGIPDLANMRRTLMERVQRMMGLCCGYQSTFSQYSYLYVEDRKEVLGQFLLYGHILTPEEIEDHVEDGIPENPPLLSQFKVQIDSYETLYEEVCRLEPIKVFDGWMKIDIRPFKASLLNIIKRWSLLFKQHLVDHVTHSLANLDAFIKKSESGLLKKVEKGDFQGLVEIMGHLMAVKERQSNTDEMFEPLKQTIELLKTYEQELPETVFKQLEELPEKWNNIKKVAITVKQQVAPLQANEVTLLRQRCTAFDAEQQQFWEQFHKEAPFRFDSIHPHQMLDARHIEIQQMESTMASISESASLFEVNVPDYKQLRQCRKEVCQLKELWDTIGMVTSSIHAWETTPWRNINVEAMELECKQFARHIRNLDKEVRAWDAFTGLESTVWNTLSSLRAVAELQNPAIRERHWRQLMQATGVSFTMDQDTTLAHLLQLQLHHYEDEVRGIVDKAAKEMGMEKTLKELQTTWAGMEFQYEPHPRTNVPLLCSDEDLIEVLEDNQVQLQNLVMSKYVAFFLEEVSGWQKKLSTVDAVISIWFEVQRTWTHLESIFTGSEDIRAQLPQDSKRFEGIDIDFKELAYDAQKIPNVVQTTNKPGLYEKLEDIQGRLCLCEKALAEYLDTKRLAFPRFYFLSSSDLLDILSNGTAPQQVQRHLSKLFDNMAKMRFQLDASGEPTKTSLGMYSKEEEYVAFSEPCDCSGQVEIWLNHVLGHMKATVRHEMTEGVTAYEEKPREQWLFDHPAQVALTCTQIWWTTEVGMAFARLEEGYESAMKDYYKKQVAQLKTLITMLIGQLSKGDRQKIMTICTIDVHARDVVAKMIAQKVDNAQAFLWLSQLRHRWDDEVKHCFANICDAQFLYSYEYLGNTPRLVITPLTDRCYITLTQSLHLTMSGAPAGPAGTGKTETTKDLGRALGILVYVFNCSEQMDYKSCGNIYKGLAQTGAWGCFDEFNRISVEVLSVVAVQVKSIQDAIRDKKQWFSFLGEEISLNPSVGIFITMNPGYAGRTELPENLKSLFRPCAMVVPDFELICEIMLVAEGFIEAQSLARKFITLYQLCKELLSKQDHYDWGLRAIKSVLVVAGSLKRGDPDRPEDQVLMRSLRDFNIPKIVTDDMPIFMGLIGDLFPALDVPRRRDPNFEALVRKAIVDLKLQAEDNFVLKVVQLEELLAVRHSVFVVGGAGTGKSQVLRSLHKTYQIMKRRPVWTDLNPKAVTNDELFGIINPATGEWKDGLFSSIMRELANITHDGPKWILLDGDIDPMWIESLNTVMDDNKVLTLASNERIPLNPTMKLLFEISHLRTATPATVSRAGILYINPADLGWNPPVSSWIEKREIQTERANLTILFDKYLPTCLDTLRTRFKKIIPIPEQSMVQMVCHLLECLLTTEDIPADCPKEIYEHYFVFAAIWAFGGAMVQDQLVDYRAEFSKWWLTEFKTVKFPSQGTIFDYYIDPETKKFEPWSKLVPQFEFDPEMPLQACLVHTSETIRVCYFMERLMARQRPVMLVGTAGTGKSVLVGAKLASLDPEAYLVKNVPFNYYTTSAMLQAVLEKPLEKKAGRNYGPPGNKKLIYFIDDMNMPEVDAYGTVQPHTIIRQHLDYGHWYDRSKLSLKEITNVQYVSCMNPTAGSFTINPRLQRHFSVFVLSFPGADALSSIYSIILTQHLKLGNFPASLQKSIPPLIDLALAFHQKIATTFLPTGIKFHYIFNLRDFANIFQGILFSSVECVKSTWDLIRLYLHESNRVYRDKMVEEKDFDLFDKIQTEVLKKTFDDIEDPVEQTQSPNLYCHFANGIGEPKYMPVQSWELLTQTLVEALENHNEVNTVMDLVLFEDAMRHVCHINRILESPRGNALLVGVGGSGKQSLTRLAAFISSMDVFQITLRKGYQIQDFKMDLASLCLKAGVKNLNTVFLMTDAQVADERFLVLINDLLASGEIPDLYSDDEVENIISNVRNEVKSQGLVDNRENCWKFFIDRIRRQLKVTLCFSPVGNKLRVRSRKFPAIVNCTAIHWFHEWPQQALESVSLRFLQNTEGIEPTVKQSISKFMAFVHTSVNQTSQSYLSNEQRYNYTTPKSFLEFIRLYQSLLHRHRKELKCKTERLENGLLKLHSTSAQVDDLKAKLAAQEVELKQKNEDADKLIQVVGVETDKVSREKAMADEEEQKVAVIMLEVKQKQKDCEEDLAKAEPALTAAQAALNTLNKTNLTELKSFGSPPLAVSNVSAAVMVLMAPRGRVPKDRSWKAAKVTMAKVDGFLDSLINFNKENIHENCLKAIRPYLQDPEFNPEFVATKSYAAAGLCSWVINIVRFYEVFCDVEPKRQALNKATADLTAAQEKLAAIKAKIAHLNENLAKLTARFEKATADKLKCQQEAEVTAVTISLANRLVGGLASENVRWADAVQNFKQQERTLCGDILLITAFISYLGFFTKKYRQSLLDRTWRPYLSQLKTPIPVTPALDPLRMLMDDADVAAWQNEGLPADRMSVENATILINCERWPLMVDPQLQGIKWIKNKYGEDLRVTQIGQKGYLQIIEQALEAGAVVLIENLEESIDPVLGPLLGREVIKKGRFIKIGDKECEYNPKFRLILHTKLANPHYQPELQAQATLINFTVTRDGLEDQLLAAVVSMERPDLEQLKSDLTKQQNGFKITLKTLEDSLLSRLSSASGNFLGETVLVENLEITKQTAAEVEKKVQEAKVTEVKINEAREHYRPAAARASLLYFIMNDLSKIHPMYQFSLKAFSIVFQKAVERAAPDESLRERVANLIDSITFSVYQYTIRGLFECDKLTYLAQLTFQILLMNREVNAVELDFLLRSPVQTGTASPVEFLSHQAWGAVKVLSSMEEFSNLDRDIEGSAKSWKKFVESECPEKEKLPQEWKNKTALQRLCMLRAMRPDRMTYALRDFVEEKLGSKYVVGRALDFATSFEESGPATPMFFILSPGVDPLKDVESQGRKLGYTFNNQNFHNVSLGQGQEVVAEAALDLAAKKGHWVILQDTLEMCSRETEFKSILFALCYFHAVVAERRKFGPQGWNRSYPFNTGDLTISVNVLYNFLEANAKVPYDDLRYLFGEIMYGGHITDDWDRRLCRTYLGEFIRPEMLEGELSLAPGFPLPGNMDYNGYHQYIDAELPPESPYLYGLHPNAEIGFLTQTSEKLFRTVLELQPRDSQARDGAGATREEKVKALLEEILERVTDEFNIPELMAKVEERTPYIVVAFQECGRMNILTREIQRSLRELELGLKGELTMTSHMENLQNALYFDMVPESWARRAYPSTAGLAAWFPDLLNRIKELEAWTGDFTMPSTVWLTGFFNPQSFLTAIMQSTARKNEWPLDQMALQCDMTKKNREEFRSPPREGAYIHGLFMEGACWDTQAGIITEAKLKDLTPPMPVMFIKAIPADKQDCRSVYSCPVYKTSQRGPTYVWTFNLKTKENPSKWVLAGVALLLQI

SEQ ID NO: 67012 - protein, 332 aa, Homo sapiens
MDELAGGGGGGPGMAAPPRQQQGPGGNLGLSPGGNGAAGGGGPPASEGAGPAAGPELSRPQQYTIPGILHYIQHEWARFEMERAHWEVERAELQARIAFLQGERKGQENLKKDLVRRIKMLEYALKQERAKYHKLKYGTELNQGDLKMPTFESEETKDTEAPTAPQNSQLTWKQGRQLLRQYLQEVGYTDTILDVRSQRVRSLLGLSNSEPNGSVETKNLEQILNGGESPKQKGQEIKRSSGDVLETFNFLENADDSDEDEENDMIEGIPEGKDKHRMNKHKIGNEGLAADLTDDPDTEEALKEFDFLVTAEDGEGAGEARSSGDGTEWVAC

SEQ ID NO: 67013 - protein, 111 aa, Homo sapiens
  MOD_RES (1)..(1): Any amino acid
XLVVGKDGFIKAIGPADVIQRQFSGETFEEIIDCSGKCILPVGRSHLHGNSPGRRRDPLYRGAHAPSHRGGAVPLLAATAPVHDEGWHHAGGVQEWIWPRPGDRAQDAARD

SEQ ID NO: 67014 - protein, 40 aa, Homo sapiens
MFPVGRIHRHLKTRTTSHGRVGATAAVYSAAILEYLTAEV

SEQ ID NO: 67015 - protein, 974 aa, Homo sapiens
  MOD_RES (1)..(1): Any amino acid
XEFIERIQGLDFDTKAAVAAHIQEVTHNQENVFDLQWMEVTDMSQEDIEPLLKNMALHLKRLIDERDEHSETIIELSEERDGLHFLPHASSSAQSPCGSPGMKRTESRQHLSVELADAKAKIRRLRQELEEKTEQLLDCKQELEQMEIELKRLQQENMNLLSDARSARMYRDELDALREKAVRVDKLESEVSRYKERLHDIEFYKARVEELKEDNQVLLETKTMLEDQLEGTRARSDKLHELEKENLQLKAKLHDMEMERDMDRKKIEELMEENMTLEMAQKQSMDESLHLGWELEQISRTSELSEAPQKSLGHEVNELTSSRLLKLEMENQSLTKTVEELRTTVDSVEGNASKILKMEKENQRLSKKVEILENEIVQEKQSLQNCQNLSKDLMKEKAQLEKTIETLRENSERQIKILEQENEHLNQTVSSLRQRSQISAEARVKDIEKENKILHESIKETSSKLSKIEFEKRQIKKELEHYKEKGERAEELENELHHLEKENELLQKKITNLKITCEKIEALEQENSELERENRKLKKTLDSFKNLTFQLESLEKENSQLDEENLELRRNVESLKCASMKMAQLQLENKELESEKEQLKKGLELLKASFKKTERLEVSYQGLDIENQRLQKTLENSNKKIQQLESELQDLEMENQTLQKNLEELKISSKRLEQLEKENKSLEQETSQLEKDKKQLEKENKRLRQQAEIKDTTLEENNVKIGNLEKENKTLSKEIGIYKESCVRLKELEKENKELVKRATIDIKTLVTLREDLVSEKLKTQQMNNDLEKLTHELEKIGLNKERLLHDEQSTDDRYKLLESKLESTLKKSLEIKEEKIAALEARLEESTNYNQQLRQELKTVKKNYEALKQRQDEERMVQSSPPISGEDNKWERESQETTRELLKVKDRLIEVERNNATLQAEKQALKTQLKQLETQNNNLQAQILALQRQTVSLQEQNTTLQTQNAKLQAESYL

SEQ ID NO: 67016 - protein, 161 aa, Homo sapiens
ESETSREDEYKQKYSRTYDETYQRYRPVSTSSSTTPSSSLSTMSSSLYASSQLNRPNSLVGITSAYSRGITKENEREGEKREEEKEGEDKSQPKSIRERRRPREKRRSTGVSFWTQDSDENEQEQQSDTEEGSNKKETQTDSISSPVRPVINFCLLMILLN

SEQ ID NO: 67017 - protein, 714 aa, Homo sapiens
LSWTKAGSPAPPGVIPFQSGFIFTQRARLQAPTGTVIPAALGTELALVLSLCSHRVNHAFLFAVRSQKRKLQLGLQFLPGKTVVHLGSRRSVAFDLDMHDGRWHHLALELRGRTVTLVTACGQRRVPVLLPFHRDPALDPGGSFLFGKMNPHAVQFEGALCQFSIYPVTQVAHNYCTHLRKQCGQADTYQSPLGPLFSQDSGRPFTFQSDLALLGLENLTTATPALGSLPAGRGPRGTVAPATPTKPQRTSPTNPHQHMAVGGPAQTPLLPAKLSASNALDPMLPASVGGSTRTPRPAAAQPSQKITATKIPKSLPTKPSAPSTSIVPIKSPHPTQKTAPSSFTKSALPTQKQVPPTSRPVPARVSRPAEKPIQRNPGMPRPPPPSTRPLPPTTSSSKKPIPTLARTEAKITSHASKPASARTSTHKPPPFTALSSSPAPTPGSTRSTRPPATMVPPTSGTSTPRTAPAVPTPGSAPTGSKKPIGSEASKKAGPKSSPRKPVPLRPGKAARDVPLSDLTTRPSPRQPQPSQQTTPALVLAPAQFLSSSPRPTSSGYSIFHLAGSTPFPLLMGPPGPKGDCGLPGPPGLPGLPGIPGARGPRGPPGPYGNPGLPGPPGAKGDMGLPGLSGNPGPPGRKGLPGPVGDPGPKGSRGYIGLPGLFGLPGSDGERGLPGVPGKRGKMGMPVLLPQSSEARGGNSMPSEGALAGRHGSHL

SEQ ID NO: 67018 - protein, 660 aa, Homo sapiens
MISSIVISQMIDENKSRENRASLPLPCAIAQSRAHHAKQSLANRSGVNIHRAFALLPGRLGIPAPSDERGPEAELPPKEERPCGGPRRGFASITITARRVGPPARALVWGTAGDSLCPKCRAEDTLFQAPPALANGAHPGRHQRSFACTEFSRNSSVVRLKVPEAHTGLCERRKYWVTHADDKETSFSPDTPLSGKSPLVFSSCVHLRVSQQCPDSIYYVDKSLSVPIEPPQIASPKMHRSVLSLNLNCSSHRLTADGVDGLVNREPISEALKQELLEGDQDLVGQRWNPGLQESHLKETPSLRRVHLGTGACPWSGSFPLENTELANVGANQVTVRKGEKDHTTHCHASDHANQLSIHIPGWSYRAVHTKVFSGSSKRQQGEVCMTVSAPPVEQKPTRHFLPIGDSSPSDDCLSRDLSEPTERRHQSFLKPRILFPGFLCPLQDVCASLQEDNGVQIESKFPKGDYTCCDLVVKIKECKKSEDPTTPEPSPAAPSPAPRDGAGSPGLSEDCSESQQTPARSLTLQEALEVRKPQFISRSQERLKKLEHMVQQRKAQRKEDLRQKQSLLPIRTSKKQFTIPHPLSDNLFKPKERCISEKEMHMRSKRIYDNLPEVKKKKEEQRKRVILQSNRLRAEVFKKVMASSPAGVMCVVHRCRIST

SEQ ID NO: 67019 - protein, 247 aa, Homo sapiens
MLVPCFLYSLQNRKPSLYGSLTCQGIGLDGIPEVTASEGFTVNEINKKSIHISCPKENASSKFLAPYTTFSRIHTKSITCLDISSRGGLGVSSSTDGTMKIWQASNGELRRVLEGHVFDVNCCRFFPSGLVVLSGGMDAQLKIWSAEDASCVVTFKGHKGGILDTAIVDRGRNVVSASRDGTARLWDCGRSACLGVLADCGSSINGVAVGAADNSINLGSPEQMPSEREVGTEAKMLLLAREDKKLQ

SEQ ID NO: 67020 - protein, 68 aa, Homo sapiens
  MOD_RES (1)..(1): Any amino acid
XYQTVAHPGIQGNLNSYYSQQGVPASITFFSPSGLTYSLKHIQELSGDNIDQIKIEELELQWASWALR

SEQ ID NO: 67021 - protein, 146 aa, Homo sapiens
  MOD_RES (1)..(1): Any amino acid
XEMLTLEPLHTLLHMKWKKFAKHMFFLSFCFYFFYNITLTLVSYYRPREEEAIPHPLALTHKMGWLQLLGRMFVLIWAMCISVKEGIAIFLLRPSDLQSILSDAWFHFVFLGLADREVSQRQQGLQLLRQLQRRSAGTLQAHHRPG

SEQ ID NO: 67022 - protein, 158 aa, Homo sapiens
MWGFLKRPVVVTADINLSLVALTGMGLLSRLWRLTYPRAVVFDEVYYGQYISFYMKQIFFLDDSGPPFGHMVLALGGYLGGFDGNFLWNRIGAEYSSNVPVWSLRLLPALAGALSVPMAYQIVLELHFSHCAAMGAALLMLIENALITQSRLMLLESV

SEQ ID NO: 67023 - protein, 142 aa, Homo sapiens
  MOD_RES (1)..(1): Any amino acid
XDSHSGSSGRGPGPRRPSVASSVSEEYFEVREHSVPLRRRHSEQVANGPTPPPRRQLSAPHITRGTFVGPQGGSPWAQSRGREEADALKRMQAQRSTDKEAQDKVPEPWVPCSLGSVPGARPTWEQCAADHARHDDQAHGEH

SEQ ID NO: 67024 - protein, 146 aa, Homo sapiens
MFEILTSEFSYQHSLSILVEEFLQSKELRATVTQMEHHHLFSNILDVLGASQRFFEDLEQRHKAQVLVEDISDILEEHAEKHFHPYIAYCSNEVYQQRTLQKLISSNAAFREALREIERRPACGGLPMLSFLILPMQRVTRLPLLM

SEQ ID NO: 67025 - protein, 133 aa, Homo sapiens
MDCKLYSSGLVECEDQDPLNPDRSFDVESVKKEIQRGRKLKCKFCHKRGATVGCDLKNCNKNYHFFCAKKDDAVPQSDGVRGIYKLLCQQHAQFPIIAQSAKFSGVKRKRGRKKPLSGNHVQPPETMKCNTFI

SEQ ID NO: 67026 - protein, 75 aa, Homo sapiens
MEKWDGNEGTSAFHMPEWMQIQFADQKQEFNKRPTKIGRRSLSRSISQSSTDSYSSAASYTDSSDDETSPRDKQQ

SEQ ID NO: 67027 - protein, 261 aa, Homo sapiens
MEKTLETVPLERKKREKEQFRKLFIGGLSFETTEESLRNYYEQWGKLTDCVVMRDPASKRSRGFGFVTFSSMAEVDAAMAARPHSIDGRVVEPKRAVAREESGKPGAHVTVKKLFVGGIKEDTEEHHLRDYFEEYGKIDTIEIITDRQSGKKRGFGFVTFDDHDPVDKIVLQKYHTINGHNAEVRKALSRQEMQEDLEVAILEVAPVMEEEEEDMVVEDLDMATRVGATEVVMTTMEEEIMEVEITMILEIITSNLLTTVQ

SEQ ID NO: 67028 - protein, 28 aa, Homo sapiens
  MOD_RES (1)..(1): Any amino acid
XAELGSDIYLDGIITIVDSKYGLKVKYH

SEQ ID NO: 67029 - protein, 153 aa, Homo sapiens
  MOD_RES (1)..(1): Any amino acid
XSWELLYSLEFLDKEFTRICLAWKTDTWLWLRIFLTDMIIYQGQYKKAIASLHHLAALQGSISQPQITGQGTLEHQRALIQLATCHFALGEYRMTCEKVLDLMCYMVLPIQDGGKSQEEPSKVKPKFRKDIDMLEEFAYLRTQEGGKIHLELL

SEQ ID NO: 67030 - protein, 137 aa, Homo sapiens
MAAIRKKLVIVGDGACGKTCLLIVFSKDQFPEVYVPTVFENYVADIEVDGKQVELALWDTAGQEDYDRLRPLSYPDTDVILMCFSIDSPDSLENIPEKWTPEVKHFCPNVPIILVGNKKDLRNDEHTRRELAKMKQA

SEQ ID NO: 67031 - protein, 165 aa, Homo sapiens
MSRVPAFLSAAEVEEHLRSSSLLIPPLETALANFSSGPEGGVMQPVRTVVPVTKHRGYLGVMPAYSAAEDALTTKLVTFYEDRGITSVVPSHQATVLLFEPSNGTLLAVMDGNVITAKRTAAVSAIATKFLKPPSSEVLCILGAGVQAYSHYEIFTEQFSFKEVI

SEQ ID NO: 67032 - protein, 229 aa, Homo sapiens
  MOD_RES (1)..(1): Any amino acid
XTWNGRLLAATFTLIGVSFFALPAGILGSGFALKVQEQHRQKHFEKRRNPAAGLIQSAWRFYATNLSRTDLHSTWQYYERTVTVPMYRLIPPLNQLELLRNLKSKSGLAFRKDPPPEPSPSQKVSLKDRVFSSPRGVAAKGKGSPQAQTVRRSPSADQSLEDSPSKVPKSWSFGDRSRARQAFRIKGAASRQNSEASLPGEDIVDDKSCPCEFVTEDLTPGLKVSIRAV

SEQ ID NO: 67033 - protein, 437 aa, Homo sapiens
MIPTLTALLCLGPLPKPTLWAEPGSVISWGNSVTIWCQGTLEAREYRLDKEESPAPWDRQNPLEPKNKARFSIPSMTEDYAGRYRCYYRSPVGWSQPSDPLELVMTGAYSKPTLSALPSPLVTSGKSVTLLCQSRSPMDTFLLIKERAAHPLLHLRSEHGAQQHQAEFPMSPVTSVHGGTYRCFSSHGFSHYLLSHPSDPLELIVSGSLEGPRPSPTRSVSTAAGPEDQPLMPTGSVPHSGLRRHWEVLIGVLVVSILLLSLLLFLLLQHWRQGKHRTLAQRQADFQRPPGAAEPEPKDGGLQRRSSPAADVQGENFSGAAVKNTQPEDGVEMDTRQSPHDEDPQAVTYAKVKHSRPRREMASPPSPLSGEFLDTKDRQAEEDRQMDTEAAASEAPQDVTYARLHSFTLRQKATEPPPSQEGASPAEPSVYATLAIH

SEQ ID NO: 67034 - protein, 117 aa, Homo sapiens
MLRRGHLAFRDVAIEFPQEEWKCLDPAQRTLYREVMVENYRNLVFLGICLPDLSVISMLEQRRDPRNLQSEVKIANNPGGRECIKGVNAGKSLDGQSGGPIIFFFFKQGLALSPRLS

SEQ ID NO: 67035 - protein, 59 aa, Homo sapiens
MSRPKNQNYKGHGLSKGKERAESIDPVQDHPHEHTHGRPSPQARMGGSEGRRGVGFLLV

SEQ ID NO: 67036 - protein, 69 aa, Homo sapiens
MPPPLPLLLLTVLVVAAARPGCEFERNPAGECHRPPAADSGTVPGPPWLLFCRRAAAPTLSEHFRQLNP

SEQ ID NO: 67037 - protein, 1228 aa, Homo sapiens
MALAGLCALLACCWGPAAVLATAAGDVDPSKELECKLKSITVSALPFLRENDLSIMHSPSASEPKLLFSVRNDFPGEMVVVDDLENTELPYFVLEISGNTEDIPLVRWRQQWLENGTLLFHIHHQDGAPSLPGQDPTEEPQHESAEEELRILHISVMGGMIALLLSILCLVMILYTRRRWCKRRRVPQPQKSASAEAANEIHYIPSVLIGGHGRESLRNARVQGHNSSGTLSIRETPILDGYEYDITDLRHHLQRECMNGGEDFASQVTRTLDSLQGCNEKSGMDLTPGSDNAKLSLMNKYKDNIIATSPVDSNHQQATLLSHTSSSQRKRINNKARAGSAFLNPEGDSGTEAENDPQLTFYTDPSRSRRRSRVGSPRSPVNKTTLTLISITSCVIGLVCSSHVNCPLVVKITLHVPEHLIADGSRFILLEGSQLDASDWLNPAQVVLFSQQNSSGPWAMDLCARRLLDPCEHQCDPETGECLCYEGYMKDPVHKHLCIRNEWGTNQGPWPYTIFQRGFDLVLGEQPSDKIFRFTYTLGEGMWLPLSKSFVIPPAELAINPSAKCKTDMTVMEDAVEVREELMTSSSFDSLEVLLDSFGPVRDCSKDNGGCSKNFRCISDRKLDSTGCVCPSGLSPMKDSSGCYDRHIGVDCSDGFNGGCEQLCLQQMAPFPDDPTLYNILMFCGCIEDYKLGVDGRSCQLITETCPEGSDCGESRELPMNQTLFGEMFFGYNNHSKEVAAGQVLKGTFRQNNFARGLDQQLPDGLVVATVPLENQCLEEISEPTPDPDFLTGMVNFSEVSGYPVLQHWKVRSVMYHIKLNQVAISQALSNALHSLDGATSRADFVALLDQFGNHYIQEAIYGFEESCSIWYPNKQVQRRLWLEYEDISKGNSPSDESEERERDPKVLTFPEYITSLSDSGTKHMAAGVRMECHSKGRCPSSCPLCHVTSSPDTPAEPVLLEVTKAAPIYELVTNNQTQRLLQEATMSSLWCSGTGDVIEDWCRCDSTAFGADGLPTCAPLPQPVLRLSTVHEPSSTLVVLEWEHSEPPIGVQIVDYLLRQEKVTDRMDHSKVETETVLSFVDDIISGAKSPCAMPSQVPDKQLTTISLIIRCLEPDTIYMFTLWGVDNTGRRSRPSDVIVKTPCPVVDDVKAQEIADKIYNLFNGYTSGKEQQTAYNTLLDLGSPTLHRVLYHYNQHYESFGEFTWRCEDELGPRLPACWDSQRSCR

SEQ ID NO: 67038 - protein, 194 aa, Homo sapiens
MHSPGGLGRPCLLQPCPAVPSDLTAEERQELENIRRRKQELLADIQRLKDEIAEVANEIENLGSTEERKNMQRNKQVAMGRKKFNMDPKKGIQFLIENDLLKNTCEDIAQFLYKGEGLNKTAIGDYLGERDEFNIQVLHAFVELHEFTDLNLVQALRQFLWSFRLPGEAQKIDRMMEAFAQRYCQCNNGVFQST

SEQ ID NO: 67039 - protein, 153 aa, Homo sapiens
MEAPLQTGMVLGVMIGAGVAVVVTAVLILLVVRRLRVPKTPAPDGPRYRFRKRDKVLFYGRKIMRKVSQSTSSLVDTSVSATSRPRMRKKLKMLNIAKKILRIQKETPTLQRKEPPPAVLEADLTEGDLANSHLPSEVLYMLKNVRVLGHFEK

SEQ ID NO: 67040 - protein, 96 aa, Homo sapiens
MSGEENPASKPTPVQDVQGDGRWMSLHHRFVADSKDKEPEVVFIGDSLVQLMHQCEIWRELFSPLHALNFGIGGDGTQHVLWRLENGELEHIRPKI

SEQ ID NO: 67041 - protein, 183 aa, Homo sapiens
  MOD_RES (1)..(1): Any amino acid
XQDLWAEKFEPEYSQIKQEVENFKKVNMISREQFDTLTPEPPVDPNQEVPPGPPRFQQVPTDALANKLFGAPEPSTIARSLPTTVPESPNYRNTRTPRTPRTPQLKDSSQTSRFYPVVKEGRTLDAKMPRKRKTRHSSNPPLESHVGWVMDSREHRPRTASISKMAPVCVSCFPKQALRATYL

SEQ ID NO: 67042 - protein, 748 aa, Homo sapiens
MRTTKVYKLVIHKKGFGGSDDELVVNPKVFPHIKLGDIVEIAHPNDEYSPLLLQVKSLKEDLQKETISVDQTVTQVFRLRPYQDVYVNVVDPKDVTLDLVELTFKDQYIGRGDMWRLKKSLVSTCAYITQKVEFAGIRAQAGELWVKNEKVMCGYISEDTRVVFRSTSAMVYIFIQMSCEMWDFDIYGDLYFEKAVNGFLADLFTKWKEKNCSHEVTVVLFSRTFYDAKSVDEFPEINRASIRQDHKGRFYEDFYKVVVQNERREEWTSLLVTIKKLFIQYPVLVRLEQAEGFPQGDNSTSAQGNYLEAINLSFNVFDKHYINRNFDRTGQMSVVITPGVGVFEVDRLLMILTKQRMIDNGIGVDLVCMGEQPLHAVPLFKLHNRSAPRDSRLGDDYNIPHWINHSFYTSKSQLFCNSFTPRIKLAGKKPASEKAKNGRDTSLGSPKESENALPIQVDYDAYDAQVFRLPGPSRAQCLTTCRSVRERESHSRKSASSCDVSSSPSLPSRTLPTEEVRSQASDDSSLGKSANILMIPHPHLHQYEVSSSLGYTSTRDVLENMMEPPQRDSSAPGRFHVGSAESMLHVRPGGYTPQRALINPFAPSRMPMKLTSNRRRWMHTFPVGMNPRTQNKDSLEDSVSTSPDPILTLSAPPVVPGFCCTVGVDWKSLTTPACLPLTTDYFPDRQGLQNDYTEGCYDLLPEADIDRSVSEKKALGLVGEGFGYIPHMHQNTGFVLASATHILKLERY

SEQ ID NO: 67043 - protein, 449 aa, Homo sapiens
MIPTFTALLCLGLSLGPRTHMQAGPLPKPTLWAEPGSVISWGNSVTIWCQGTLEAREYRLDKEESPAPWDRQNPLEPKNKARFSIPSMTEDYAGRYRCYYRSPVGWSQPSDPLELVMTGAYSKPTLSALPSPLVTSGKSVTLLCQSRSPMDTFLLIKERAAHPLLHLRSEHGAQQHQAEFPMSPVTSVHGGTYRCFSSHGFSHYLLSHPSDPLELIVSGSLEGPRPSPTRSVSTAAGPEDQPLMPTGSVPHSGLRRHWEVLIGVLVVSILLLSLLLFLLLQHWRQGKHRTLAQRQADFQRPPGAAEPEPKDGGLQRRSSPAADVQGENFSGAAVKNTQPEDGVEMDTRQSPHDEDPQAVTYAKVKHSRPRREMASPPSPLSGEFLDTKDRQAEEDRQMDTEAAASEAPQDVTYARLHSFTLRQKATEPPPSQEGASPAEPSVYATLAIH

SEQ ID NO: 67044 - protein, 327 aa, Homo sapiens
MAAPVKGNRKQSTEGDALDPPASPKPAGKQNGIQNPISLEDSPEAGGEREEEQEREEEQAFLVSLYKFMKERHTPIERVPHLGFKQINLWKIYKAVEKLGAYELVTGRRLWKNVYDELGGSPGSTSAATCTRRHYERLVLPYVRHLKGEDDKPLPTSKPRKQYKMAKENRGDDGATERPKKAKEERRMDQMMPGKTKADAADPAPLPSQEPPRNSTEQQGLASGSSVSFVGASGCPEAYKRLLSSFYCKGTHGIMSPLAKKKLLAQCPPPQTLPGLICLARTTSHNLCSAPLLPPQHQAVGQPMVLCTLWSRQGPTTGRYCCQGALN

SEQ ID NO: 67045 - protein, 177 aa, Homo sapiens
MSSGEQHRSVENHRPRRAPCVEGTIGLPQKLLGEPLSSGILLSLWAGTVLRSSFDVYVLPPLVHLKTGFLKWKPDYDSAASEYGKAAVAFKNAKQFEQAKDACLREAVAHENNRALFHAAKAYEQAGMMLKEMQKLPEAVQLIEKASMMYLENGTPDTAAMALERAGKLIENVDPEK

SEQ ID NO: 67046 - protein, 113 aa, Homo sapiens
MAWIKRKFGERPPPKRLTREAMRNYLKERGDQTVLILHAKVAQKSYGNEKRFFCPPPCVYLMGSGWKKKKEQMERDGCSEQESQPCAFIGIGNSDQEMQQLNLEGKNYCTAKT

SEQ ID NO: 67047 - protein, 44 aa, Homo sapiens
MTARGTPSRFLASVLHNGLGRYVQQLQRLSFSVSRDGASSRGAS

SEQ ID NO: 67048 - protein, 231 aa, Homo sapiens
RFQIQLLILLCVLNFLSPFYFFAHVFMVLDEPHHCAVAWVKNHTFNLSAAEQLVLSVPLDTAGHPEPCLMFRPPPANASLQDILSHRFNETQPCDMGWEYPENRLPSLKNEFNLVCDRKHLKDTTQSVFMAGLLVGTLMFGPLCDRDRMGGALMEDAGRGPGPVQLLPRADGACGTRLRFPQLEAPSDHRHCAWLTALLLLLGSARICTLAPDPWEDGRGDTTDPEGGLGQ

SEQ ID NO: 67049 - protein, 103 aa, Homo sapiens
VKLRSDCSRPSLQWYTRAQSKMRRPSLLLKDILKCTLLVFGVWILYILKLNYTTEECDMKKMHYVDPDHVKTYTVPLKEAGPSLLKHSVSPGTSIFKPSLFSP

SEQ ID NO: 67050 - protein, 71 aa, Homo sapiens
  MOD_RES (1)..(1): Any amino acid
XKTEPSTSASSGCGSDSGYGNSSESLEEKDIQMELQGSELWKRFHDIGTEMIITKAGRFGSAQAVHKGHTH

SEQ ID NO: 67051 - protein, 177 aa, Homo sapiens
  MOD_RES (1)..(1): Any amino acid
XTQDLTQVMTSQGLVSPSGGPHEITLTINNSSLSQVLAQAAGPTATSSSGSPQEITLTISGQELIQHNSNGNSELLINGSIRLLAPEINNQSTGATLTISNDQLLSQSTALSSSELNTTSGSLPSTTPMSPSAISTQNLVMSSSGVGGDASVTLTLADTQGMLSGGLDTVTLNITSQ

SEQ ID NO: 67052 - protein, 71 aa, Homo sapiens
MPFRNSKRSRLFSDEDDRQINTRSPKRNQRVAMVPQKFTATMSTPDKKASQKIGFRLRNLLKLPKAHKWCI

SEQ ID NO: 67053 - protein, 260 aa, Homo sapiens
MLVIPPGLSEEEEALQKKFNKLKKKKKALLALKKQSSSSTTSQGGVKRSLSEQPVMDTATATEQAKQLVKSGAISAIKAETKNSGFKRSRTLEGKLKDPEKGPVPTFQPFQRSISADDDLQESSRRPQRKSLYESDRLRELGPDGEEAEGPGAGDGPPRSFDWGYEERSGAHSSASPPRSRSRDRSHERNRDRDRDRERDRDRDRDRDRERDRDRDRDRDRDRERDRDRERDRDRDREGPFRRSDSFPERRAPRKGNTLY

SEQ ID NO: 67054 - protein, 873 aa, Homo sapiens
MNHPFGKEEAASQKQLFGFFCECLRRGEWELAQACVPQLQEGQGDIPKRVEDILQALVVCPNLLRCGQDINPQRVAWVWLLVLEKWLAREKKLLPVVFRRKLEFLLLSEDLQGDIPENILEELYETLTQGAVGHVPDGNPRRESWTPRLSSEAVSVLWDLLRQSPQPAQALLELLLEEDDGTGLCHWPLQNALVDLIRKALRALQGPDSVPPGVVDAIYGALRTLRCPAEPLGVELHLLCEELLEACRTEGSPLREERLLSCLLHKASRGLLSLYGHTYAEKVTEKPPRATASGKVSPDHLDPERAMLALFSNPNPAEAWKVAYFYCLSNNKHFLEQILVTALTLLKEEDFPNLGCLLDREFRPLSCLLVLLGWTHCQSLESAKRLLQTLHRTQGPGCDELLRDACDGLWAHLEVLEWCIQQSSNPIPKRDLLYHLHGGDSHSVLYTLHHLTNLPALREEDVLKLLQKVPAKDPQQEPGAANLFSTYLARCQQYLCSIPDSLCLELLENIFSLLLITSADLHPEPHLPEDYAEDDDIEGKSPSGLRSPSESPQHIAHPERKSERGSLGVPKTLAYTMPSHVKAEPKDSYPGPHRHSFLDLKHFTSGISGFLADEFAIGAFLRLLQEQLDEISSRSPPEKPKQESQSCSGSRDGLQSRLHRLSKVVSEAQWRHKVVTSNHRSEEQPSRRYQPATRHPSLRRGRRTRRSQADGRDRGSNPSLESTSSELSTSTSEGSLSAMSGRNELHSRLHPHPQSSLIPMMFSPPESLLASCILRGNFAEAHQVLFTFNLKSSPSSGELMFMERYQEVIQELAQVEHKIENQNSDAGSSTIRRTGSGRSTLQAIGSAAAAGMVFYSISDVTDKLLNTSGDPIP

SEQ ID NO: 67055 - protein, 894 aa, Homo sapiens
MSRIEKMSILGVRSFGIEDKDKQIITFFSPLTILVGPNGAGKTTIIECLKYICTGDFPPGTKGNTFVHDPKVAQETDVRAQIRLQFRDVNGELIAVQRSMVCTQKSKKTEFKTLEGVITRTKHGEKVSLSSKCAEIDREMISSLGVSKAVLNNVIFCHQEDSNWPLSEGKALKQKFDEIFSATRYIKALETLRQVRQTQGQKVKEYQMELKYLKQYKEKACEIRDQITSKEAQLTSSKEIVKSYENELDPLKNRLKEIEHNLSKIMKLDNEIKALDSRKKQMEKDNSELEEKMEKVFQGTDEQLNDLYHNHQRTVREKERKLVDCHRELEKLNKESRLLNQEKSELLVEQGRLQLQADRHQEHIRARDSLIQSLATQLELDGFERGPFSERQIKNFHKLVRERQEGEAKTANQLMNDFAEKETLKQKQIDEIRDKKTGLGRIIELKSEILSKKQNELKNVKYELQQLEGSSDRILELDQELIKASVLLLHISITKERELSKAEKNSNVETLKMEVISLQNEKADLDRTLRKLDQEMEQLNHHTTTRTQMEMLTKDKADKDEQIRKIKSRHSDELTSLLGYFPNKKQLEDWLHSKSKEINQTRDRLAKLNKELASSEQNKNHINNELKRKEEQLSSYEDKLFDVCGSQDFESDLDRLKEEIEKSSKQRAMLAGATAVYSQFITQLTDENQSCCPVCQRVFQTEAELQEVISDLQSKLRLAPDKLKSTESELKKKEKRRDEMLGLVPMRQSIIDLKEKEIPELRNKLQNVNRDIQRLKNDIEEQETLLGTIMPEEESAKVCLTDVTIMERFQMELKDVERKIAQQAAKLQGIDLDRTVQQVNQEKQEKQHKLDTVSSKIELNRKLIQDQQEQIQHLKSTTNELKSEKLQISTNLQR

SEQ ID NO: 67056 - protein, 120 aa, Homo sapiens
MAATQKLVKDIIDSKTGETASKRWKGAKNSETAAKVALMKLKMHADGDKSLPQTERIYFQVFLPKGSKEKSKPMFFCHRWSIGKAIDFAASLARLKNDNNKFTAKVTSHYNNISILIKVL

SEQ ID NO: 67057 - protein, 87 aa, Homo sapiens
MSEETRQSKLAAAKKKLREYQQRNSPGVPTGAKKKKKIKNGSNPETTTSGGCHSPEDVSLGWPGSWGQGAQGAVEGNCYDCGRTVGY

SEQ ID NO: 67058 - protein, 169 aa, Homo sapiens
MRLLILTCLVAVALARPKLPLRYPERLQNPSESSEPIPLESREEYMNGMNRQRNILREKQTDEIKNCVVAEPEKMESSISSSSEEQFCRLNEYNQLQLQAAHAQEQIRRMNENSHVQVPFQQLNQLAAYPYAVWYYPQIMQYVPFPPFSDISNPTAHENYEKNNVMLQW

SEQ ID NO: 67059 - protein, 52 aa, Homo sapiens
MPVKKTDTDRALSLLEEYCKKLRKPEEQLLKNAVKKVMGIFKSSLFQALLGC

SEQ ID NO: 67060 - protein, 5412 aa, Homo sapiens; identical to SEQ ID NO: 24943

SEQ ID NO: 67061 - protein, 414 aa, Homo sapiens
MAVAAAAAAAGPAGAGGGRAQRSGLLEVLVRDRWHKVLVNLSEDALVLSSEEGAAAYNGIGTATNGSFCRGAGAGHPGAGGAQPPDSPAGVRTAFTDLPEQVPESISNQKRGVKVLKQELGGLGISIKGGKENKMPILISKIFKGLAADQTQALYVGDAILSVNGADLRDATHDEAVQALKRAGKEVLLEVKYMREATPYVKKGSPVSEIGWETPPPESPRLGGSTSDPPSSQSFSFHRDRKSIPLKMCYVTRSMALADPENRQLEIHSPDAKHTVILRSKDSATAQAWFSAIHSNVNDLLTRVIAEVREQLGKTGIAGSREIRHLGWLAEKVPGESKKQWKPALVVLTEKDLLIYDSMPRRKEAWFSPVHTYPLLATRWSLTVSPSLECSGTILAHCNLRLPGSSSFLPQPPK

SEQ ID NO: 67062 - protein, 156 aa, Homo sapiens
  MOD_RES (1)..(1): Any amino acid
XKEPSAAAPTGAGGVAPGSGNNSGGPSLLVPLPVNPPSSPTPSFSDAKAAGALLNGPPQFSTAPEIKAPEPLSSLKSMAERAAISSGIEDPVPTLHLTERGSTSPGTPVRRPPTTTRCHPHTRTLWNSTSACRPRHSSSSSTIWRALRHSIWQPRP

SEQ ID NO: 67063 - protein, 1001 aa, Homo sapiens
MTEVLDVSDEEGDDTMTGDGGEYLRPEDLKELGDDSLPSSQFLDGMNYLRYSLEGGRSDSLRSFSSDRSHTLSHASYLRDSAVMDDSVVIPSHQVSTLAKEAERNSYRLSWGTENLDNVALSSSPIHSGFLVSFMVDARGGAMRGCRHNGLRIIIPPRKCTAPTRVTCRLVKRHRLATMPPMVEGEGLASRLIEVGPSGAQFLGPVIVEIPHFAALRGKERELVVLRSENGDSWKEHFCDYTEDELNEILNGMDEVLDSPEDLEKKRICRIITRDFPQYFAVVSRIKQDSNLIGPEGGVLSSTVVPQVQAVFPEGALTKRIRVGLQAQPMHSELVKKILGNKATFSPIVTLEPRRRKFHKPITMTIPVPKASSDVMLNGFGGDAPTLRLLCSITGGTTPAQWEDITGTTPLTFVNECVSFTTNVSARFWLIDCRQIQESVTFASQVYREIICVPYMAKFVVFAKSHDPIEARLRCFCMTDDKVDKTLEQQENFAEVARSRDVEVLEGKPIYVDCFGNLVPLTKSGQHHIFSFFAFKENRLPLFVKVRDTTQEPCGRLSFMKEPKSTRGLVHQAICNLNITLPIYTKESESDQEQEEEIDMTSEKNPQDEQERIEERLAYIADHLGFSWTELARELDFTEEQIHQIRIENPNSLQDQSHALLKYWLERDGKHATDTNLVECLTKINRMDIVHLMETNTEPLQERISHSYAEIEQTITLDHSEGFSVLQEELCTAQHKQKEEQAVSKESETCDHPPIVSEEDISVGYSTFQDGVPKTEGDSSATALFPQTHKEQVQQDFSGKMQDLPEESSLEYQQEYFVTTPGTETSETQKAMIVPSSPSKTPEEVSTPAEEEKLYLQTPTSSERGGSPIIQEPEEPSEHREESSPRKTSLVIVESADNQPETCERLDEDAAFEKGDDMPEIPPETVTEEEYIDEHGHTVVKKVTRKIIRRYVSSEGTEKEEIMVQGMPQEPVNIEEGDGYSKVIKRVVLKSDTEQSEDNNE

SEQ ID NO: 67064 - protein, 34 aa, Homo sapiens
  MOD_RES (1)..(1): Any amino acid
XSQEEEEQKKKDDVTGEASFACLPWPTDAWTPKR

SEQ ID NO: 67065 - protein, 173 aa, Homo sapiens
MWVANDTDPRVLEKQELQQPTYVALSYINRFMTDAARREQESLKKKIQPKLSLTLSSSVSRGNVSTPPRHSSGSLTPPVTPPITPSSSFRSSTPTGSEYDEEEVDYEESDSDESWTTESAISSEAILSSMCMNGGEEKPFACPVPGCKKRYKNVNGIKYHAKNGHRTQIRVRK

SEQ ID NO: 67066 - protein, 36 aa, Homo sapiens
MHRRGVGAGAIAKKKLAEAKYKERGTVLAEDQLAQR

SEQ ID NO: 67067 - protein, 1149 aa, Homo sapiens
MNMCSAGVARKAAEEVTLQTGIKRFVAGALGPTNKTLSVSPSVERPDYRNITFDELVEAYQEQAKGLLDGGVDILLIETIFDTANAKAALFALQNLFEEKYAPRPIFISGTIVDKSGRTLSGQTGEGFVISVSHGEPLCIGLNCALGAAEMRPFIEIIGKCTTAYVLCYPNAGLPNTFGDYDETPSMMAKHLKDFAMDGLVNIVGGCCGSTPDHIREIAEAVKNCKPRVPPATAFEGHMLLSGLEPFRIGPYTNFVNIGERCNVAGSRKFAKLIMAGNYEEALCVAKVQVEMGAQVLDVNMDDGMLDGPSAMTRFCNLIASEPDIAKVPLCIDSSNFAVIEAGLKCCQGKCIVNSISLKEGEDDFLEKARKIKKYGAAMVVMAFDEEGQATETDTKIRVCTRAYHLLVKKLGFNPNDIIFDPNILTIGTGMEEHNLYAINFIHATKVIKETLPGARISGGLSNLSFSFRGMEAIREAMHGVFLYHAIKSGMDMGIVNAGNLPVYDDIHKELLQLCEDLIWNKDPEATEKLLRYAQTQGTGGKKVIQTDEWRNGPVEERLEYALVKGIEKHIIEDTEEARLNQKKYPRPLNIIEGPLMNGMKIVGDLFGAGKMFLPQVIKSARVMKKAVGHLIPFMEKEREETRVLNGTVEEEDPYQGTIVLATVKGDVHDIGKNIVGVVLGCNNFRVIDLGVMTPCDKILKAALDHKADIIGLSGLITPSLDEMIFVAKEMERLAIRIPLLIGGATTSKTHTAVKIAPRYSAPVIHVLDASKSVVVCSQLLDENLKDEYFEEIMEEYEDIRQDHYESLKERRYLPLSQARKSGFQMDWLSEPHPVKPTFIGTQVFEDYDLQKLVDYIDWKPFFDVWQLRGKYPNRGFPKIFNDKTVGGEARKVYDDAHNMLNTLISQKKLRARGVVGFWPAQSIQDDIHLYAEAAVPQAAEPIATFYGLRQQAEKDSASTEPYYCLSDFIAPLHSGIRDYLGLFAVACFGVEELSKAYEDDGDDYSSIMVKALGDRLAEAFAEELHERVRRELWAYCGSEQLDVADLRRLRYKGIRPAPGYPSQPDHTEKLTMWRLADIEQSTGIRLTESLAMAPASAVSGLYFSNLKSKYFAVGKISKDQVEDYALRKNISVAEVEKWLGPILGYDTD

SEQ ID NO: 67068 - protein, 97 aa, Homo sapiens
  MOD_RES (1)..(1): Any amino acid
XTSQMPKGVLNMSLTPSQGTHTFDPVTKMLSWDVGKINPQKLPSLKGTMSLQAGASKPDENPTINLQFKIQQLAISEDFHVCSYFYFGTTGPFQDSR

SEQ ID NO: 67069 - protein, 82 aa, Homo sapiens
MELQTLQEALKVEIQVHQKLVAQMKQDPQNADLKKQLHELQAKITALSEKQKPSVSLYQFYLACRCHCTGIHCVEASLCLTY

SEQ ID NO: 67070 - protein, 371 aa, Homo sapiens
KVRSYGSVLLSAEEFQKLFNELDRSVVKEHPPRPEYQSPFLQSAQFLFGHYYFDYLGNLIALANLVSICVFLVLDADVLPAERDDFILGILNCVFIVYYLLEMLLKVFALGLRGYLSYPSNVFDGLLTVVLLVLEISTLAVYRLPHPGWRPEMVGLLSLWDMTRMLNMLIVFRFLRIIPSMKLMAVVASTVLGLVQNMRAFGGILVVVYYVFAIIGINLFRGVIVALPGNSSLAPANGSAPCGSFEQLEYWANNFDDFAAALVTLWNLMVVNNWQVFLDAYRRYSGPWSKIYFVLWWLVSSVIWVNLFLALILENFLHKWDPRSHLQPLAGTPEATYQMTVELLFRDILEEPGEDELTERLSQHPHLWLCR

SEQ ID NO: 67071 - protein, 791 aa, Homo sapiens
MEEKRRKYSISSDNSDTTDSHATSTSASRCSKLPSSTKSGWPRQNEKKPSEVFRTDLITAMKIPDSYQLSPDDYYILADPWRQEWEKGVQVPAGAEAIPEPVVRILPPLEGPPAQASPSSTMLGEGSQPDWPGGSRYDLDEIDAYWLELINSELKEMERPELDELTLERVLEELETLCHQNMARAIETQEGLGIEYDEDVVCDVCRSPEGEDGNEMVFCDKCNVCVHQACYGILKVPTGSWLCRTCALGVQPKCLLCPKRGGALKPTRSGTKWVHVSCALWIPEVSIGCPEKMEPITKISHIPASRWALSCSLCKECTGTCIQCSMPSCVTAFHVTCAFDHGLEMRTILADNDEVKFKSFCQEHSDGGPRNEPTSEPTEPSQAGEDLEKVTLRKQRLQQLEEDFYELVEPAEVAERLDLAEALVDFIYQYWKLKRKANANQPLLTPKTDEVDNLAQQEQDVLYRRLKLFTHLRQDLERVRNLCYMVTRRERTKHAICKLQEQIFHLQMKLIEQDLCRAGLSTSFPIDGTFFNSWLAQSVQITAENMAMSEWPLNNGHREDPAPGLLSEELLQDEETLLSFMRDPSLRPGDPARKARGRTRLPAKKKPPPPPPQDGPGSRTTPDKAPKKTWGQDAGSGKGGQGPPTRKPPRRTSSHLPSSPAAGDCPILATPESPPPLAPETPDEAASVAADSDVQVPGPAASPKPLGRLRPPRESKVTRRLPGARPDAGMGPPSAVAERPKVSLHFDTETDGYFSDGEMSDSDVEAEDGGVQRGPREAGAEEVVRMGVLAS

SEQ ID NO: 67072 - protein, 706 aa, Homo sapiens
MEENPTLESEAWGSSREWLAPREARGGPSLSSVLNELPSAATLRYRDPGVLPWGALEEEEEDGGRSRKAFTEVTQTELQDPHPSRELPWPMQARRAYRQRNASRDQVVYGSGTKTDRWARLLRRSKEKTKEGLRSLQPWAWTLKRIGGQFGAGTESYFSLLRFLLLLNVLASVLMACMTLLPTWLGGAPPGPPGPDISSPCGSYNPHSQGLVTFATQLFNLLSGEGYLEWSPLFYGFYPPRPRLAVTYLCWAFAVGLICLLLILHRSVSGLKQTLLAESEALTSYSHRVFSAWDFGLCGDVHVRLRQRIILYELKVELEETVVRRQAAVRTLGQQARVWLVRVLLNLLVVALLGAAFYGVYWATGCTVELQEMPLVQELPLLKLGVNYLPSIFIAGVNFVLPPVFKLIAPLEGYTRSRQIVFILLRTVFLRLASLVVLLFSLWNQITCGGDSEAEDCKTCGYNYKQLPCWETVLGQEMYKLLLFDLLTVLAVALLIQFPRKLLCGLCPGALGRLAGTQEFQVPDEVLGLIYAQTVVWVGSFFCPLLPLLNTVKFLLLFYLKKLTLFSTCSPAARTFRASAANFFFPLVLLLGLAISSVPLLYSIFLIPPSKLCGPFRGQSSIWAQIPESISSLPETTQNFLFFLGTQAFAVPLLLISSILMAYTVALANSYGRLISELKRQRQTEAQNKVFLARRAVALTSTKPAL

SEQ ID NO: 67073 - protein, 63 aa, Homo sapiens
MIQAILVFNNHGKPRLVRFYQRFVSAARLHHAPSGRPLCLPSSLASRRPGAPLFGHLGLLHRA

SEQ ID NO: 67074 - protein, 2409 aa, Homo sapiens
MQEHSTRRRSLSLCPDWESWDPQKPVDNAREAMQQADDWLGVPQVITPEEIIHPDVDEHSVMTYLSQFPKAKLKPGAPLKPKLNPKKARAYGRGIEPTGNMVKQPAKFTVDTISAGQGDVMVFVEDPEGNKEEAQVTPDSDKNKTYSVEYLPKVTGLHKVTVLFAGQHISKSPFEVSVDKAQGDASKVTAKGPGLEAVGNIANKPTYFDIYTAGAGVGDIGVEVEDPQGKNTVELLVEDKGNQVYRCVYKPMQPGPHVVKIFFAGDTIPKSPFVVQVGEACNPNACRASGRGLQPKGVRIRETTDFKVDTKAAGSGELGVTMKGPKGLEELVKQKDFLDGVYAFEYYPSTPGRYSIAITWGGHHIPKSPFEVQVGPEAGMQKVRAWGPGLHGGIVGRSADFVVESIGSEVGSLGFAIEGPSQAKIEYNDQNDGSCDVKYWPKEPGEYAVHIMCDDEDIKDSPYMAFIHPATGGYNPDLVRAYGPGLEKSGCIVNNLAEFTVDPKDAGKAPLKIFAQDGEGQRIDIQMKNRMDGTYACSYTPVKAIKHTIAVVWGGVNIPHSPYRVNIGQGSHPQKVKVFGPGVERSGLKANEPTHFTVDCTEAGEGDVSVGIKCDARVLSEDEEDVDFDIIHNANDTFTVKYVPPAAGRYTIKVLFASQEIPASPFRVKVDPSHDASKVKAEGPGLSKAGVENGKPTHFTVYTKGAGKAPLNVQFNSPLPGDAVKDLDIIDNYDYSHTVKYTPTQQGNMQVLVTYGGDPIPKSPFTVGVAAPLDLSKIKLNGLENRVEVGKDQEFTVDTRGAGGQGKLDVTILSPSRKVVPCLVTPVTGRENSTAKFIPREEGLYAVDVTYDGHPVPGSPYTVEASLPPDPSKVKAHGPGLEGGLVGKPAEFTIDTKGAGTGGLGLTVEGPCEAKIECSDNGDGTCSVSYLPTKPGEYFVNILFEEVHIPGSPFKADIEMPFDPSKVVASGPGLEHGKVGEAGLLSVDCSEAGPGALGLEAVSDSGTKAEVSIQNNKDGTYAVTYVPLTAGMYTLTMKYGGELVPHFPARVKVEPAVDTSRIKVFGPGIEGKDVFREATTDFTVDSRPLTQVGGDHIKAHIANPSGASTECFVTDNADGTYQVEYTPFEKGLHVVEVTYDDVPIPNSPFKVAVTEGCQPSRVQAQGPGLKEAFTNKPNVFTVVTRGAGIGGLGITVEGPSESKINCRDNKDGSCSAEYIPFAPGDYDVNITYGGAHIPGSPFRVPVKDVVDPSKVKIAGPGLGSGVRARVLQSFTVDSSKAGLAPLEVRVLGPRGLVEPVNVVDNGDGTHTVTYTPSQEGPYMVSVKYADEEIPRSPFKVKVLPTYDASKVTASGPGLSSYGVPASLPVDFAIDARDAGEGLLAVQITDQEGKPKRAIVHDNKDGTYAVTYIPDKTGRYMIGVTYGGDDIPLSPYRIRATQTGDASKCLATGPGIASTVKTGEEVGFVVDAKTAGKGKVTCTVLTPDGTEAEADVIENEDGTYDIFYTAAKPGTYVIYVRFGGVDIPNSPFTVMVTEEAYVPVSDMNGLGFKPFDLVIPFAVRKGEITGEVHMPSGKTATPEIVDNKDGTVTVRYAPTEVGLHEMHIKYMGSHIPESPLQFYVNYPNSGSVSAYGPGLVYGVANKTATFTIVTEDAGEGGLDLAIEGPSKAEISCIDNKDGTCTVTYLPTLPGDYSILVKYNDKHIPGSPFTAKITDDSRRCSQVKLGSAADFLLDISETDLSSLTASIKAPSGRDEPCLLKRLPNNHIGISFIPREVGEHLVSIKKNGNHVANSPVSIMVVQSEIGDARRAKVYGRGLSEGRTFEMSDFIVDTRDAGYGGISLAVEGPSKVDIQTEDLEDGTCKVSYFPTVPGVYIVSTKFADEHVPGSPFTVKISGEGRVKESITRTSRAPSVATVGSICDLNLKIPEINSSDMSAHVTSPSGRVTEAEIVPMGKNSHCVRFVPQEMGVHTVSVKYRGQHVTGSPFQFTVGPLGEGGAHKVRAGGPGLERGEAGVPAEFSIWTREAGAGGLSIAVEGPSKAEITFDDHKNGSCGVSYIAQEPGNYEVSIKFNDEHIPESPYLVPVIAPSDDARRLTVMSLQESGLKVNQPASFAIRLNGAKGKIDAKVHSPSGAVEECHVSELEPDKYAVRFIPHENGVHTIDVKFNGSHVVGSPFKVRVGEPGQAGNPALVSAYGTGLEGGTTGIQSEFFINTTRAGPGTLSVTIEGPSKVKMDCQETPEGYKVMYTPMAPGNYLISVKYGGPNHIVGSPFKAKVTGQRLVSPGSANETSSILVESVTRSSTETCYSAIPKASSDASKVTSKGAGLSKAFVGQKSSFLVDCSKAGSNMLLIGVHGPTTPCEEVSMKHVGNQQYNVTYVVKERGDYVLAVKWGEEHIPGSPFHVTVP

SEQ ID NO: 67075 - protein, 1248 aa, Homo sapiens
MLFPLQVAAVTSSVRDDPLEHCVSPRTRARSPEICKMADNLDEFIEEQKARLAEDKAELESDPPYMEMKGKLSAKLSENSKILISMAKENIPPNSQQTRGSLGIDYGLSLPLGEDYERKKHKLKEELRQDYRRYLTQKNFLSTSETDPSTLGVSLPIGERLSAKERLKLERNKEYNQFLRGKEESSEKFRQVEKSTEPKSQRNKKPIGQVKPDLTSQIQTSCENSEGPRKDVLTPSEAYEELLNQRRLEEDRYRQLDDEIELRNRRIIKKANEEVGISNLKHQRFASKAGIPDRRFHRFNEDRVFDRRYHRPDQDPEVSEEMDERFRYESDFDRRLSRVYTNDRMHRNKRGNMPPMEHDGDVIEQSNIRISSAENKSAPDNETSKSANQDTCSPFAGMLFGGEDRELIQRRKEKYRLELLEQMAEQQRNKRREKDLELRVAASGAQDPEKSPDRLKQFSVAPRHFEEMIPPERPRIAFQTPLPPLSAPSVPPIPSVHPVPSQNEDLRSGLSSALGEMVSPRIAPLPPPPLLPPLATNYRTPYDDAYYFYGSRNTFDPSLAYYGSGMMGVQPAAYVSAPVTHQLAQPVVNTVGQNELKITSDQVINSGLIFEDKPKPSKQSLQSYQEALQQQIREREERRKKEREEKEEYEAKLEAEMRTYNPWGKGGGGAPLRDAKGNLITDLNRMHRQNIDAYHNPDARTYEDKRAVVSLDPNLATSNAENLEDAANKSSGHMQTQSSPFARGNVFGEPPTELQIKQQELYKNFLRFQIEEKKQREEAERERLRIAEEKEERRLAEQRARIQQEYEEEQEKKREKEEEQRLKNEEHIRLAEERQKEAERKKKEEEEKYNLQLQHYCERDNLIGEETKHMRQPSPIVPALQNKIASKLQRPPSVDSIIRSFIHESSMSRAQSPPVPARKNQLRAEEEKKNVIMELSEMRKQLRSEERRLQERLLHMDSDDEIPIRKKERNPMDIFDMARHRLQAPVRRQSPKGLDAATFQNVHDFNELKDRDSETRVDLKFMYLDPPRDHHTLEIQQQALLREQQKRLNRIKMQEGAKVDLDAIPSAKVREQRMPRDDTSDFLKNSLLESDSAFIGAYGETYPAIEDDVLPPPSQLPSARERRRNKWKGLDIDSSRPNVAPDGLSLKSISSVNVDELRVRNEERMRRLNEFHNKPINTDDESSLVDPDDIMKHIGDDGSNSVATEPWLRPGTSETLKRFMAEQLNQEQQQIPGKPGTFTWQGLSTAHG

SEQ ID NO: 67076 - protein, 111 aa, Homo sapiens
  MOD_RES (1)..(1): Any amino acid
XSKKPKKHPKVAVKAKPSPRLTIFDEEVDPDEGLFGPGRKLSPQDPSEDVSSVDPLKLFDDPDLGGAIPLGDSLLLPAACESGGPTPSLSHRDASKELFRYHLSPAALGQL

SEQ ID NO: 67077 - protein, 31 aa, Homo sapiens
MLSSFNEWFWQDRFWLPPNVTWTELEDRDGR

SEQ ID NO: 67078 - protein, 65 aa, Homo sapiens
MCRLHQQHPLTLKWVDSEGDPCTVSSQMELEEAFRLARQCRDEGLIIHVFPSTPEQPGLPCPGED

SEQ ID NO: 67079 - protein, 48 aa, Homo sapiens
MRLRKLAQQIANCKQCIERSASLISQAEHSLKENDHARFLQTAKNITE

SEQ ID NO: 67080 - protein, 541 aa, Homo sapiens
MQSTSNHLWLLSDILGQGATANVFRGRHKKTGDLFAIKVFNNISFLRPVDVQMREFEVLKKLNHKNIVKLFAIEEETTTRHKVLIMEFCPCGSLYTVLEEPSNAYGLPESEFLIVLRDVVGGMNHLRENGIVHRDIKPGNIMRVIGEDGQSVYKLTDFGAARELEDDEQFVSLYGTEEYLHPDMYERAVLRKDHQKKYGATVDLWSIGVTFYHAATGSLPFRPFEGPRRNKEVMYKIITGKPSGAISGVQKAENGPIDWSGDMPVSCSLSRGLQVLLTPVLANILEADQEKCWGFDQFFAETSDILHRMVIHVFSLQQMTAHKIYIHSYNTATIFHELVYKQTKIISSNQELIYEGRRLVLEPGRLAQHFPKTTEENPIFVVSREPLNTIGLIYEKISLPKVHPRYDLDGDASMAKAITGVVCYACRIASTLLLYQELMRKGIRWLIYEKLMKINLEAAELGEISDIHTKLLRLSSSQGTIETSLQDIDSRLSPGGSLADAWAHQEGTHPKDRNVEKLQVLLNCMTEIYYQFKKDKAERRS

SEQ ID NO: 67081 - protein, 252 aa, Homo sapiens
MMDEPWWEGRVASDVHCTLREKELKLPTFRAHSPLLKSRRFFVDILTLLSSHCQLCPAARHLAVYLLDHFMDRYNVTTSKQLYTVAVSCLLLASKFEDREDHVPKLEQINSTRILSSQNFTLTKKELLSTELLLLEAFSWNLCLPTPAHFLDYYLLASVSQKDHHCHTWPTTCPRKTKECLKEYAHYFLEVTLQDHIFYKFQPSVVAAACVGASRICLQLSPYWTRDLQRISSYSLEHLSTCIEILLVPLFR

SEQ ID NO: 67082 - protein, 54 aa, Homo sapiens
MFPLISSHHLWWGGLRRTVCLNLPVLTLQHFQHMHIKVGDRAELRRAFTQTDVA

SEQ ID NO: 67083 - protein, 119 aa, Homo sapiens
MEALILEPSLYTVKAILILDNDGDRLFAKLMLMAVLNCLFDSLSQMLRKNVEKRALLENMEGLFLAVDEIVDGGVILESDPQQVVHRVALRGEDVPLTEQTVSQVLQSAKEQIKWSLLR

SEQ ID NO: 67084 - protein, 76 aa, Homo sapiens
MWYGVFLWALVSSLFFHVPAGLLALFTLRHHKYGAAIAGVYRAAGKEMIPFEALTLGTGQTFCVLVVSFLRILATL

SEQ ID NO: 67085 - protein, 1460 aa, Homo sapiens
MGSKRRRATSPSSSVSGDFDDGHHSVSTPGPSRKRRRLSNLPTVDPIAVCHELYNTIRDYKDEQGRLLCELFIRAPKRRNQPDYYEVVSQPIDLMKIQQKLKMEEYDDVNLLTADFQLLFNNAKSYYKPDSPEYKAACKLWDLYLRTRNEFVQKGEADDEDDDEDGQDNQGTVTEGSSPAYLKEILEQLLEAIVVATNPSGRLISELFQKLPSKVQYPDYYAIIKEPIDLKTIAQRIQNGSYKSIHAMAKDIDLLAKNAKTYNEPGSQVFKDANSIKKIFYMKKAEIEHHEMAKSSLRMRTPSNLAAARLTGPSHSKGSLGEERNPTSKYYRNKRAVQGGRLSAITMALQYGSESEEDAALAAARYEEGESEAESITSFMDVSNPFYQLYDTVRSCRNNQGQLIAEPFYHLPSKKKYPDYYQQIKMPISLQQIRTKLKNQEYETLDHLECDLNLMFENAKRYNVPNSAIYKRVLKLQQVMQAKKKELARRDDIEDGDSMISSATSDTGSAKRKSKKNIRKQRMKILFNVVLEAREPGSGRRLCDLFMVKPSKKDYPDYYKIILEPMDLKIIEHNIRNDKYAGEEGMIEDMKLMFRNARHYNEEGSQVYNDAHILEKLLKEKRKELGPLPDDDDMASPKLKLSRKSGISPKKSKYMTPMQQKLNEVYEAVKNYTDKRGRRLSAIFLRLPSRSELPDYYLTIKKPMDMEKIRSHMMANKYQDIDSMVEDFVMMFNNACTYNEPESLIYKDALVLHKVLLETRRDLEGDEDSHVPNVTLLIQELIHNLFVSVMSHQDDEGRCYSDSLAEIPAVDPNFPNKPPLTFDIIRKNVENNRYRRLDLFQEHMFEVLERARRMNRTDSEIYEDAVELQQFFIKIRDELCKNGEILLSPALSYTTKHLHNDVEKERKEKLPKEIEEDKLKREEEKRAEKSEDSSGAAGLSGLHRTYSQDCSFKNSMYHVGDYVYVEPAEANLQPHIVCIERLWEDSAGEKWLYGCWFYRPNETFHLATRKFLEKEVFKSDYYNKVPVSKILGKCVVMFVKEYFKLCPENFRDEDVFVCESRYSAKTKSFKKIKLWTMPISSVRFVPRDVPLPVVRVASVFANADKGDDEKNTDNSEDSRAEDNFNLEKEKEDVPVEMSNGEPGCHYFEQLHYNDMWLKVGDCVFIKSHGLVRPRVGRIEKVWVRDGAAYFYGPIFIHPEETEHEPTKMFYKKEVFLSNLEETCPMTCILGKCAVLSFKDFLSCRPTEIPENDILLCESRYNESDKQMKKFKGLKRFSLSAKVVDDEIYYFRKPIVPQKEPSPLLEKKIQLLEAKFAELEGGDDDIEEMGEEDSEVIEPPSLPQLQTPLASELDLMPYTPPQSTPKSAKGSAKKEGSKRKINMSGYILFSSEMRAVIKAQHPDYSFGELSRLVGTEWRNLETAKKAEYEGMMGGYPPGLPPLQGPVDGLVSMGSMQPLHPG

SEQ ID NO: 67086 - protein, 135 aa, Homo sapiens
MVAMAEAEAGVAVEVRGLPPAVPDELLTLYFENRRRSGGGPVLSWQRLGCGGVLTFREPADAERVLAQADHELHGAQLSLRPAPPRAPARLLLQGLPPGTTPQRLEQHVQALLRASGLPVQPCCALASPRPDRAL

SEQ ID NO: 67087 - protein, 42 aa, Homo sapiens
MAAARPEAQSRSSPTPESRSQEPLDLVRARKGPGRGARGPGA

SEQ ID NO: 67088 - protein, 65 aa, Homo sapiens
MAAAVPQRAWTVEQLRSEQLPKKDIIKFLQEHGSDSAGVQWRDLGSLQPPPPGFKRFSCLCLSSS

SEQ ID NO: 67089 - protein, 387 aa, Homo sapiens
MVGSPDTVGMNYGSYMEEKHMPPPNMTTNERRVIVPADPTLWSTDHVRQWLEWAVKEYGLPDVNILLFQNIDGKELCKMTKDDFQRLTPSYNADILLSHLHYLRETPLPHLTSDDVDKALQNSPRLMHARNTGGAAFIFPNTSVYPEATQRITTRPDLPYEPPRRSAWTGHGHPTPQSKAAQPSPSTVPKTEDQRPQLDPYQILGPTSSRLANPGSGQIQLWQFLLELLSDSSNSSCITWEGTNGEFKMTDPDEVARRWGERKSKPNMNYDKLSRALRYYYDKNIMTKVHGKRYAYKFDFHGIAQALQPHPPESSLYKYPSDLPYMGSYHAHPQKMNFVAPHPPALPVTSSSFFAAPNPYWNSPTGGIYPNTRLPTSHMPSHLGTYY

SEQ ID NO: 67090 - protein, 673 aa, Homo sapiens
GATSAPAACATASQFACRSGECVHLGWRCDGDRDCKDKSDEADCPLGTCRGDEFQCGDGTCVLAIKHCNQEQDCPDGSDEAGCLQDIDECKDPDACSQICVNYKGYFKCECYPGYEMDLLTKNCKAAAGKSPSLIFTNRHEVRRIDLVKRNYSRLIPMLKNVVALDVEVATNRIYWCDLSYRKIYSAYMDKASDPKEQEVLIDEQLHSPEGLAVDWVHKHIYWTDSGNKTISVATVDGGRRRTLFSRNLSEPRAIAVDPLRGFMYWSDWGDQAKIEKSGLNGVDRQTLVSDNIEWPNGITLDLLSQRLYWVDSKLHQLSSIDFSGGNRKTLISSTDFLSHPFGIAVFEDKVFWTDLENEAIFSANRLNGLEISILAENLNNPHDIVIFHELKQPRAPDACELSVQPNGGCEYLCLPAPQISSHSPKYTCACPDTMWLGPDMKRCYRAPQSTSTTTLASTMTRTVPATTRAPGTTVHRSTYQNHSTETPSLTAAVPSSVSVPRAPSISPSTLSPATSNHSQHYANEDSKMGSTVTAAVIGIIVPIVVIALLCMSGYLIWRNWKRKNTKSMNFDNPVYRKTTEEEDEDELHIGRTAQIGHVYPAAISSFDRPLWAEPCLGETREPEDPAPALKELFVLPGEPRSQLHQLPKNPLSELPVVKSKRVALSLEDDGLP

SEQ ID NO: 67091 - protein, 494 aa, Homo sapiens
MHRRQRWAARYSPGPLPLPGLGNLLHVDFQNTPYCFDQLRRRFGDVFSLQLAWTPVVVLNGLAAVREAMVTRGEDTADRPPVPITQILGFGPRSQGVFLARYGPAWREQRRFSVSTLRNLGLGKKSLEQWVTEEAACLCAAFANHSGRPFRPNGLLDKAVSNVIASLTCGRRFEYDDPRFLRLLDLAQEGLKEESGFLREVLNAVPVLLHIPALAGKVLRFQKAFLTQLDELLTEHRMTWDPAQPPRDLTEAFLAEMEKAKGNPESSFNDENLRIVVADLFSAGMVTTSTTLAWGLLLMILHPDVQQGGRVQAGAHPIVGTHVCPGRVQQEIDDVIGQVRRPEMGDQAHMPYTTAVIHEVQRFGDIVPLGVTHMTSRDIEVQGFRIPKGTTLITNLSSVLKDEAVWEKPFRFHPEHFLDAQGHFVKPEAFLPFSAGRRACLGEPLARMELFLFFTSLLQHFSFSVPTGQPRPSHHGVFAFLVTPSPYELCAVPR

SEQ ID NO: 67092 - protein, 137 aa, Homo sapiens
MLPACTRSQERPASRKMATNFLAHEKIWFDKFKYDDAERRFYEQMNGPVAGASRQENGASVILRDIARARENIQKSLAGSSGPGASSGTSGDHGELVVRIASLEVENQSLRGVVQELQQAISKLEARLNVLEKSSPG

SEQ ID NO: 67093 - protein, 75 aa, Homo sapiens
MKDIGQQLYTTHLNGGHNSLTMSPKQPDANGAPRPNRQEAQTLLYQGSEAEAAMMTIATCAKCKSVHKISLQDLQ

SEQ ID NO: 67094 - protein, 175 aa, Homo sapiens
NCVPDGALRCPGPTAGLTRLSLAYLPVKVIPSQAFRGLNEVIKIEISQIDSLERIEANAFDNLLNLSEILIQNTKNLRYIEPGAFINLPRLKYLSICNTGIRKFPDVTKVFSSESNFILEICDNLHITTIPGNAFQGMNNESVTLPWQNCDEAIKELTLKEKRENMDWNDSEMKR

SEQ ID NO: 67095 - protein, 49 aa, Homo sapiens
MKATSVKGYTGANQSRMAVSKTVLIPPELKTVEKPNPNIKTTQVIFLEF

SEQ ID NO: 67096 - protein, 109 aa, Homo sapiens
MAFQKAVKGTILVGGGALATVLGLSQFAHYRRKQMNLAYVKAADCISEPVNREPPSREAQLLTLQNTSEFDILVIGGGATGSGCALDAVTRGLKTALVERDDFSSGTSS

SEQ ID NO: 67097 - protein, 137 aa, Homo sapiens
MGSDKRVSRTERSGRYGSIIDRDDRDERESRSRRRDSDYKRSSDDRRGDRYDDYRDYDSPERERERRNSDRSEDGYHSDGDYGEHDYRHDISDERESKTIMLRGLPITITESDIREMMESFEGPQPADVRLMKRKTG

SEQ ID NO: 67098 - protein, 250 aa, Homo sapiens
MAFCALTIVALYILSLKDQDRRVPNLPPSNITSSQEPALLPTASSSAPNTSLVTTPASLQVPEITFCEILPCQETYCCPIRGMKEVSSSPVQRQSEEKEFHQRRWSEDKSKSVLARNALSGPDWESDWIDTTISSIQIMEIQQIIDHQYCIQSLQCGTTEPLIVFQCKFTLGNICFHSKRGTKGLESHREISQEMTQGYQHIWSLPVAPFSDSMFHFRVAAPDLADCSTDPYFAGIFFTDYFFYFYRRCA

SEQ ID NO: 67099 - protein, 67 aa, Homo sapiens
MSQGLSWHDDLTQYVISQEMERIPRLRPPEPRPRDRSGLAPKRPGPAGELLLQDIPTGSAPAAQHRL

SEQ ID NO: 67100 - protein, 174 aa, Homo sapiens
MAELQEVQITEEKPLLPGQTPEAAKTHSVETPYGSVTFTVYGTPKPKRPAILTYHDVGLNYKSCFQPLFQFEDMQEIIQNFVRVHVDAPGMEEGAPVFPLGYQYPSLDQLADMIPCVLQYLNFSTIIGVGVGAGAYILARYALNHPDTVEGLVLINIDPNAKGWMDWAAHKLTG

SEQ ID NO: 67101 - protein, 299 aa, Homo sapiens
MGSMFRSEEVALVQLFLPTAAAYTCLNASVSAFQRRFVVDVRRCEELEKTFTFLQEEVRRAGLVLPPPKGRLPAPPPRDLLRIQEETERLAQELRDVRGNQQALRAQLHQLQLHAAVLRQGHEPQLAAAHTDGASERTPLLQAPGGPHQDLRVNFVAGAVEPHKAPALERLLWRACRGFLIASFRELEQPLEHPVTGEPATWMTFLISYWGEQIGQKIRKITDCFHCHVFPFLQQEEARLGALQQLQQQSQELQEVLGETERFLSQVLGRVLQLLPPGQVQVHKMKAVYLALNQCSVST

SEQ ID NO: 67102 - protein, 128 aa, Homo sapiens
MRLDNMLLAEGVAGPEKGGGSAAAAAAAAASGGAGSDNSVEHSDYRAKLSQIRQIYHTELEKYEQACNEFTTHVMNLLREQSRTRPISPKEIERMVSIIHRKFSSIQMQLKQSTCEAVMILRSRFLDA

SEQ ID NO: 67103 - protein, 75 aa, Homo sapiens
MNPSAPSYPMASLYVGDLHPDVTEAMLYEKFSPAGPILSIRVCRDMITRRSLGYAYVNFQQPADAERALDTMNFD

SEQ ID NO: 67104 - protein, 91 aa, Homo sapiens
MDDLDSEFQTGTSLAAARPCQEGTQCQVPDSQRRPAGGLGVYHLPHLQTACVLVGGDPLLIPNWKPHIPGDCRATPRPPTPVQRGPQWHNP

SEQ ID NO: 67105 - protein, 159 aa, Homo sapiens
MAENSVLTSTTGRTSLADSSIFDSKVTEISKENLLIGSTSYVEEEMPQIETRVILVQEAGKQEELIKALKDIKVGFVKMESVEEFEGLDSPEFENVFVVTDFQDSVFNDLYKADCRVIGPPVVLNCSQKGEPLPFSCRPLYCTSMMNLVLCFTGFRKKE

SEQ ID NO: 67106 - protein, 623 aa, Homo sapiens
MDLSALRVEEVQNVINAMQKILECPICLELIKEPVSTKCDHIFCKFCMLKLLNQKKGPSQCPLCKNDITKRSLQESTRFSQLVEELLKIICAFQLDTGLEYANSYNFAKKENNSPEHLKDEVSIIQSMGYRNRAKRLLQSEPENPSLETSLSVQLSNLGTVRTLRTKQRIQPQKTSVYIELGSDSSEDTVNKATYCSVGDQELLQITPQGTRDEISLDSAKKAACEFSETDVTNTEHHQPSNNDLNTTEKRAAERHPEKYQGEAASGCESETSVSEDCSGLSSQSDILTTQQRDTMQHNLIKLQQEMAELEAVLEQHGSQPSNSYPSIISDSSALEDLRNPEQSTSEKAVLTSQKSSEYPISQNPEGLSADKFEVSADSSTSKNKEPGVERSSPSKCPSLDDRWYMHSCSGSLQNRNYPSQEELIKVVDVEEQQLEESGPHDLTETSYLPRQDLEGTPYLESGISLFSDDPESDPSEDRAPESARVGNIPSSTSALKVPQLKVAESAQSPAAAHTTDTAGYNAMEESVSREKPELTASTERVNKRMSMVVSGLTPEEFMLVYKFARKHHITLTNLITEETTHVVMKTDAEFVCERTLKYFLGIAGGKWVVSYFWVTQSIKERK

SEQ ID NO: 67107 - protein, 187 aa, Homo sapiens
MAIYKQSQHMTEVVRRCPHHERCSDSDGLAPPQHLIRVEGNLRVEYLDDRNTFRHSVVVPYEPPEVGSDCTTIHYNYMCNSSCMGGMNRRPILTIITLEDSSGNLLGRNSFEVRVCACPGRDRRTEEENLRKKGEPHHELPPGSTKRALPNNTSSSPQPKKKPLDGEYFTLQMLLDLRWCYFLINSS

SEQ ID NO: 67108 - protein, 126 aa, Homo sapiens
MSDNEDNFDGDDFDDVEEDEGLDDLENAEEEGQENVEILPSGERPQANQKRITTPYMTKYERARVLGTRALQIAMCAPVMVELEGETDPLLIAMKELKLLWGLEYTVLRPSYALAHSLGSFSISSR

SEQ ID NO: 67109 - protein, 92 aa, Homo sapiens
EGEVAALRLTARSQETVTFKDVAMDFTPEEWGKLDPAQRDVMLENYRNLVSLWLPVSKPESYNLENGKEPLKLERKAPKSSYSGEPDRWESS

SEQ ID NO: 67110 - protein, 90 aa, Homo sapiens
MRFARSKRGLRLKTVDSCFQDLKESRLVEDTFTIDEVSEVLNGLQAVVHSEVESELINTAYTNVLLLRQLFAQAEKWYLKLQTDISELEN

SEQ ID NO: 67111 - protein, 62 aa, Homo sapiens
  MOD_RES (1)..(1): Any amino acid
XSMLIHILLPMVFCVLLIMVMCYLKSQWIKETCYPDIPDPYKSSILSLIKFKISSKVWLNRR

SEQ ID NO: 67112 - protein, 173 aa, Homo sapiens
MNGPADGEVDYKKKYRNLKRKLKFLIYEHECFQEELRKAQRKLLKVSRDKSFLLDRLLQYENVDEDSSDSDATASSDNSETEGTPKLSDTPAPKRKRSPPLGGAPSPSSLSLPPSTGFPLQASGVPSPYLSSLASSRYPPFPSDYLALQLPEPSPLRPKREKRPRLPRKLKVP

SEQ ID NO: 67113 - protein, 54 aa, Homo sapiens
MVVVGTNEQVPLPRSQPACVCGRKNLISESQDLLLGTLNFMRGLLNITPQDAWS

SEQ ID NO: 67114 - protein, 44 aa, Homo sapiens
  MOD_RES (1)..(1): Any amino acid
XPTIPAVANSSANSSPSELADELPDMTLDKISGRERNPHLGTSS

SEQ ID NO: 67115 - protein, 423 aa, Homo sapiens
MKLFEVGGSPANTRYLFLGDYVDRGYFSIECVLYLWALKILYPKTLFLLRGNHECRHLTEYFTFKQECKIKYSERVYDACMDAFDCLPLAALMNQQFLCVHGGLSPEINTLDDIRKLDRFKEPPAYGPMCDILWSDPLEDFGNEKTQEHFTHNTVRGCSYFYSYPAVCEFLQHNNLLSILRAHEAQDAGYRMYRKSQTTGFPSLITIFSAPNYLDVYNNKAAVLKYENNVMNIRQFNCSPHPYWLPNFMDVFTWSLPFVGEKVTEMLVNVLNICSDDELGSEEDGFDGATAAARKEVIRNKIRAIGKMARVFSVLREESESVLTLKGLTPTGMLPSGVLSGGKQTLQSATVEAIEADEAIKGFSPQHKITSFEEAKGLDRINERMPPRRDAMPSDANLNSINKALTSETNGTDSNGSNSSNIQ

SEQ ID NO: 67116 - protein, 151 aa, Homo sapiens
MARQTPHLGEQRRTTASLLRKLTTASNGGVIEELSCVRSNNYVQEPECRRNLVQCLLEKQGTPVVQGSLELERVMSSLLDMGFSNAHINELLSVRRGASLQQLLDIISEFILLGLNPEPVCVVLKKSPQLLKLPIMQMRKRSSYLQKLGLG

SEQ ID NO: 67117 - protein, 91 aa, Homo sapiens
MNHQQQQQQQKAGEQQLSEPEDMEMEAGDTDDPPRITQNPVINGNVALSDGHNTAEEDMEDDTSWRSEATFQFTVERFSRLSHGLAMHKQC

SEQ ID NO: 67118 - protein, 331 aa, Homo sapiens
  MOD_RES (1)..(1): Any amino acid
XRGLGRGSPAEWGQRLLLVLLLGGCSGRIHQLALTGEKRADIQLNSFGFYTNGSLEVELSVLRLGLREAEEKSLLVGFSLSRVRSGRVRSYSTRDFQDCPLQKNSSSFLVLFLINTKDLQVQVRKYGEQKTLFIFPGLLPEAPSKPGLPKPQATVPRKVDGGGTSAASKPKSTPAVIQGPSGKDKDLVLGLSHLNNSYNFSFHVVIGSQAEEGQYSLNFHNCNNSVPGKEHPFDITVMIREKNPDGFLSAAEMPLFKLYMVMSACFLAAGIFWVSILCRNTYSVFKIHWLMAALAFTKSISLLFHSINYYFINSQGHPIEGLAVMYYIAHL

SEQ ID NO: 67119 - protein, 497 aa, Homo sapiens
MAAPPAPAAKGSPQPEPHAPEPGPGSAKRGREDSRAGRLSFCTKVCYGIGGVPNQIASSATAFYLQLFLLDIAQIPAAQVSLVLFGGKVSGAAADPVAGFFINRSQRTGSGRLMPWVLGCTPFIALAYFFLWFLPPFTSLRGLWYTTFYCLFQALATFFQVPYTALTMLLTPCPRERDSATAYRMTVEMAGTLMGATVHGLIVSGAHRPHRCEATATPGPVTVSPNAAHLYCIAAAVVVVTYPVCISLLCLGVKERPDPSAPASGPGLSFLAGLSLTTRHPPYLKLVISFLFISAAVQVEQSYLVLFCTHASQLHDHVQGLVLTVLVSAVLSTPLWEWVLQRFGKKTSAFGIFAMVPFAILLAAVPTAPVAYVVAFVSGVSIAVSLLLPWSMLPDVVDDFQLQHRHGPGLETIFYSSYVFFTKLSGACALGISTLSLEFSGYKAGVCKQAEEVVVTLKVLIGAVPTCMILAGLCILMVGSTPKTPSRDASSRLSLRR

SEQ ID NO: 67120 - protein, 38 aa, Homo sapiens
EMESELTACVDVAGALWIHNLRSRGKLALGKSTTVEDK

SEQ ID NO: 67121 - protein, 131 aa, Homo sapiens
MFNSKFGSIPKFYVRAPGRVNIIGEHIDYCGYSVLPMAVEQDVLIAVEPVKTYALQLANTNPLYPDFSTSANNIQIDKTKPLWHNYFLCGLKGIQEHFGLSNLTGMNCLVDGNIPPSSGLSSSSALVCCAG

SEQ ID NO: 67122 - protein, 188 aa, Homo sapiens
MTVFRQENVDDYYDTGEELGSGQFAVVKKCREKSTGLQYAAKFIKKRRTKSSRRGVSREDIEREVSILKEIQHPNVITLHEVYENKTDVILILELVAGGELFDFLAEKESLTEEEATEFLKQILNGVYYLHSLQIAHFDLKPENIMLLDRNVPKPRIKIIDFGLAHKIDFGNEFKNIFGTPEFVGVSG

SEQ ID NO: 67123 - protein, 720 aa, Homo sapiens
  MOD_RES (1)..(1): Any amino acid
XEMKDFQFRALKKVRIFDSPEELPKERSSLLAVSNKYGLVFAGGASGLQIFPTKNLLIQNKPGDDPNKIVDKVQGLLVPMKFPIHHLALSCDNLTLSACMMSSEYGSIIAFFDVRTFSNEAKQQKRPFAYHKLLKDAGGMVIDMKWNPTVPSMVAVCLADGSIAVLQVTETVKVCATLPSTVAVTSVCWSPKGKQLAVGKQNGTVVQYLPTLQEKKVIPCPPFYESDHPVRVLDVLWIGTYVFAIVYAAADGTLETSPDVVMALLPKKEEKHPEIFVNFMEPCYGSCTERQHHYYLSYIEEWDLVLAASAASTEVSILARQSDQINWESWLLEDSSRAELPVTDKSDDSLPMGVVVDYTNQVEITISDEKTLPPAPVLMLLSTDGVLCPFYMINQNPGVKSLIKTPERLSLEGERQPKSPAPTPAASPVAPSAASFSFGSSGFKPTLESTPVPSVSAPNIAMKPSFPPSTSAVKVNLSEKFTAAATSTPVSSSQSAPPMSPFSSASKPAASGPLSHPTPLSAPPSSVPLKSSVLPSPSGRSAQGSSSPVPSMVQKSPRITPPAAKPGSPQAKSLQPAVAEKQGHQWKDSDPVMAGIGEEIAHFQKELEELKARTSKACFQVGTSEEMKMLRTESDDLHTFLLEIKETTESLHGDISSLKTTLLEGFAGVEEAREQNERNRDSGYLHLLYKRPLDPKSEAQLQEIRRLHQYVKFAVQDVND

SEQ ID NO: 67124 - protein, 110 aa, Homo sapiens
MQPISLPRVQQVPQQVQPVQHVYPAQVQYVEGGDAVYTNGAIRTAYTYNPEPQMYAPSSTASYFEAPGGAQVTVAASSPPAVPSHSMVGITMDVGGSPIVSSAGAYLIHG

SEQ ID NO: 67125 - protein, 57 aa, Homo sapiens
MVQFSTSEFRLTPHIDNLEVANSFAVTNAFCSQFSRGVYAIFGFYDKKSVNTITSFC

SEQ ID NO: 67126 - protein, 1300 aa, Homo sapiens
MSRRKQAKPQHLKSDEELLPPDGAPEHAAPGEGAEDADSGPESRSGGEETSVCEKCCAEFFKWADFLEHQRSCTKLPPVLIVHEDAPAPPPEDFPEPSPASSPSERAESEAAEEAGAEGAEGEARPVEKEAEPMDAEPAGDTRAPRPPPAAPAPPTPAYGAPSTNVTLEALLSTKVAVAQFSQGARAAGGSGAGGGVAAAAVPLILEQLMALQQQQIHQLQLIEQIRSQVALMQRPPPRPSLSPAAAPSAPGPAPSQLPGLAALPLSAGAPAAAIAGSGPAAPAAFEGAQPLSRPESGASTPGGPAEPSAPAAPSAAPAPAAPAPAPAPQSAASSQPQSASTPPALAPGSLLGAAPGLPSPLLPQTSASGVIFPNPLVSIAATANALDPLSALMKHRKGKPPNVSVFEPKASAEDPFFKHKCRFCAKVFGSDSALQIHLRSHTGERPFKCNICGNRFSTKGNLKVHFQRHKEKYPHIQMNPYPVPEYLDNVPTCSGIPYGMSLPPEKPVTTWLDSKPVLPTVPTSVGLQLPPAVPGAHGYADSPSATPASRSPQRPSPASSECASLSPGLNHVESGVSATAESPQSLLGGPPVTKAEPVSLPCTNARAGDAPVGAQASAAPTSVDGAPTSLGSPGLPAVSEQFKAQFPFGGLLDSMQTSETSKLQQLVENIDKKMTDPNQCVICHRVLSCQSALKMHYRTHTGERPFKCKICGRAFTTKGNLKTHFGVHRAKPPLRVQHSCPICQKKFTNAVVLQQHIRMHMGGQIPNTPLPEGFQDAMDSELAYDDKNAETLSSYDDDMDENSMEDDAELKDAATDPAKPLLSYAGSCPPSPPSVISSIAALENQMKMIDSVMSCQQLTGLKSVENGSGESDRLSNDSSSAVGDLESRSAGSPALSESSSSQALSPAPSNGESFRSKSPGLGAPEEPQEIPLKTERPDSPAAAPGSGGAPGRAGIKEEAPFSLLFLSRERGKCPSTVCGVCGKPFACKSALEIHYRSHTKERPFVCALCRRGCSTMGNLKQHLLTHRLKELPSQLFDPNFALGPSQSTPSLISSAAPTMIKMEVNGHGKAMALGEGPPLPAGVQVPAGPQTVMGPGLAPMLAPPPRRTPKQHNCQSCGKTFSSASALQIHERTHTGEKPFGCTICGRAFTTKGNLKVHMGTHMWNNAPARRGRRLSVENPMALLGGDALKFSEMFQKDLAARAMNVDPSFWNQYAAAITNGLAMKNNEISVIQNGGIPQLPVSLGGSALPPLGSMASGMDKARTGSSPPIVSLDKASSETAASRPFTRFIEDNKEIGIN

SEQ ID NO: 67127 - protein, 38 aa, Homo sapiens
  MOD_RES (1)..(1): Any amino acid
XFSALCLQISRHLHLNIFKTACHQAPEQGLAVAQAGVQ

SEQ ID NO: 67128 - protein, 92 aa, Homo sapiens
MDPPDLLSVELSTSRPPQHLGGVKKPTYDPVSEDQDPLSSDFKRLGLRKPGLPRGLWLAKPSARVPGTKASRGSGAEVTLIDFGEEPVVPAL

SEQ ID NO: 67129 - protein, 20 aa, Homo sapiens
MWQLWASLCCLLVLANARSR

SEQ ID NO: 67130 - protein, 243 aa, Homo sapiens
MNHEWVGNDWLPSLGLPQYRSYFMESLVDARMLDHLNKKELRGQLKMVDSFHRVSLHYGIMCLKRLNYDRKDLERRREESQTQIRDVMVWSNERVMGWVSGLGLKEFATNLTESGVHGALLALDETFDYSDLALLLQIPTQNAQARQLLEKEFSNLISLGTDRRLDEDSAKSFSRSPSWRKMFREKDLRGVTPDSAEMLPPNFRSAAAGALGSPGLPLRKLQPEGQTSGSSRADGVSVRTYSC

SEQ ID NO: 67131 - protein, 113 aa, Homo sapiens
MAAVPPGLEPWNRVRIPKAGNRSAVTVQNPGAALDLCIAAVIKECHLVILSLKSQTLDAETDVLCAVLYSNHNRMGRHKPHLALKQVEQCLKRLKNMNLEGSIQDLFELFSSK

SEQ ID NO: 67132 - protein, 136 aa, Homo sapiens
MAFTFAAFCYMLALLLTAALIFFAIWHIIAFDELKTDYKNPIDQCNTLNPLVLPEYLIHAFFCVMFLCAAEWLTLGLNMPLLAYHIWRYMSRPVMSGPGLYDPTTIMNADILAYCQKEGWCKLAFYLLAFFYYLYG

SEQ ID NO: 67133 - protein, 299 aa, Homo sapiens
MITFLPIIFSILVVVTFVIGNFANGFIALVNSTEWVKRQKISFADQIVTALAVSRVGLLWVLLLNWYSTVLNPAFYSVELRTTAYNIWAVTGHFSNWPATSLSIFYLLKIANFSNLIFLRLKRRVKSVILVVLLGPLLFLACHLFVVNMNQIVWTKEYEGNMTWKIKLRRAMYLSDTTVTMLANLVPFTVTLISFLLLVCSLCKHLKKMQLHGKGSQDPSTKVHIKVLQTVISFFLLRAIYFVSVIISVWSFKNLENKPVFMFCQAIGFSCSSAHPFILIWGNKKLKQTYLSVLWQMRY

SEQ ID NO: 67134 - protein, 43 aa, Homo sapiens
MKDRLEQLKAKQLTQDDDTDAVEIAIDNTAFMDEFFSEKPRMT

SEQ ID NO: 67135 - protein, 169 aa, Homo sapiens
MLCLLLTLGVALVCGVPAMDIPQTKQDLELPKLAGTWHSMAMATNNISLMATLKAPLRVHITSLLPTPEDNLEIVLHRWENNSCVEKKVLGEKTENPKKFKINYTVANEATLLDTDYDNFLFLCLQDTTTPIQSMMCQYLESWWRTMRSCRDSSGLSGPCPGTYGTCWT

SEQ ID NO: 67136 - protein, 30 aa, Homo sapiens
MKKKLVVLGLLAVVLVLVIVGLCLWLPSAS

SEQ ID NO: 67137 - protein, 508 aa, Homo sapiens
MWETMRNLASIGKKWKDQNIKDHYKHRGRNLRSHMLERLYQTKDGSQRGGIFSQFANQNLSKKIPGVKLCESIVYGEVSMGQSSLNRHIKDHSGHEPKEYQEYGEKPDTRNQCWKPFSSHHSFRTHEIIHTGEKLYDCKECGKTFFSLKRIRRHIITHSGYTPYKCKVCGKAFDYPSRFRTHERSHTGEKPYECQECGKAFTCITSVRRHMIKHTGDGPYKCKVCGKPFHSLSSFQVHERIHTGEKPFKCKQCGKAFSCSPTLRIHERTHTGEKPYECKQCGKAFSYLPSLRLHERIHTGEKPFVCKQCGKAFRSASTFQIHERTHTGEKPYECKECGEAFSCIPSMRRHMIKHTGEGPYKCKVCGKPFHSLSPFRIHERTHTGEKPYVCKHCGKAFVSSTSIRIHERTHTGEKPYECKQCGKAFSYLNSFRTHEMIHTGEKPFECKRCGKAFRSSSSFRLHERTHTGQKPYHCKECGKAYSCRASFQRHMLTHAEDGPPYKCMWESL

SEQ ID NO: 67138 - protein, 157 aa, Homo sapiens
MTSGSVFFYILIFGKYFSHGGGQDVKCSLGYFPCGNITKCLPQLLHCNGVDDCGNQADEDNCGDNNGWSLQFDKYFASYYKMTSQYPFEAETPECLVGSVPVQCLCQGLELDCDETNLRAVPSVSSNVTAMSLQWNLIRKLPPDCFKNYHDLQKLTL

SEQ ID NO: 67139 - protein, 34 aa, Homo sapiens
MASGDTLYIATDGSEMPAEIVELHEIEVETIPVE

SEQ ID NO: 67140 - protein, 182 aa, Homo sapiens
  MOD_RES (1)..(1): Any amino acid
XRAAQLCGPDRLRVAGEVHRFRTSDVSQATLASVAPVFTVTKFDKQGNVTSFERKKTELYQELETDIKIFKESILEILDEEELLEELCVSKWSDPQVFEKSSAGIDHAEEMELLLENYYRLADDLSNAARELRVLIDDSQSIIFINLDSHRNVMMRLNLQLTMGTFSLSLFGLMGVAFGMNL

SEQ ID NO: 67141 - protein, 221 aa, Homo sapiens
MTPLCPRPALCYHFLTSLLRSAMQNARGARQRAEAAVLSGPGPPLGRAAQHGIPRPLSSAGRLSQGCRGAKTPAISPSKRARPAEVGGMQLRFARLSEHATAPTRGSARAAGYDLYSAYDYTIPPMEKAVVKTDIQIALPSGCYGRVAPRSGLAAKHFIDVGAGVIDEDYRGNVGVVLFNFGKEKFEVKKGDRIAQLICERIFYPEIEEVQALDDTERGSG

SEQ ID NO: 67142 - protein, 211 aa, Homo sapiens
MVDYYEVLGVQRHASPEDIKKAYRKLALKWHPDKNPENKEEAERKFKQVAEAYEVLSDAKKRDIYDKYGKEGLNGGGGGGSHFDSPFEFGFTFRNPDDVFREFFGGRDPFSFDFFGVADDDALAEERMRRGQNALPAQPAGLRPPKPPRPASLLRHAPHCLSEEEGEQDRPRAPGPWDPLASAAGLKEGGKRKKQKQREESKKKKSTKGNH

SEQ ID NO: 67143 - protein, 227 aa, Homo sapiens
MHRLMGVNSTAAAAAGQPNVSCTCNCKRSLFQSMEISCHGFPVCKSHQHQEWKSLCWSLRSPGGASSITGFGSMKVTNPAMNLPECQWLRIQKAELEFVQIIIIVVVMMVMVVVITCLLSHYKLSARSFISRHSQGRRREDALSSEGCLWPSESTVSGNGIPEPQVYAPPRPTDRLAVPPFAQRERFHRFQPTYPYLQHEIDLPPTISLSDGEEPPPYQGPCTLQLR

SEQ ID NO: 67144 - protein, 4762 aa, Homo sapiens
MSSEEDKSVEQPQPPPPPPEEPGAPAPSPAAADKRPRGRPRKDGASPFQRARKKPRSRGKTAVEDEDSMDGLETTETETIVETEIKEQSAEEDAEAEVDNSKQLIPTLQRSVSEESANSLVSVGVEAKISEQLCAFCYCGEKSSLGQGDLKQFRITPGFILPWRNQPSNKKDIDDNSNGTYEKMQNSAPRKQRGQRKERSPQQNIVSCVSVSTQTASDDQAGKLWDELSLVGLPDAIDIQALFDSTGTCWAHHRCVEWSLGVCQMEEPLLVNVDKAVVSGSTERCAFCKHLGATIKCCEEKCTQMYHYPCAAGAGTFQDFSHIFLLCPEHIDQAPERSKEDANCAVCDSPGDLLDQFFCTTCGQHYHGMCLDIAVTPLKRAGWQCPECKVCQNCKQSGEDSKMLVCDTCDKGYHTFCLQPVMKSVPTNGWKCKNCRICIECGTRSSSQWHHNCLICDNCYQQQDNLCPFCGKCYHPELQKDMLHCNMCKRWVHLECDKPTDHELDTQLKEEYICMYCKHLGAEMDRLQPGEEVEIAELTTDYNNEMEVEGPEDQMVFSEQAANKDVNGQESTPGIVPDAVQVHTEEQQKSHPSESLDTDSLLIAVSSQHTVNTELEKQISNEVDSEDLKMSSEVKHICGEDQIEDKMEVTENIEVVTHQITVQQEQLQLLEEPETVVSREESRPPKLVMESVTLPLETLVSPHEESISLCPEEQLVIERLQGEKEQKENSELSTGLMDSEMTPTIEGCVKDVSYQGGKSIKLSSETESSFSSSADISKADVSSSPTPSSDLPSHDMLHNYPSALSSSAGNIMPTTYISVTPKIGMGKPAITKRKFSPGRPRSKQGRGSGFPGKRRPRGAGLSGRGGRGRSKLKSGIGAVVLPGVSTADISSNKDDEENSMHNTVVLFSSSDKFTLNQDMCVVCGSFGQGAEGRLLACSQCGQCYHPYCVSIKITKVVLSKGWRCLECTVCEACGKATDPGRLLLCDDCDISYHTYCLDPPLQTVPKGGWKCKWCVWCRHCGATSAGLRCEWQNNYTQCAPCASLSSCPVCYRNYREEDLILQCRQCDRWMHAVCQNLNTEEEVENVADIGFDCSMCRPYMPASNVPSSDCCESSLVAQIVTKVKELDPPKTYTQDGVCLTESGMTQLQSLTVTVPRRKRSKPKLKLKIINQNSVAVLQTPPDIQSEHSRDGEMDDSREGELMDCDGKSESSPEREAVDDETKGVEGTDGVKKRKRKPYRPGIGGFMVRQRSRTGQGKTKRSVIRKDSSGSISEQLPCRDDGWSEQLPDTLVDESVSVTESTEKIKKRYRKRKNKLEETFPAYLQEAFFGKDLLDTSRQSKISLDNLSEDGAQLLYKTNMNTGFLDPSLDPLLSSSSAPTKSGTHDIGPVTDDPSSLPQPNVNQSSRPLSEEQLDGILSPELDKMVTDGAILGKLYKIPELGGKDVEDLFTAVLSPANTQPTPLPQPPPPTQLLPIHNQDAFSRMPLMNGLIGSSPHLPHNSLPPGSGLGTFSAIAQSSYPDARDKNSAFNPMASDPNNSWTSSAPTVEGENDTMSNAQRSTLKWEKEEALGEMATVAPVLYTNINFPNLKEEFPDWTTRVKQIAKLWRKASSQERAPYVQKARDNRAALRINKVQMSNDSMKRQQQQDSIDPSSRIDSELFKDPLKQRESEHEQEWKFRQQMRQKSKQQAKIEATQKLEQVKNEQQQQQQQQFGSQHLLVQSGSDTPSSGIQSPLTPQPGNGNMSPAQSFHKELFTKQPPSTPTSTSSDDVFVKPQAPPPPPAPSRIPIQDSLSQAQTSQPPSPQVFSPGSSNSRPPSPMDPYAKMVGTPRPPPVGHSFSRRNSAAPVENCTPLSSVSRPLQMNETTANRPSPVRDLCSSSTTNNDPYAKPPDTPRPVMTDQFPKSLGLSRSPVVSEQTAKGPIAAGTSDHFTKPSPRADVFQRQRIPDSYARPLLTPAPLDSGPGPFKTPMQPPPSSQDPYGSVSQASRRLSVDPYERPALTPRPIDNFSHNQSNDPYSQPPLTPHPAVNESFAHPSRAFSQPGTISRPTSQDPYSQPPGTPRPVVDSYSQSSGTARSNTDPYSQPPGTPRPTTVDPYSQQPQTPRPSTQTDLFVTPVTNQRHSDPYAHPPGTPRPGISVPYSQPPATPRPRISEGFTRSSMTRPVLMPNQDPFLQAAQNRGPALPGPLVRPPDTCSQTPRPPGPGLSDTFSRVSPSAARDPYDQSPMTPRSQSDSFGTSQTAHDVADQPRPGSEGSFCASSNSPMHSQGQQFSGVSQLPGPVPTSGVTDTQNTVNMAQADTEKLRQRQKLREIILQQQQQKKIAGRQEKGSQDSPAVPHPGPLQHWQPENVNQAFTRPPPPYPGNIRSPVAPPLGPRYAVFPKDQRGPYPPDVASMGMRPHGFRFGFPGGSHGTMPSQERFLVPPQQIQGSGVSPQLRRSVSVDMPRPLNNSQMNNPVGLPQHFSPQSLPVQQHNILGQAYIELRHRAPDGRQRLPFSAPPGSVVEASSNLRHGNFIPRPDFPGPRHTDPMRRPPQGLPNQLPVHPDLEQVPPSQQEQGHSVHSSSMVMRTLNHPLGGEFSEAPLSTSVPSETTSDNLQITTQPSDGLEEKLDSDDPSVKELDVKDLEGVEVKDLDDEDLENLNLDTEDGKVVELDTLDNLETNDPNLDDLLRSGEFDIIAYTDPELDMGDKKSMFNEELDLPIDDKLDNQCVSVEPKKKEQENKTLVLSDKHSPQKKSTVTNEVKTEVLSPNSKVESKCETEKNDENKDNVDTPCSQASAHSDLNDGEKTSLHPCDPDLFEKRTNRETAGPSANVIQASTQLPAQDVINSCGITGSTPVLSSLLANEKSDNSDIRPSGSPPPPTLPASPSNHVSSLPPFIAPPGRVLDNAMNSNVTVVSRVNHVFSQGVQVNPGLIPGQSTVNHSLGTGKPATQTGPQTSQSGTSSMSGPQQLMIPQTLAQQNRERPLLLEEQPLLLQDLLDQERQEQQQQRQMQAMIRQRSEPFFPNIDFDAITDPIMKAKMVALKGINKVMAQNNLGMPPMVMSRFPFMGQVVTGTQNSEGQNLGPQAIPQDGSITHQISRPNPPNFGPGFVNDSQRKQYEEWLQETQQLLQMQQKYLEEQIGAHRKSKKALSAKQRTAKKAGREFPEEDAEQLKHVTEQQSMVQKQLEQIRKQQKEHAELIEDYRIKQQQQCAMAPPTMMPSVQPQPPLIPGATPPTMSQPTFPMVPQQLQHQQHTTVISGHTSPVRMPSLPGWQPNSAPAHLPLNPPRIQPPIAQLPIKTCTPAPGTVSNANPQSGPPPRVEFDDNNPFSESFQERERKERLREQQERQRIQLMQEVDRQRALQQRMEMEQHGMVGSEISSSRTSVSQIPFYSSDLPCDFMQPLGPLQQSPQHQQQMGQVLQQQNIQQGSINSPSTQTFMQTNERRQVGPPSFVPDSPSIPVGSPNFSSVKQGHGNLSGTSFQQSPVRPSFTPALPAAPPVANSSLPCGQDSTITHGHSYPGSTQSLIQLYSDIIPEEKGKKKRTRKKKRDDDAESTKAPSTPHSDITAPPTPGISETTSTPAVSTPSELPQQADQESVEPVGPSTPNMAAGQLCTELENKLPNSDFSQATPNQQTYANSEVDKLSMETPAKTEEIKLEKAETESCPGQEEPKLEEQNGSKVEGNAVACPVSSAQSPPHSAGAPAAKGDSGNELLKHLLKNKKSSSLLNQKPEGSICSEDDCTKDNKLVEKQNPAEGLQNNLSNPPTPPASLPPTPPPMACQKMANGFATTEELAGKAGVLVSHEVTKTLGPKPFQLPFRPQDDLLARALAQGPKTVDVPASLPTPPHNNQEELRIQDHCGDRDTPDSFVPSSSPESVVGVEVSRYPDLSLVKEEPPEPVPSPIIPILPSTAGKSSESRRNDIKTEPGTLYFASPFGPSPNGPRSGLISVAITLHPTAAENISSVVAAFSDLLHVRIPNSYEVSSAPDVPSMGLVSSHRINPGLEYRQHLLLRGPPPGSANPPRLVSSYRLKQPNVPFPPTSNGLSGYKDSSHGIAESAALRPQWCCHCKVVILGSGVRKSFKDLTLLNKDSRESTKRVEKDIVFCSNNCFILYSSTAQAKNSENKESIPSLPQSPMRETPSKAFHQYSNNISTLDVHCLPQLPEKASPPASPPIAFPPAFEAAQVEAKPDELKVTVKLKPRLRAVHGGFEDCRPLNKKWRGMKWKKWSIHIVIPKGTFKPPCEDEIDEFLKKLGTSLKPDPVPKDYRKCCFCHEEGDGLTDGPARLLNLDLDLWVHLNCALWSTEVYETQAGALINVELALRRGLQMKCVFCHKTGATSGCHRFRCTNIYHFTCAIKAQCMFFKDKTMLCPMHKPKGIHEQELSYFAVFRRVYVQRDEVRQIASIVQRGERDHTFRVGSLIFHTIGQLLPQQMQAFHSPKALFPVGYEASRLYWSTRYANRRCRYLCSIEEKDGRPVFVIRIVEQGHEDLVLSDISPKGVWDKILEPVACVRKKSEMLQLFPAYLKGEDLFGLTVSAVARIAESLPGVEACENYTFRYGRNPLMELPLAVNPTGCARSEPKMSAHVKRPHTLNSTSTSKSFQSTVTGELNAPYSKQFVHSKSSQYRKMKTEWKSNVYLARSRIQGLGLYAARDIEKHTMVIEYIGTIIRNEVANRKEKLYESQNRGVYMFRMDNDHVIDATLTGGPARYINHSCAPNCVAEVVTFERGHKIIISSSRRIQKGEELCYDYKFDFEDDQHKIPCHCGAVNCRKWMN

SEQ ID NO: 67145 - protein, 97 aa, Homo sapiens
MNMSQASVSFQDVTVEFTREEWQHLGPVERTLYRDVMLENYSHLISVGYCITKPKVISKLEKGEEPWSLEDEFLNQRYPGYFKVDHIKGIREKQEKP

SEQ ID NO: 67146 - protein, 119 aa, Homo sapiens
MLPGLAAAAAHRCSWSSLCRLRLRCRAAACNPSDRQEWQNLVTFGSFSNMVPCSHPYIGTLSQVKLYSTNVQKEGQGSQTLRVEKVPSFETAEGIGTELKAPLKQEPLQVRAQERNNGK

SEQ ID NO: 67147 - protein, 435 aa, Homo sapiens
MPPMPSAPPVHPPPDGGWGWIVVGAAFISIGFSYAFPKAVTVFFKEIQQIFHTTYSEIAWISSIMLAVMYAGGPVSSVLVNKYGSRPVVIAGGLLCCLGMVLASFSSSVVQLYLTMGFITGLGLAFNLQPALTIIGKYFYRKRPMANGLAMAGSPVFLSSLAPFNQYLFNTFGWKGSFLILGSLLLNACVAGSLMRPLGPNQTTSKSKNKTGKTEDDSSPKKIKTKKSTWEKVNKYLDFSLFKHRGFLIYLSGNVIMFLGFFAPIIFLAPYAKDQGIDEYSAAFLLSVMAFVDMFARPSVGLIANSKYIRPRIQYFFSFAIMFNGVCHLLCPLAQDYTSLVLYAVFFGLGFGSVSSVLFETLMDLVGAPRFSSAVGLVTIVECGPVLLGPPLAGKLVDLTGEYKYMYMSCGAIVVAASVWLLIGNAINYRLLAKE

SEQ ID NO: 67148 - protein, 96 aa, Homo sapiens
MTPGTQSPFFLLLLLTVLTVVTGSGHASSTPGGEKETSATQRSSVPSSTEKNAFNSSLEDPSTDYYQELQRDISEMFLQIYKQGGFLGLSNIKFSE

SEQ ID NO: 67149 - protein, 234 aa, Homo sapiens
MAEGGSPDGRAGPGSAGRNLKEWLREQFCDHPLEHCEDTRLHDAAYVGDLQTLRSLLQEESYRRYGADVDVNHHLTPDVQPRFSRRLTSLVVCPLYISAAYHNLQCFRLLLLAGANPDFNCNGPVNTQGFYRGSPGCVMDAVLRHGCEAAFVSLLVEFGANLNLVKWESLGPESRGRRKVDPEALQVFKEARSVPRTLLCLCRVAVRRALGKHRLHLIPSLPLPDPIKKFLLHE

SEQ ID NO: 67150 - protein, 533 aa, Homo sapiens
MGSGARFPSGTLRVRWLLLLGLVGPVLGAARPGFQQTSHLSSYEIITPWRLTRERREAPRPYSKQVSYVIQAEGKEHIIHLERNKDLLPEDFVVYTYNKEGTLITDHPNIQNHCHYRGYVEGVHNSSIALSDCFGLRGLLHLENASYGIEPLQNSSHFEHIIYRMDDVYKEPLKCGVSNKDIEKETAKDEEEEPPSMTQLLRRRRAVLPQTRYVELFIVVDKERYDMMGRNQTAVREEMILLANYLDSMYIMLNIRIVLVGLEIWTNGNLINIVGGAGDVLGNFVQWREKFLITRRRHDSAQLVLKKGFGGTAGMAFVGTVCSRSHAGGINVFGQITVETFASIVAHELGHNLGMNHDDGRDCSCGAKSCIMNSGASGSRNFSSCSAEDFEKLTLNKGGNCLLNIPKPDEAYSAPSCGNKLVDAGEECDCGTPKECELDPCCEGSTCKLKSFAECAYGDCCKDCRFLPGGTLCRGKTSECDVPEYCNGSSQFCQPDVFIQNGYPCQNNKAYCYNGMCQYYDAQCQVIFGSSCH

SEQ ID NO: 67151 - protein, 318 aa, Homo sapiens
CRDSTLCPAYATCTNTVDSYYCACKQGFLSSNGQNHFKDPGVRCKDIDECSQSPQPCGPNSSCKNLSGRYKCSCLDGFSSPTGNDWVPGKPGNFSCTDINECLTSSVCPEHSDCVNSMGSYSCSCQVGFISRNSTCEDVDECADPRACPEHATCNNTVGNYSCFCNPGFESSSGHLSFQGLKASCEDIDECTEMCPINSTCTNTPGSYFCTCHPGFAPSNGQLNFTDQGVECRGVLFKCKEDVIPDNKQIQQCQEGTAVKPAYVSFCAQINNIFSVLDKVCENKTTVVSLKNTTESFVPVLKQISTWTKFTKEETSSL

SEQ ID NO: 67152 - protein, 73 aa, Homo sapiens
MERPLENGDESPDSQGHATDWRFAVCSFRDAWEEEEPASQMHVKDPGPPRPPAGATQDEELQGSPLSRKFQLP

SEQ ID NO: 67153 - protein, 127 aa, Homo sapiens
MRTEAEAAGPPLEPGDFVQLPVPVIQQLYHWDCGLACSRMVLRYLGQLDDSEFERALQKLQLTRSIWTIDLAYLMHHFGVRHRFCTQTLGVDKGYKNQSFYRKHFDTEETRVNQLFAQAKACKVLVE

SEQ ID NO: 67154 - protein, 166 aa, Homo sapiens
  MOD_RES (1)..(1): Any amino acid
XIKNPLGTRDNPARICKDLLNCEQKVSDGKYWIDPNLGCPSDAIEVFCNFSAGGQTCLPPVSVTKAFTIITPEIEEGRILPFLGNHEPLIKSSMIVLLPKYPHHHPHSSGSWHRIIIEGKKMGLCELCRGNRSSGEADSSCFHDQITSLISLIHKLNPRKTREVLG

SEQ ID NO: 67155 - protein, 115 aa, Homo sapiens
  MOD_RES (1)..(1): Any amino acid
XGLPGPTGPPGDPGRNGLPGFDGAGGRKGDPGLPGQPGTRGLDGPPGPDGLQGPPGPPGTSSVAHGFLITRHSQTTDAPQCPQGTLQVYEGFSLLYVQGNKRAHGQDLVNLSQKR

SEQ ID NO: 67156 - protein, 217 aa, Homo sapiens
MTSRKKVLLKVIILGDSGVGKTSLMNQYVNKKFSNQYKATIGADFLTKEVMVDDRLVTMQIWDTAGQERFQSLGVAFYRGADCCVLVFDVTAPNTFKTLDSWRDEFLIQASPRDPENFPFVVLGNKIDLENRQVATKRAQAWCYSKNNIPYFETSAKEAINVEQAFQTIARNALKQCHGFPWSGCVEASPNDRSVWPGWRSIQRWMLSAEAFGPELL

SEQ ID NO: 67157 - protein, 201 aa, Homo sapiens [sequence omitted]

SEQ ID NO: 67158 - protein, 94 aa, Homo sapiens
  MOD_RES (1)..(1): Any amino acid
XAPSQTCFVTSFEWCSKRQLVDLVMEGVWQELLDSAQIEICVADWWGARENCGCVYQLRVRLLDVYEKEVVKFSASPDPVLQWTERGCRQVGPD

SEQ ID NO: 67159 - protein, 100 aa, Homo sapiens
  MOD_RES (1)..(1): Any amino acid
XRSRSLGPGAGPRGCREEPGPLRRREAAAEARKSHSPVKRPRKAQRLRVAYEGSDSEKGTQVPGAAVTDALQPNQRPGDGGRHAATAGAGPDGGQHPADR

SEQ ID NO: 67160 - protein, 84 aa, Homo sapiens
MNCRSEVLEVSVEGRQVEEAMLAVLHTVLLHRSTGKFHYKKEGTYSIGTVGTQDVDCDFIDFTYVRVSSEELDRALRKVVGEFK

SEQ ID NO: 67161 - protein, 50 aa, Homo sapiens
MSEREERRFVEIPRESVRLMAESTGLELSDEVAALLAEDVCYRLREATQN

SEQ ID NO: 67162 - protein, 101 aa, Homo sapiens
MTAVHAGNINFKWDPKSLEIRTLAVERLLEPLVTQVTTLVNTNSKGPSNKKRGRSKKAHVLAASVEQATENFLEKGDKIAKESQFLKEELVAAVEDVRKQG

SEQ ID NO: 67163 - protein, 86 aa, Homo sapiens; identical to SEQ ID NO: 56815

SEQ ID NO: 67164 - protein, 1161 aa, Homo sapiens
  MOD_RES (1)..(1): Any amino acid
XSSNIHANHLSLDASSSSSSSSSSSSSSSSSSSSSSVHEPKMDALIIPVTMEVPCDSRGQRMWWAFLASSMVTFFGGLFIILLWRTLKYLWTVCCHCGGKTKEAQKINNGSSQADGTLKPVDEKEEAVAAEVGWMTSVKDWAGVMISAQTLTGRVLVVLVFALSIGALVIYFIDSSNPIESCQNFYKDFTLQIDMAFNVFFLLYFGLRFIAANDKLWFWLEVNSVVDFFTVPPVFVSVYLNRSWLGLRFLRALRLIQFSEILQFLNILKTSNSIKLVNLLSIFISTWLTAAGFIHLVENSGDPWENFQNNQALTYWECVYLLMVTMSTVGYGDVYAKTTLGRLFMVFFILGGLAMFASYVPEIIELIGNRKKYGGSYSAVSGRKHIVVCGHITLESVSNFLKDFLHKDRDDVNVEIVFLHNISPNLELEALFKRHFTQVEFYQGSVLNPHDLARVKIESADACLILANKYCADPDAEDASNIMRVISIKNYHPKIRIITQMLQYHNKAHLLNIPSWNWKEGDDAICLAELKLGFIAQSCLAQGLSTMLANLFSMRSFIKIEEDTWQKYYLEGVSNEMYTEYLSSAFVGLSFPTVCELCFVKLKLLMIAIEYKSANRESRILINPGNHLKIQEGTLGFFIASDAKEVKRAFFYCKACHDDITDPKRIKKCGCKRLIYFKVAARSRYSKDPFEFKKETPNSRLVTEPVEDEQPSTLSPKKKQRNGGMRNSPNTSPKLMRHDPLLIPGNDQIDNMDSNVKKYDSTGMFHWCAPKEIEKVILTRSEAAMTVLSGHVVVCIFGDVSSALIGLRNLVMPLRASNFHYHELKHIVFVGSIEYLKREWETLHNFPKVSILPGTPLSRADLRAVNINLCDMCVILSANQNNIDDTSLQDKECILASLNIKSMQFDDSIGVLQANSQGFTPPGMDRSSPDNSPVHGMLRQPSITTGVNIPIITELVNDTNVQFLDQDDDDDPDTELYLTQPFACGTAFAVSVLDSLMSATYFNDNILTLIRTLVTGGATPELEALIAEENALRGGYSTPQTLANRDRCRVAQLALLDGPFADLGDGGCYGDLFCKALKTYNMLCFGIYRLRDAHLSTPSQCTKRYVITNPPYEFELVPTDLIFCLMQFDHNAGQSRASLSHSSHSSQSSSKKSSSVHSIPS

SEQ ID NO: 67165 - protein, 67 aa, Homo sapiens
MAASLDLTLAVPICNSLAIIFTLIVGKALGEDIGGKRAVAGMVLTVIGISLCITSSVSKTQGQQSTL

SEQ ID NO: 67166 - protein, 124 aa, Homo sapiens
MVGALCGCWFRLGGARPLIPLGPTVVQTSMSRSQVALLGLSLLLMLLLYVGLPGPPEQTSCLWGDPNVTVLAGLTPGNSPIFYREVLPLNQAHRLQPLSCMESWTTSWLESHCGSSATCPTTLW

SEQ ID NO: 67167 - protein, 145 aa, Homo sapiens
MGGSHSQTPRGREPAGERHPRPTETATTEQVKFLCFLLSGCKVKKHETQSLALDACSRDEGAVISQISDISNRDGHATDEEKLASTSCGQKSAGAEVKGEPEEDLEYFECSNVPVSTINHAFSSSEAGIEKETCQKMEEDGSTVL

SEQ ID NO: 67168 - protein, 248 aa, Homo sapiens
MMMMALSKTFGQKPVKFQLEDDGEFYMIGSEVGNYLRMFRGSLYKRYPSLWRRLATVEERKKIVASSHGKKTKPNTKDHGYTTLATSVTLLKASEVEEILDGNDEKYKAVSISTEPPTYLREQKAKRNSQWVPTLPNSSHHLDAVPCSTTINRNRMGRDKKRTFPLWCGCIAALTLRADSALVLHFDDHDPAVIHENASQPEVLVPIRLDMEIDGQKLRDAFTWNMNEKLMTPEMFSEILCDDLDLNP

SEQ ID NO: 67169 - protein, 21 aa, Homo sapiens
MRDSAEGPKEDEEKPSASALE

SEQ ID NO: 67170 - protein, 85 aa, Homo sapiens
MSDKSDLKAELERKKQRLAQIREEKKRKEEERKKKEADMQQKKEPVQDDSDLDRKRRETEALLQSIGISPEPPLVPTPMSPSSKS

SEQ ID NO: 67171 - protein, 1137 aa, Homo sapiens
MLFPLQVAAVTSSVRDDPLEHCVSPRTRARSPEICKMADNLDEFIEEQKARLAEDKAELESDPPYMEMKGKLSAKLSENSKILISMAKENIPPNSQQTRGSLGIDYGLSLPLGEDYERKKHKLKEELRQDYRRYLTQERLKLERNKEYNQFLRGKEESSEKFRQVEKSTEPKSQRNKKPIGQVKPDLTSQIQTSCENSEGPRKDVLTPSEAYEELLNQRRLEEDRYRQLDDEIELRNRRIIKKANEEVGISNLKHQRFASKAGIPDRRFHRFNEDRVFDRRYHRPDQDPEVSEEMDERFRYESDFDRRLSRVYTNDSAPDNETSKSANQDTCSPFAGMLFGGEDRELIQRRKEKYRLELLEQMAEQQRNKRREKDLELRVAASGAQDPEKSPDRLKQFSVAPRHFEEMIPPERPRIAFQTPLPPLSAPSVPPIPSVHPVPSQNEDLRSGLSSALGEMVSPRIAPLPPPPLLPPLATNYRTPYDDAYYFYGSRNTFDPSLAYYGSGMMGVQPAAYVSAPVTHQLAQPVVNTVGQNELKITSDQVINSGLIFEDKPKPSKQSLQSYQEALQQQIREREERRKKEREEKEEYEAKLEAEMRTYNPWGKGGGGAPLRDAKGNLISHMQTQSSPFARGNVFGEPPTELQIKQQELYKNFLRFQIEEKKQREEAERERLRIAEEKEERRLAEQRARIQQEYEEEQEKKREKEEEQRLKNEEHIRLAEERQKEAERKKKEEEEKYNLQLQHYCERDNLIGEETKHMRQPSPIVPALQNKIASKLQRPPSVDSIIRSFIHESSMSRAQSPPVPARKNQLRAEEEKKNVIMELSEMRKQLRSEERRLQERLLHMDSDDEIPIRKKERNPMDIFDMARHRLQAPVRRQSPKGLDAATFQNVHDFNELKDRDSETRVDLKFMYLDPPRDHHTLEIQQQALLREQQKRLNRIKMQEGAKVDLDAIPSAKVREQRMPRDDTSDFLKNSLLESDSAFIGAYGETYPAIEDDVLPPPSQLPSARERRRNKWKGLDIDSSRPNVAPDGLSLKSISSVNVDELRVRNEERMRRLNEFHNKPINTDDESSLVDPDDIMKHIGDDGSNSVATEPWLRPGTSETLKRFMAEQLNQEQQQIPGKPGTFTWQGLSTAHG

SEQ ID NO: 67172 - protein, 954 aa, Homo sapiens
MPSLPAPPAPLLLLGLLLLGSRPARGAGPEPPVLPIRSEKEPLPVRGAAGCTFGGKVYALDETWHPDLGEPFGVMRCVLCACEAPQWGRRTRGPGRVSCKNIKPECPTPACGQPRQLPGHCCQTCPQERSSSERQPSGLSFEYPRDPEHRSYSDRGEPGAEERARGDGHTDFVALLTGPRSQAVARARVSLLRSSLRFSISYRRLDRPTRIRFSDSNGSVLFEHPAAPTQDGLVCGVWRAVPRLSLRLLRAEQLHVALVTLTHPSGEVWGPLIRHRALAAETFSAILTLEGPPQQGVGGITLLTLSDTEDSLHFLLLFRGLLEPRSGGLTQVPLRLQILHQGQLLRELQANVSAQEPGFAEVLPNLTVQEMDWLVLGELQMALEWAGRPGLRISGHIAARKSCDVLQSVLCGADALIPVQTGAAGSASLTLLGNGSLIYQVQVVGTSSEVVAMTLETKPQRRDQRTVLCHMAGLQPGGHTAVGICPGLGARGAHMLLQNELFLNVGTKDFPDGELRGHVAALPYCGHSARHDTLPVPLAGALVLPPVKSQAAGHAWLSLDTHCHLHYEVLLAGLGGSEQGTVTAHLLGPPGTPGPRRLLKGFYGSEAQGVVKDLEPELLRHLAKGMASLMITTKGSPRGELRGQVHIANQCEVGGLRLEAAGAEGVRALGAPDTASAAPPVVPGLPALAPAKPGGPGRPRDPNTCFFEGQQRPHGARWAPNYDPLCSLCTCQRRTVICDPVVCPPPSCPHPVQAPDQCCPVCPEKQDVRDLPGLPRSRDPGEGCYFDGDRSWRAAGTRWHPVVPPFGLIKCAVCTCKGGTGEVHCEKVQCPRLACAQPVRVNPTDCCKQCPVGSGAHPQLGDPMQADGPRGCRFAGQWFPESQSWHPSVPPFGEMSCITCRCGAGVPHCERDDCSLPLSCGSGKESRCCSRCTAHRRPPETRTDPELEKEAEGS

SEQ ID NO: 67173 - protein, 34 aa, Homo sapiens
MKENYCLQAALVCLGMLCHSHAFAPERRGHLRPS

SEQ ID NO: 67174 - protein, 57 aa, Homo sapiens
MWIIRKRIQLPSEKAIFLFVDKTVPQSSLTMGQLYEKEKDEDGFLYVAYSGENTFGF

SEQ ID NO: 67175 - protein, 108 aa, Homo sapiens
MKLNERSVAHYALSDSPADHMGFLRTWGGPGTPPTPSGTGRRCWFVLKGNLLFSFESREGRAPLSLVVLEGCTVELAEAPVPEEFAFAICFDAPGVRPHLLAAEGPAA

SEQ ID NO: 67176 - protein, 175 aa, Homo sapiens; identical to SEQ ID NO: 45445

SEQ ID NO: 67177 - protein, 147 aa, Homo sapiens
MERNHFGEELFDFNQCEKALSEHSCLKTHRRTYFRKKTCECNQCEKAFRKPSIFTLHKKTDIGEELPNCNQCETAFSQHLHLVCKKTSQNLHLVCKKTHTQEKPYKCSDCEKGLPSSSHLRECVRIYGGERPYTHKEYVETFSHSTA

SEQ ID NO: 67178 - protein, 147 aa, Homo sapiens
MMSNSSSEIDVQEPNIVSDASCNTEEQLKTVDDVLIHCQVIYDALQNLDKKIDVIRRKVSKIQRFHARSLWTNHKRYGYKKHSYRLVKKLKLQKMKKNEVYETFSYPESYSPTLPVSRRENNSPSNLPRPSFCMEEYQRAELEEDPI

SEQ ID NO: 67179 - protein, 65 aa, Homo sapiens
MLRVLCLLRPWRPLRARGCASDGAAGGSEIQVRALAGPDQGKCAVPGRRMTRLGLGRRQRGTGRL

SEQ ID NO: 67180 - protein, 53 aa, Homo sapiens
MEPGSDDFLPPPECPVFEPSWAEFRDPLGYIAKIRPIAEKSGICKIRPPAAGV

SEQ ID NO: 67181 - protein, 48 aa, Homo sapiens
MPMYQVKPYHGGGAPLRVELPTCMYRLPNVHGRSYGPAPGAGHVQPLQ

SEQ ID NO: 67182 - protein, 54 aa, Homo sapiens
  MOD_RES (1)..(1): Any amino acid
XQYIEFVADRLMLELGFSKVLGDREVQSRWSPGPRGDSTPVREMETNHPPSVRG

SEQ ID NO: 67183 - protein, 67 aa, Homo sapiens
  MOD_RES (1)..(1): Any amino acid
XKLALDIEIATYRKLLEGEENRITIPVQTFSNLQIRGGKSTKDGENHKKPAWTPSLCQKATSRGTSW

SEQ ID NO: 67184 - protein, 19 aa, Homo sapiens
  MOD_RES (1)..(1): Any amino acid
XAKKVITMFVQRQPSDIFF

SEQ ID NO: 67185 - protein, 138 aa, Homo sapiens
MTQQPLRGVTSLRFNQDQSCFCCAMETGVRIYNVEPLMEKGHLVLIWDDAREGKDSKEKLVLEFTFTKPVLSVRMRHDKIVIVLKNRIYVYSFPDNPRKLFEFDTRDNPKAAHPTPHLHTLGLCDLCPSLEKQLLVFP

SEQ ID NO: 67186 - protein, 166 aa, Homo sapiens
  MOD_RES (1)..(1): Any amino acid
XAPTASQGLLKLFQKNSPMEDLGAKGAKEKMKEESWHIHFFEYGRGVCMYRTAKTRALVLKGIPESLRGELWLLFSGAWNEMVTHPGYYAELVEKSTGKYSLATEEIERDLHRSMPEHPAFQNELGIAALRRVLTAYAFRNPTIGYCQVCQVRWRRRTCWCKLGRS

SEQ ID NO: 67187 - protein, 60 aa, Homo sapiens
  MOD_RES (1)..(1): Any amino acid
XSSQISAGEEKWNSVSPASAGKRKTEPSAWSQDTGDANTNGKDWGRSWSDRSIFSGIGLR

SEQ ID NO: 67188 - protein, 246 aa, Homo sapiens
  MOD_RES (1)..(1): Any amino acid
XRTRPSARKPLSCFSRRPMPTREPPKTRGSRGHLHTHPPGPGPPLQGLAPRGLKTSAPRPPCQPQPGPHKAKTKKIVFEDELLSQALLGAKKPIGAIPKGHKPRPHPVPDYELKYPPVSSERERSRYVAVFQDQYGEFLELQHEVGCAQAKLRQLEALLSSLPPPQSQKEAQVAARVWREFEMKRMAGVQWYDLSSLQPQRPGFKRFSCLSWDHRRPPPCLANFCICSRDGVSPCWPGWSRTPDLK

SEQ ID NO: 67189 - protein, 95 aa, Homo sapiens
MPAPEQASLVEEGQPQTRQEAASTGPGMEPETTATTILASVKEQELQFQRLTRELEVERQIVASQLERCRLGAESPSIASTSILCYSWAKKLLSE

SEQ ID NO: 67190 - protein, 739 aa, Homo sapiens
MGIKVQRPRCFFDIAINNQPAGRVVFELFSDVCPKTCENFRCLCTGEKGTGKSTQKPLHYKSCLFHRVVKDFMVQGGDFSEDESFAVKHNKEFLLSMANRGKDTNGSQFFITTKPTPHLDGHHVVFGQVISGQEVVREIENQKTDAASKPFAEVRILSCGELIPKSKVKKEEKKRHKSSSSSSSSSSDSDSSSDSQSSSDSSDSESATEEKSKKRKKKHRKNSRKHKKEKKKRKKSKKSASSESEAENLEAQPQSTVRPEEIPPIPENRFLMRKSPPKADEKERKNRERERERECNPPNSQPASYQRRLLVTRSGRKIKGRGPRRYRTPSRSRSRDRFRRSETPPHWRQEMQRAQRMRVSSGERWIKGDKSELNEIKENQRSPVRVKERKITDHRNVSESPNRKNEKEKKVKDHKSNSKERDIRRNSEKDDKYKNKVKKRAKSKSRSKSKEKSKSKERDSKHNRNEEKRMRSRSKGRDHENVKEKEKQSDSKGKDQERSRSKEKSKQLESKSNEHDHSKSKEKDRRAQSRSRECDITKGKHSYNSRTRERSRSRDRSRRVRSRTHDRDRSRSKEYHRYREQEYRRRGRSRSRERRTPPGRSRSKDRRRRRRDSRSSEREESQSRNKDKYRNQESKSSHRKENSESEKRMYSKSRDHNSSNNSREKKADRDQSPFSKIKQSSQDNELKSSMLKNKEDEKIRSSVEKENQKSKGQENDHVHEKNKKFDHESSPGTDEDKSG

SEQ ID NO: 67191 - protein, 153 aa, Homo sapiens
MHYPIGLLFDLLASSSALPWNITVHFKSFPEKDLLHCPSKDAIEAHFMSCMKEADALKHKSQVINEMQKKDHKQLWMGLQNDRFDQFWAINRKLMEYPAEENGFRYIPFRIYQTTTERPFIQKLFRPVAADGQLHTLGDLLKEVCPSAIDPED

SEQ ID NO: 67192 - protein, 582 aa, Homo sapiens
LSNNKKLSENTQNTSLCSGTVVHGRRFHHAHAQIPVVKTAAQSSLDRKERKEYPPHVQKVEINPVRLSRLQGVERIMKKTEESESQVEPEIKRKVQQKRHCSTYQPTPPLSPASKKCLTHLEDLQRNCRQAITLNESTGPLLRTSIHQNSGGQKSQNTGLTTKKFYGNNVEKVPIDIIVNCDDSKHTYLQTNGKVILPGAKIPKITNLKERKTSLSDLNDPIILSSDDDDDNDRTNRRESISPQPADSACSSPAPSTGKVEAALNENTCRAERELRSIPEDSELNTVTLPRKARMKDQFGNSIINTPLKRRKVFSQEPPDALALSCQSSFDSVILNCRSIRVGTLFRLLIEPVIFCLDFIKIQLDEPDHDPVEIILNTSDLTKCEWCNVRKLPVVFLQAIPAVYQKLSIQLQMNKEDKVWNDCKGVNKLTNLEEQYIILIFQNGLDPPANMVFESIINEIGIKNNISNFFAKIPFEEANGRLVACTRTYEESIKGSCGQKENKIKTVSFESKIQLRSKQEFQFFDEEEETGENHTIFIGPVEKLIVYPPPPAKGGISVTNEDLHCLNEGEFLNDVIIDFYLK

SEQ ID NO: 67193 - protein, 1389 aa, Homo sapiens
  MOD_RES (1)..(1): Any amino acid
XGIFLGNNNQAMKATKESFCITSFLCSTKLTQNGDMLDLLKWRTHPDKITGCLSKLKEIDGSEIVKFLQDTLDTLFGILDENSQKYGSKVFDSLVHIINLLQDSKFHHFKPVMDTYIESHFAGALAYRDLIKVLKWYVDRITEAERQEHIQEVLKAQEYIFKYIVQSRRLFSLATGGQNEEEFRCCIQELLMSVRFFLSQESKGSGALSQSQAVFLSSFPAVYSELLKLFDVREVANLVQDTLGSLPTILHVDDSLQAIKLQCIGKTVESQLYTNPDSRYILLPVVLHHLHIHLQEQKDLIMCARILSNVFCLIKKNSSEKSVLEEIDVIVASLLDILLRTILEITSRPQPSSSAMRFQFQDVTGEFVACLLSLLRQMTDRHYQQLLDSFNTKEELRDFLLQIFTVFRILIRPEMFPKDWTVMRLVANNVIITTVLYLSDALRKNFLNENFDYKIWDSYFYLAVIFINQLCLQLEMFTPSKKKKVLEKYGDMRVTMGCEIFSMWQNLGEHKLHFIPALIGPFLEVTLIPQPDLRNVMIPIFHDMMDWEQRRSGNFKQVEAKLIDKLDSLMSEGKGDETYRELFNSIIPLFGPYPSLLKKIERETWRESGVSLIATVTRLMERLLDYRDCMKMGEVDGKKIGCTVSLLNFYKTELNKEEMYIRYIHKLYDLHLKAQNFTEAAYTLLLYDELLEWSDRPLREFLTYPMQTEWQRKEHLHLTIIQNFDRGKCWENGIILCRKIAEQYESYYDYRNLSKMRMMEASLYDKIMDQQRLEPEFFRVGFYGKKFPFFLRNKEFVCRGHDYERLEAFQQRMLNEFPHAIAMQHANQPDETIFQAEAQYLQIYAVTPIPESQEVLQREGVPDNIKSFYKVNHIWKFRYDRPFHKGTKDKENEFKSLWVERTSLYLVQSLPGISRWFEVEKREVVEMSPLENAIEVLENKNQQLKTLISQCQTRQMQNINPLTMCLNGVIDAAVNGGVSRYQEAFFVKEYILSHPEDGEKIARLRELMLEQAQILEFGLAVHEKFVPQDMRPLHKKLVDQFFVMKSSLGIQEFSACMQASPVHFPNGSPRVCRNSAPASVSPDGTRVIPRRSPLSYPAVNRYSSSSLSSQASAEVSNITGQSESSDEVFNMQPSPSTSSLSSTHSASPNVTSSAPSSARASPLLSDKHKHSRENSCLSPRERPCSAIYPTPVEPSQRMLFNHIGDGALPRSDPNLSAPEKASPARHTTSVSPSPAGRSPLKGSVQSFTPSPVEYHSPGLISNSPVLSGSYSSGISSLSRCSTSETSGFENQVNEQSAPLPVPVPVPVPSYGGEEPVRKESKTPPPYSVYERTLRRPVPLPHSLSIPVTSEPPALPPKPLAARSSHLENGARRTDPGPRPRPLPRKVSQL

SEQ ID NO: 67194 - protein, 87 aa, Homo sapiens
MNLPTVSALRKMGVNLTRSNKETVKHSDVLFLAVKPHIIPFILDEIGADVQARHIVVSCAAGVTISSVEKKLMAFQPAPKVIRCMTN

SEQ ID NO: 67195 - protein, 152 aa, Homo sapiens
MANVPWAEVCEKFQAALALSRVELHKNPEKEPYKSKYSARALLEEVKALLGPAPEDEDERPEAEDGPGAGDHALGLPAEVVEPEGPVAQRAVRLAVIEFHLGVNHIDTEELSAGEEHLVKCLRLLRRYRLSHDCISLCIQAQGGSQHGSWLP

SEQ ID NO: 67196 - protein, 60 aa, Homo sapiens
MADGGAASQDESSAAAAAAADWKSKKSFPAFLITKLLSVFNESVQRKNAVFLYLVFFHHL

SEQ ID NO: 67197 - protein, 98 aa, Homo sapiens
  MOD_RES (1)..(1): Any amino acid
XQLSQIQGLIGSVEEQLAQLRCEMEQQNQEYKILLDVKTRLEQEIATYRRLLEGEDAHLTQYKKERKYLRGFGPGGWVHGTGSPPARCWGRVPRSSRS

SEQ ID NO: 67198 - protein, 138 aa, Homo sapiens
MPMVMADQHRSVSELLSNSKFDVNYAFGRVKRSLLHIAANCGSVECLVLLLKKGANPNYQDISGCTPLHLAARNGQKKCMSKLLEYSADVNICNNEGLTAIHWLAVNGRTELLHDLVQHVSDVDVEDAMGQTALHVAC

SEQ ID NO: 67199 - protein, 169 aa, Homo sapiens
  MOD_RES (1)..(1): Any amino acid
XKEQRHWDISSSERLDILRDFTNYGLEHWGSDTQGVEKTRRFLLEWLSFLCRYVPVGLLERLPQRINERPPYYLGRDYLETLMASQKAADWIRIRCLGGLELGSCSRGPGVTEGTLQVLGLTSLSTCSPTARCSLGQCPPASPSCRSTRPTRTSSLRLSQGHPGARRVQ

SEQ ID NO: 67200 - protein, 72 aa, Homo sapiens
MGCLGNSKTEDQRNEEKAQREANKKIEKQLQKDKQVYRATHRLLLLGAGESGKSTIVKQMRILHVNGFNGEI

SEQ ID NO: 67201 - protein, 400 aa, Homo sapiens [sequence omitted]

SEQ ID NO: 67202 - protein, 728 aa, Homo sapiens
MASLGANPRRTPQGPRPGAASSGFPSPAPVPGPREAEEEEVEEEEELAEIHLCVLWNSGYLGIAYYDTSDSTIHFMPDAPDHESLKLLQRVLDEINPQSVVTSAKQDENMTRFLGKLASQEHREPKRPEIIFLPSVDFGLEISKQRLLSGNYSFIPDAMTATEKILFLSSIIPFDCLLTVRALGGLLKFLGRRRIGVELEDYNVSVPILGFKKFMLTHLVNIDQDTYSVLQIFKSESHPSVYKVASGLKEGLSLFGILNRCHCKWGEKLLRLWFTRPTHDLGELSSRLDVIQFFLLPQNLDMAQMLHRLLGHIKNVPLILKRMKLSHTKVSDWQVLYKTVYSALGLRDACRSLPQSIQLFRDIAQEFSDDLHHIASLIGKVVDFEGSLAENRFTVLPNIDPEIDEKKRRLMGLPSFLTEVARKELENLDSRIPSCSVIYIPLIGFLLSIPRLPSMVEASDFEINGLDFMFLSEEKLHYRSARTKELDALLGDLHCEIRDQETLLMYQLQCQVLARAAVLTRVLDLASRLDVLLALASAARDYGYSRPRYSPQVLGVRIQNGRHPLMELCARTFVPNSTECGGDKGRVKVITGPNSSGKSIYLKQVGLITFMALVGSFVPAEEAEIGAVDAIFTRIHSCESISLGLSTFMIDLNQQVAKAVNNATAQSLVLIDEFGKGTNTVDGLALLAAVLRHWLARGPTCPHIFVATNFLSLVQLQLLPQGPLVQYL

SEQ ID NO: 67203 - protein, 78 aa, Homo sapiens
  MOD_RES (1)..(1): Any amino acid
XQDEPLRSRKVFVGRCTEDMTEDELREFFSQYGDVMDVFIPKPFRAFAFVTFADDQIAQSLCGEDLIIKGISVHKSTI

SEQ ID NO: 67204 - protein, 112 aa, Homo sapiens
MVNVPKTRRTFCKKCGKHQPHKVTQYKKGKDSLYAQGKRRYDRKQSGYGGQTKPIFRKKAKTTKKIVLRLECVEPNCRSKRMLAIKRCKHFELGGDKKRKVYNYGWKVQSFS

SEQ ID NO: 67205 - protein, 29 aa, Homo sapiens
  MOD_RES (1)..(1): Any amino acid
XCYMVLPIQDGGKSQEEPSKVKPKFRKGS

SEQ ID NO: 67206 - protein, 98 aa, Homo sapiens
MSEVSCKKRDDYLEWPEYFMAVAFLSAQRSKDPNSQVGACIVNSENKIVGIGYNGMPNGCSDDVLPWRRTAENKLDTKYPYVCHAELNAIMNKNSTDV

SEQ ID NO: 67207 - protein, 118 aa, Homo sapiens
MAGFAELGLSSWLVEQCRQLGLKQPTPVQLGCIPAILEGRDCLGCAKTGSGKTAAFVLPILQKLSEDPYGIFCLVLTPTRIKQDGPGAVAHTCNPSTLGAPGSWPTRSQSSSGSWGSL

SEQ ID NO: 67208 - protein, 275 aa, Homo sapiens
MSEYIRVTEDENDEPIEIPSEDDGTVLLSTVTAQFPGACGLRYRNPVSQCMRGVRLVEGILHAPDAGWGNLVYVVNYPKGWTWWLTSVIPATREAEAGESLEPGRQRLQRGEIAPLHSSLDNKRKMDETDASSAVKVKRAVQKTSDLIVLGLPWKTTEQDLKEYFSTFGEVLMVQVKKDLKTGHSKGFGFVRFTEYETQVKVMSQRHMIDGRWCDCKLPNSKQSQDEPLRSRKVFVGRCTEDMTEDELREFFSQYGDVMDVFIPKPFRAFAFVTF

SEQ ID NO: 67209 - protein, 500 aa, Homo sapiens
MGSPLRFDGRVVLVTGAGAGLGRAYALAFAERGALVVVNDLGGDFKGVGKGSLAADKVVEEIRRRGGKAVANYDSVEEGEKVVKTALDAFGRIDVVVNNAGILRDRSFARISDEDWDIIHRVHLRGSFQVTRAAWEHMKKQKYGRIIMTSSASGIYGNFGQANYSAAKLGLLGLANSLAIEGRKSNIHCNTIAPNAGSRMTQTVMPEDLVEALKPEYVAPLVLWLCHESCEENGGLFEVGAGWIGKLRWERTLGAIVRQKNHPMTPEAVKANWKKICDFENASKPQSIQESTGSIIEVLSKIDSEGGVSANHTSRATSTATSGFAGAIGQKLPPFSYAYTELEAIMYALGVGASIKDPKDLKFIYEGSSDFSCLPTFGVIIGQKSMMGGGLAEIPGLSINFAKVLHGEQYLELYKPLPRAGKLKCEAVVADVLDKGSGVVIIMDVYSYSEKELICHNQFSLFLVGSGGFGGKRTSDKVKPTQCEDDEDEDLYDDLLPLTE

SEQ ID NO: 67210 - protein, 123 aa, Homo sapiens
MMGSPVSHLLAGFCVWVVLGWVGGSVPNLGPAEQEQNHYLAQLFGLYGENGTLTAGGLARLLHSLGLGRVQGLRLGQHGPLTGRAASPAADNSTHRPQNPELSVDVWAGMPLGPSGWGDLEES

SEQ ID NO: 67211 - protein, 332 aa, Homo sapiens
MDGETAEEQGGPVPPPVAPGGPGLGGAPGGRREPKKYAVTDDYQLSKQVLGLGVNGKVLECFHRRTGQKCALKLLYDSPKARQEVDHHWQASGGPHIVCILDVYENMHHGKRCLLIIMECMEGGELFSRIQERGDQAFTEREAAEIMRDIGTAIQFLHSHNIAHRDVKPENLLYTSKEKDAVLKLTDFGFAKETTQNALQTPCYTPYYVAPEVLGPEKYDKSCDMWSLGVIMYILLCGFPPFYSNTGQAISPGMKRRIRLGQYGFPNPEWSEVSEDAKQLIRLLLKTDPTERLTITQFMNHPWINQSMVVPQTPLHTARVLQEDKDHWDEVK

SEQ ID NO: 67212 - protein, 136 aa, Homo sapiens
MRTEAEAAGPPLEPGDFVQLPVPVIQQLYHWDCGLACSRMVLRYLGQLDDSEFERALQKLQLTRSIWTIDLAYLMHHFGVRHRFCTQTLGVDKGYKNQSFYRKHFDTEETRVNQLFAQAKACKVLVEKWNVQHQHQ

SEQ ID NO: 67213 - protein, 136 aa, Homo sapiens
ALRESCIPAQVVAAIDVNTVANEVYKYNFPHTQLLAKTIEGITLEEFDRLSFDMILMSPPCQPFTRLQKLPKYILLENVKGFEVSSTRDLLIQTIENCGFQYQEFLLSPTSLGIPNSRLRYFLIAKLQSEPLPFQA

SEQ ID NO: 67214 - protein, 146 aa, Homo sapiens
  MOD_RES (1)..(1): Any amino acid
XDVDLIIRISDRGGGIAHKDLDRVMDYHFTTAEASTQDPRISPLFGHLDMHSGAQSGPMHGALARTSTCGSATSMAGRKASGSDPTAFGLLTRPAWAAFPAGPPGSGRAAPCSTHCCILGLRDPDRWTYMELGTALPQQGPLPPRL

SEQ ID NO: 67215 - protein, 115 aa, Homo sapiens
MLLSIGMLMLSATQVYTILTVQLFAFLNLLPVEADILAYNFENASQTFDDLPARFGYRLPAEGLKGFLINSKPENACEPIVPPPVKDNSSGTFIVLIRRLDCNFDIKVLNAQRAG

SEQ ID NO: 67216 - protein, 69 aa, Homo sapiens
MDFLLGNPFSSPVGQRIEKATDGSLQSEDWALNMEICDIINETEEGDSAAGGPGATGCESLLSNGLGRF

SEQ ID NO: 67217 - protein, 186 aa, Homo sapiens
MEAVKAEAWEGAAVAQDLLALGYGGVPGAASRGASCPDFRGLCVRLAAELATLGALEQQREAGAEVLSAGDGPGAEEDFLRQLGSLLRELHCPDRALCGGDGAAALREPGAGLRLLRPRRGHEGSADPNSRGSDPRIGHLHCTRSGCPSRPVLSRPSHQRGCPQRDLLCHQQGAYGQRSRPGGPPK

SEQ ID NO: 67218 - protein, 471 aa, Homo sapiens
MVQVSIASNELLQPAMRKSPGLSDCLWAWILLLSTLTGRSYGQPSLQDELKDNTTVFTRILDRLLDGYDNRLRPGLGERVTEVKTDIFVTSFGPVSDHDMEYTIDVFFRQSWKDERLKFKGPMTVLRLNNLMASKIWTPDTFFHNGKKSVAHNMTMPNKLLRITEDGTLLYTMRLTVRAECPMHLEDFPMDAHACPLKFGSYAYTRAEVVYEWTREPARSVVVAEDGSRLNQYDLLGQTVDSGIVQSSTGEYVVMTTHFHLKRKIGYFVIQTYLPCIMTVILSQVSFWLNRESVPARTVFGVTTVLTMTTLSISARNSLPKVAYATAMDWFIAVCYAFVFSALIEFATVNYFTKRGYAWDGKSVVPEKPKKVKDPLIKKNNTYAPTATSYTPNLARGDPGLATIAKSATIEPKEVKPETKPPEPKKTFNSVSKIDRLSRIAFPLLFGIFNLVYWATYLNREPQLKAPTPHQ

SEQ ID NO: 67219 - protein, 103 aa, Homo sapiens
NNHHEENISSKMKGLNGKVSDLEKAAAQRKAKLDENSAFLQFNWKADVVESWIGEHCQQGPEEPSQSCSLSPSVSLVFFCREETDQLWAWQRTYYQGRPLTAS

SEQ ID NO: 67220 - protein, 1676 aa, Homo sapiens
MTSAQCPALACVMSPLRFWGPWPLLMWQLLWLLVKEAQPLEWVKDPLQLTSNPLGPPEPWSSHSSHFPRESPHAPTLPADPWDFDHLGPSASSEMPAPPQESTENLVPFLDTWDSAGELPLEPEQFLASQQDLKDKLSPQERLPVSPKKLKKDPAQRWSLAEIIGIIRQLSTPQSQKQTLQNEYSSTDTPYPGSLPPELRVKSDEPPGPSEQVGPSQFHLEPETQNPETLEDIQSSSLQQEAPAQLPQLLEEEPSSMQQEAPALPPESSMESLTLPNHEVSVQPPGEDQAYYHLPNITVKPADVEVTITSEATNETESSQAQQETPIQFPEEVEPSATQQEAPIEPPVPPMEHELSISEQQQPVQPSETSREVESSPTQQETPGQPPEHHEVTVSPPGDHQTHHLDSPSVSVKPPDVQLTIAAEPSAEVGTSLVQQEATTRLSGSGNDIEPPAIQHGGPPLLSESSEEAGPLAVQQETSFQSPEPINNENPSPTQQEAAAEHPQTAEEGESSLTHQEAPAQTPEFPNVVVAQPPEHSHLTQATVQPLDLGFTITPESMTEVELSPTMKETPTQPPKKVVPQLRVYQGVTNPTPGQDQAQHPVSPSVTVQLLDLGLTITPEPTTEVGHSTPPKRTIVSPKHPEVTLPHPDQVQTQHSHLTRATVQPLDLGFTITPKSMTEVEPSTALMTTAPPPGHPEVTLPPSDKGQAQHSHLTQATVQPLDLELTITTKPTTEVKPSPTTEETSTQPPDLGLAIIPEPTTETGHSTALEKTTAPRPDRVQTLHRSLTEVTGPPTELEPAQDSLVQSESYTQNKALTAPEEHKASTSTNICELCTCGDEMLSCIDLNPEQRLRQVPVPEPNTHNGTFTILILRENNLTELHKDSFEGLLSLQYLDLSCNKIQSIERHTFEPLPFLKFINLSCNVITELSFGTFQAWHGMQFLHKLILNHNPLTTVEDPYLFKLPALKYLDMGTTLVPLTTLKNILMMTVELEKLILPSHMACCLCQFKNSIEAVCKTVKLHCNSACLTNTTHCPEEASVGNPEGAFMKVLQARKNYTSTELIVEPEEPSDSSGINLSGFGSEQLDTNDESDFISTLSYILPYFSAVNLDVKSLLLPLIKLPTTGNSLAKIQTVGQNRQRVKRVLMGPRSIQKRHFKEVGRQSIRREQGAQASVENAAEEKRLGSPAPREVEQPHTQQGPEKLAGNAVYTKPSFTQEHKAAVSVLKPFSKGAPSTSSPAKALPQVRDRWKDLTHAISILESAKARVTNTKTSKPIVHARKKYRFHKTRSHVTHRTPKVKKSPKVRKKSYLSRLMLANRLPFSAAKSLINSPSQGAFSSLGDLSPQENPFLEVSAPSEHFIEKNNTKHTTARNAFEENDFMENTNMPEGTISENTNYNHPPEADSAGTAFNLGPTVKQTETKWEYNNVGTDLSPEPKSFNYPLLSSPGDQFEIQLTQQLQSLIPNNNVRRLIAHVIRTLKMDCSGAHVQVTCAKLISRTGHLMKLLSGQQEVKASEIEWDTDQWKIENYINESTEAQSEQKEKSLELKKEVPGYGYTDKLILALIVTGILTILIILFCLIVICCHRRSLQEDEEGFSRGIFRFLPRRGCSSRRESQDGLSSFGQPLWFKDMYKPLSATRINNHAWKLHKKSSNEDKILNRDPGDSEAPTEEEESEALP

SEQ ID NO: 67221 - protein, 336 aa, Homo sapiens
MPSPLGPPCLPVMDPETTLEEPETARLRFRGFCYQEVAGPREALARLRELCCQWLQPEAHSKEQMLEMLVLEQFLGTLPPEIQAWVRGQRPGSPEEAAALVEGLQHDPGQLLGWITAHVLKQEVLPAAQKTEEPLGSPHPSGTVESPGEGPQDTRIEGSVQLSCSVKEEPNVDGQEVAPSSPPLAAQSPEGNHGHQEPASTSFHPPRIQGYRPTSQRHRPSQSWGCCSRGQASAEACAREMRVRVHLAAQRPSRPRAQGRQPGRACLGLPLLPPLCAQGHRQCPLSPHLQRRDWSRLPPPGSPTRASSVAAASTGSQCSSSTTGHTRVGQVCSPRG

SEQ ID NO: 67222 - protein, 40 aa, Homo sapiens
SISTSSDDTTTWNSCLPPPVNQGRHYQKEMNPPSPSNPRL

SEQ ID NO: 67223 - protein, 461 aa, Homo sapiens
  MOD_RES (1)..(1): Any amino acid
XRQCLMVSRNLGSVGYDPNEKTFDKILVANRGEIACRVIRTCKKMGIKTVAIHSDVDASSVHVKMADEAVCVGPAPTSKSYLNMDAIMEAIKKTRAQAVHPGYGFLSENKEFARCLAAEDVVFIGPDTHAIQAMGDKIESKLLAKKAEVNTIPGFDGVVKDAEEAVRIAREIGYPVMIKASAGGGGKGMRIAWDDEETRDGFRLSSQEAASSFGDDRLLIEKFIDNPRHIEIQVLGDKHGNALWLNERECSIQRRNQKVVEEAPSIFLDAETRRAMGEQAVALARAVKYSSAGTVEFLVDSKKNFYFLEMNTRLQVEVDGSKLNVTSTWNLASPLLSVSVDGTQRTVQCLSREAGGNMSIQFLGTVYKVNILTRLAAELNKFMLEKVTEDTSSVLRSPMPGVVVAVSVKPGDAVAEGQEICVIEAMKMQNSMTAGKTGTVKSVHCQAGDTVGEGDLLVELE

SEQ ID NO: 67224 - protein, 325 aa, Homo sapiens
MIIVAHVLLILLGATEILQADLLPDEKISLLPPVNFTIKVTGLAQVLLQWKPNPDQEQRNVNLEYQVKINAPKEDDYETRITESKCVTILHKGFSASVRTILQNDHSLLASSWASAELHAPPGSPGTSIVNLTCTTNTTEDNYSRLRSYQVSLHCTWLVGTDAPEDTQYFLYYRYGSWTEECQEYSKDTLGRNIACWFPRTFILSKGRDWLAVLVNGSSKHSAIRPFDQLFALHAIGNDEHKPLREWFVIVIMATICFILLILSLICKICHLWIKLFPPIPAPKSNIKDLFVTTNYEKAGSSETEIEVICYIEKPGVETLEDSVF

SEQ ID NO: 67225 - protein, 24 aa, Homo sapiens
  MOD_RES (1)..(1): Any amino acid
XLFQSLDISERLKFLLTLGQPQIN

SEQ ID NO: 67226 - protein, 425 aa, Homo sapiens
MSLMVVSMACVGFFLLEGPWPHVGGQDKPFLSAWPGTVVSEGQHVTLQCRSRLGFKEFSLSKEDGMPVPELYNRIFRNSFLMGPVTPAHAGTYRCCSSHPHSPTGWSAPSNPVVIMVTGVHRKPSLLAHPGPLVKSGETVILQCWSDVRFERFLLHREGITEDPLRLVGQLHDAGSQVNYSMGPMTPALAGTYRCFGSVTHLPYELSAPSDPLDIVVVGLYGKPSLSAQPGPTVQAGENVTLSCSSRSLFDIYHLSREAEAGELRLTAVLRVNGTFQANFPLGPVTHGGTYRCFGSFRALPHAWSDPSDPLPVSVTGTAMISFLLVSCLPPGNSRHLHVLIGTSVVIIPFAILLFFLLHRWCANKKNAVVMDQEPAGNRTVNREDSDEQDPQEVTYAQLNHCVFTQRKITRPSQRPKTPPTDTSV

SEQ ID NO: 67227 - protein, 18 aa, Homo sapiens
  MOD_RES (1)..(1): Any amino acid
XKFPEPQEVVEELKKYLS

SEQ ID NO: 67228 - protein, 30 aa, Homo sapiens
MSFRKVNIIILVLAVALFLLVLHHNFLSLS

SEQ ID NO: 67229 - protein, 135 aa, Homo sapiens
MMDGPRSDVGRWGGNPLQPPTTPSPEPEPEPDGRSRRGGGRSFWARCCGCCSCRNAADDDWGPEPSDSRGRGSSSGTRRPGSRGSDSRRPVSRGSGVNAAGDGTIREGMLVVNGVDLLSSRSDQNRREHHTDEYE

SEQ ID NO: 67230 - protein, 901 aa, Homo sapiens
MVPWVRTMGQKLKQRLRLDVGREICRQYPLFCFLLLCLSAASLLLNRYIHILMIFWSFVAGVVTFYCSLGPDSLLPNIFFTIKYKPKLGLQELFPQGHSCAVCGKVKCKRHRPSLLLENYQPWLDLKISSKVDASLSEVDIPSIITKKLLKAAMKHIEVIVKARQKVKNTEFLQQAALEEYGPELHVALRSRRDELHYLRKLTELLFPYILPPKATDCRSLTLLIREILSGSVFLPSLDFLADPDTVNHLLIIFIDDSPPEKATEPASPLVPFLQKFAEPRNKKPSVLKLELKQIREQQDLLFRFMNFLKQEGAVHVLQFCLTVEEFNDRILRPELSNDEMLSLHEELQKIYKTYCLDESIDKIRFDPFIVEEIQRIAEGPYIDVVKLQTMRCLFEAYEHVLSLLENVFTPMFCHSDEYFRQLLRGAESPTRNSKLNRGSLSLDDFRNTQKRGESFGISRIGSKIKGVFKSTTMEGAMLPNYGVAEGEDDFIEEGIVVMEDDSPVEAVSTPNTPRNLAAWKISIPYVDFFEDPSSERKEKKERIPVFCIDVERNDRRAVGHEPEHWSVYRRYLEFYVLESKLTEFHGAFPDAQLPSKRIIGPKNYEFLKSKREEFQEYLQKLLQHPELSNSQLLADFLSPNGGETQFLDKILPDVNLGKIIKSVPGKLMKEKGQHLEPFIMNFINSCESPKPKPSRPELTILSPTSENNKKLFNDLFKNNANRAENTERKQNQNYFMEVMTVEGVYDYLMYVGRVVFQVPDWLHHLLMGTRILFKNTLEMYTDYYLQCKLEQLFQEHRLVSLITLLRDAIFCENTEPRSLQDKQKGAKQTFEEMMNYIPDLLVKCIGEETKYESIRLLFDGLQQPVLNKQLTYVLLDIVIQELFPELNKVQKEVTSVTSWM

SEQ ID NO: 67231 - protein, 25 aa, Homo sapiens
  MOD_RES (1)..(1): Any amino acid
XQTASDESYKDPTNIQLICVSTSVY

SEQ ID NO: 67232 - protein, 349 aa, Homo sapiens
MPHIDNDVKLDFKDVLLRPKRSTLKSRSEVDLTRSFSFRNSKQTYSGVPIIAANMDTVGTFEMAKVLCKFSLFTAVHKHYSLVQWQEFAGQNPELCFSHSIWLPAQAQALLTLSSWNRSWKLFPRSICLDVANGYSEHFVEFVKDVRKRFPQHTIMAGNVVTGEMVEELILSGADIIKVGIGPGSVCTTRKKTGVGYPQLSAVMECADAAHGLKGHIISDGGCSCPGDVAKAFGAGADFVMLGGMLAGHSESGGELIERDGKKYKLFYGMSSEMAMKKYAGGVAEYRASEGKTVEVPFKGDVEHTIRDILGGIRSTCTYVGAAKLKELSRRTTFIRVTQQVNPIFSEAC

SEQ ID NO: 67233 - protein, 101 aa, Homo sapiens
  MOD_RES (1)..(1): Any amino acid
XSSPSGSKSQRYSGAYGASVSDEELKRRVAEELALEQAKKESEDQKRLKQAKELDRERAAANEQLTRAILRERICSEEERAKAKHLIKVELLWVKPGVLTA

SEQ ID NO: 67234 - protein, 119 aa, Homo sapiens
MPHDVSHTEADDDRTLYNLIVIRNQQAKDSEEWQKLNYDIHTLRQVRREVRNRWKCILEDLGFQKEADSLLSVTKLSTISDSKNTRKAREMLLKLAEETNIFPTSWELSERYLFVVDRL

SEQ ID NO: 67235 - protein, 140 aa, Homo sapiens
  MOD_RES (1)..(1): Any amino acid
XADCSTNNPSQAKLRRELDESLQVAERLTRKYNELLKSYQWKMLNTSSLLEQLNEQFNWVSRLANLTQGEDQYYLRVTTVASHTSDSDVPSGVTEVVVKLFDSDPITVTVPVEVSRKNPKFMETVAEKALQEYRKKHREE

SEQ ID NO: 67236 - protein, 311 aa, Homo sapiens
MSKKPPNRPGITFEIGARLEALDYLQKWYPSRIEKIDYEEGKMLVHFERWSHRYDEWIYWDSNRLRPLERPALRKEGLKDEEDFFDFKAGEEVLARWTDCRYYPAKIEAINKEGTFTVQFYDGVIRCLKRMHIKAMPEDAKGQVKSQHPLSWCCPIDPAGSCNQSMGSEDWIALVKAAAAAAAKNKTGSKPRTSANSNKDKDKDERKWFKVPSKKEETSTCIATPDVEKKEDLPTSSETFGLHVENVPKMVFPQPESTLSNKRKNNQGNSFQAKRARLNKITGLLASKAVGVDGAEKKEDYNETAPMLEQV

SEQ ID NO: 67237 - protein, 55 aa, Homo sapiens
EEEEEQPQAAQPPTLPVEEKKKIPDPDSDDVSEVDARHIIESKVWSGWCPCTTTT

SEQ ID NO: 67238 - protein, 228 aa, Homo sapiens
MAQQANVGELLAMLDSPMLGVRDDVTAVFKENLNSDRGPMLVNTLVDYYLETSSQPALHILTTLQEPHDKHLLDRINEYVGKAATRLSILSLLGHVIRLQPSWKHKLSQAPLLPSLLKCLKMDTDVVVLTTGVLVLITMLPMIPQSGKQHLLDFFDIFGRLSSWCLKKPGHVAEVYLVHLHASVYALFHRLYGMYPCNFVSFLRSHYSMKENLETFEEVVKVEEIRNS

SEQ ID NO: 67239 - protein, 94 aa, Homo sapiens
MAALQGNGSERTCCPVNWVEHERSCYWFSRSGKAWADADNYCRLEDAHLVVVTSWEEQKFVQHHIGPVNTWMGLHDQNGPWKWVDGTDYETGFK

SEQ ID NO: 67240 - protein, 1140 aa, Homo sapiens
MRLSSLTEEAVDGGNGGEWGEDLLEQFTCIPSRVVEAKTAPEWPLCPGEGQGLHGEPLPDHCQGTGGQIDPSLGRGGRAKQRGSRGSWWAAGETIANMLCGLSRETPGEADDGPYSKGGKDAGGADVSLACRRQSIPEEFRGITVVELIKKEGSTLGLTISGGTDKDGKPRVSNLRPGGLAARSDLLNIGDYIRSVNGIHLTRLRHDEIITLLKNVGERVVLEVEYELPPPAPENNPRIISKTVDVSLYKEGNSFGFVLRGGAHEDGHKSRPLVLTYVRPGGPADREGSLKVGDRLLSVDGIPLHGASHATALATLRQCSHEALFQVEYDVATPDTVANASGPLMVEIVKTPGSALGISLTTTSLRNKSVITIDRIKPASVVDRSGALHPGDHILSIDGTSMEHCSLLEATKLLASISEKVRLEILPVPQSQRPLRPSEAVKVQRSEQLHRWDPCVPSCHSPRPGHCRMPTWATPAGQDQSRSLSSTPFSSPTLNHAFSCNNPSTLPRGSQPMSPRTTMGRRRQRRREHKSSLSLASSTVGPGGQIVHTETTEVVLCGDPLSGFGLQLQGGIFATETLSSPPLVCFIEPDSPAERCGLLQVGDRVLSINGIATEDGTMEEANQLLRDAALAHKVVLEVEFDVAESVIPSSGTFHVKLPKKRSVELGITISSASRKRGEPLIISDIKKGSVAHRTGTLEPGDKLLAIDNIRLDNCPMEDAVQILRQCEDLVKLKIRKDEDNSDELETTGAVSYTVELKRYGGPLGITISGTEEPFDPIVISGLTKRGLAERTGAIHVGDRILAINNVSLKGRPLSEAIHLLQVAGETVTLKIKKQLDRPLLPRKSGSLSETSDADEDPADALKGGLPAARFSPAVPSVDSAVESWDSSATEGGFGGPGSYTPQAAARGTTPQERRPGWLRGSPPPTEPRRTSYTPTPADESFPEEEEEDDWEPPTSPAPGPAREEGFWRMFGEALEDLESCGQSELLRELEASIMTGTVQRVALEGRPGHRPWQRGREVRASPAEMEELLLPTPLEMHKVTLHKDPMRHDFGFSVSDGLLEKGVYVHTVRPDGPAHRGGLQPFDRVLQVNHVRTRDFDCCLAVPLLAEAGDVLELIISRKPHTAHSSRAPRSPGPSSPRML

SEQ ID NO: 67241 - protein, 144 aa, Homo sapiens [sequence omitted]

SEQ ID NO: 67242 - protein, 29 aa, Homo sapiens
MSGIALSRLAQERKAWRKDHPFGFVAVPT

SEQ ID NO: 67243 - protein, 481 aa, Homo sapiens
MTPTLAALLCLGLSLGPRTHVQAGPFPKPTLWAEPGSVISWGSPVTIWCQGSLEAQEYRLDKEGSPEPWDRNNPLEPKNKARFSIPSITEHHAGRYRCHYYSSAGWSEPSDPLELVMTGAYSKPTLSALPSPVVASGGNMTLQCGSQKGYHHFVLMKEGEHQLPRTLDSQQLHSGGFQALFPVGPVNPSHRWRFTCYYYYMNTPRVWSHPSDPLEILPSGVSRKPSLLTLQGPVLAPGQSLTLQCGSDVGYDRFVLYKEGERDFLQRPGQQPQAGLSQANFTLGPVSPSHGGQYRCYGAHNLSSEWSAPSDPLNILMAGQIYDTVSLSAQPGPTVASGENVTLLCQSWWQFDTFLLTKEGAAHPPLRLRSMYGAHKYQAEFPMSPVTSAHAGTYRCYGSYSSNPHLLSFPSEPLELMVSGHSGGSSLPPTGPPSTPASHAKDYTVENLIRMGMAGLVLLFLGILLFEAQHSQRNPQDAAGR

SEQ ID NO: 67244 - protein, 874 aa, Homo sapiens
MPKSYEALVQHVIEDHERIGYQVTAMIGHTNVVVPRSKPLMLIAPKPQDKKSMGLPPRIGSLASGNVRSLPSQQMVNRLSIPKPNLNSTGVNMMSSVHLQQNNYGVKSVGQGYSVGQSMRLGLGGNAPVSIPQQSQSVKQLLPSGNGRSYGLGSEQRSQAPARYSLQSANASSLSSGQLKSPSLSQSQASRVLGQSSSKPAAAATGPPPGNTSSTQKWKICTICNELFPENVYSVHFEKEHKAEKVPAVANYIMKIHNFTSKCLYCNRYLPTDTLLNHMLIHGLSCPYCRSTFNDVEKMAAHMRMVHIDEEMGPKTDSTLSFDLTLQQGSHTNIHLLVTTYNLRDAPAESVAYHAQNNPPVPPKPQPKVQEKADIPVKSSPQAAVPYKKDVGKTLCPLCFSILKGPISDALAHHLRERHQVIQTVHPVEKKLTYKCIHCLGVYTSNMTASTITLHLVHCRGVGKTQNGQDKTNAPSRLNQSPSLAPVKRTYEQMEFPLLKKRKLDDDSDSPSFFEEKPEEPVVLALDPKGHEDDSYEARKSFLTKYFNKQPYPTRREIEKLAASLWLWKSDIASHFSNKRKKCVRDCEKYKPGVLLGFNMKELNKVKHEMDFDAEWLFENHDEKDSRVNASKTADKKLNLGKEDDSSSDSFENLEEESNESGSPFDPVFEVEPKISNDNPEEHVLKVIPEDASESEEKLDQKEDGSKYETIHLTEEPTKLMHNASDSEVDQDDVVEWKDGASPSESGPGSQQVSDFEDNTCEMKPGTWSDESSQSEDARSSKPAAKKKATMQGDREQLKWKNSSYGKVEGFWSKDQSQWKNASENDERLSNPQIEWQNSTIDSEDGEQFDNMTDGVAEPMHGSLAGVKLSSQQA

SEQ ID NO: 67245 - protein, 140 aa, Homo sapiens
MDIQKSENEDDSEWEDVDDEKGDSNDDYDSAGLLSDEDCMSVPGKTHRAIADHLFWSEETKSRFTEYSMTSSVMRRNEQLTLHDERFEKFYEQYDDDEIGALDNAELEGSIQVDSNRLQEVLNDYYKEKAEKWQSGIVSL

SEQ ID NO: 67246 - protein, 98 aa, Homo sapiens
MSRQTATALPTGTSKCPPSQRVPALTGTTASNNDLASLFECPVCFDYVLPPILQCQSGHLVCSNCRPKLTCCPTCRGPLGSIRNLAMEKVANSVLFPC

SEQ ID NO: 67247 - protein, 63 aa, Homo sapiens
MIWLRNRRCLEPLQGTPKWVPVLGELQKTLQKGDPSRGPSVRESQNQPAGHGRGRLPARPGVA

SEQ ID NO: 67248 - protein, 132 aa, Homo sapiens
MSRQSSVSFRSGGSRSFSTASAITPSVSRTSFTSVSRSGGGGGGGFGRVSLAGACGVGGYGSRSLYNLGGSKRISISTSGGSFRNRFGAGAGGGYGFGGGAGSGFGFGGGAGGGFGLGGGAGFGGGFGGPGF

SEQ ID NO: 67249 - protein, 60 aa, Homo sapiens
  MOD_RES (1)..(1): Any amino acid
XDICIYGGLGLGGLLLLAVVLLSACLCWLHRREAGEELGPGLLRAGTPLCISAEAASAQQ

SEQ ID NO: 67250 - protein, 240 aa, Homo sapiens
MEEEETQLEEELDKAQEDILKHQASISELKRNFMESTPEPRPNEWEKRRITPLSLQTQGSLEEEITSILFSEKGFSDSMKATFTSATTWTAEGAVVSANAPSEKLSSSPFSHLLETRAPESEGPCTGARDAVKPPVVKTEMVTISDASQRTEISTKEVPIVQTETKTITYESPQIDGGAGGDSGTLLTAQTITSESVSTTTTTHITKTVKGGISETRIEKRIVITGDGDIDHDQALAQAI

SEQ ID NO: 67251 - protein, 264 aa, Homo sapiens
EICVGILGNMACFQEICVSISSDKNLGQVLLHCLYDSDPPTLLETSRLLLTCLSQAEVASVWVERIQEHPAIYDSICFIMSSSTNVDLLVKVGEVVDKLFDLDEKLMLEWVRNGAAQPLDQPQEESEEQPVFRLVPCILEAAKQVRSENPEWLDVYMHILQLLTTVDDGIQAIVHCPDTGKDIWNLLFDLVCHEFCQSDDPPIILQEQKTVLASVFSVLSAIYASQTEQEYLKIEKGDGGSGSKGRPVEQTEVFLCISKPSSFL

SEQ ID NO: 67252 - protein, 50 aa, Homo sapiens
MEELEQGLLMQPWAWLQLAENSLLAKVFITKQGYALLVSDLQQVWHEQMH

SEQ ID NO: 67253 - protein, 1818 aa, Homo sapiens
MTTMLQKSDSNASFLRAARAGNLDKVVEYLKGGIDINTCNQNGLNALHLAAKEGHVGLVQELLGRGSSVDSATKKGNTALHIASLAGQAEVVKVLVKEGANINAQSQNGFTPLYMAAQENHIDVVKYLLENGANQSTATEDGFTPLAVALQQGHNQAVAILLENDTKGKVRLPALHIAARKDDTKSAALLLQNDHNADVQSKMMVNRTTESGFTPLHIAAHYGNVNVATLLLNRGAAVDFTARNGITPLHVASKRGNTNMVKLLLDRGGQIDAKTRDGLTPLHCAARSGHDQVVELLLERGAPLLARTKNGLSPLHMAAQGDHVECVKHLLQHKAPVDDVTLDYLTALHVAAHCGHYRVTKLLLDKRANPNARALNGFTPLHIACKKNRIKVMELLVKYGASIQAITESGLTPIHVAAFMGHLNIVLLLLQNGASPDVTNIRGETALHMAARAGQVEVVRCLLRNGALVDARAREEQTPLHIASRLGKTEIVQLLLQHMAHPDAATTNGYTPLHISAREGQVDVASVLLEAGAAHSLATKKGFTPLHVAAKYGSLDVAKLLLQRRAAADSAGKNGLTPLHVAAHYDNQKVALLLLEKGASPHATAKNGYTPLHIAAKKNQMQIASTLLNYGAETNIVTKQGVTPLHLASQEGHTDMVTLLLDKGANIHMSTKSGLTSLHLAAQEDKVNVADILTKHGADQDAHTKLGYTPLIVACHYGNVKMVNFLLKQGANVNAKTKNGYTPLHQAAQQGHTHIINVLLQHGAKPNATTANGNTALAIAKRLGYISVVDTLKVVTEEVTTTTTTITEKHKLNVPETMTEVLDVSDEEGDDTMTGDGGEYLRPEDLKELGDDSLPSSQFLDGMNYLRYSLEGGRSDSLRSFSSDRSHTLSHASYLRDSAVMDDSVVIPSHQVSTLAKEAERNSYRLSWGTENLDNVALSSSPIHSGFLVSFMVDARGGAMRGCRHNGLRIIIPPRKCTAPTRVTCRLVKRHRLATMPPMVEGEGLASRLIEVGPSGAQFLGPVIVEIPHFAALRGKERELVVLRSENGDSWKEHFCDYTEDELNEILNGMDEVLDSPEDLEKKRICRIITRDFPQYFAVVSRIKQDSNLIGPEGGVLSSTVVPQVQAVFPEGALTKRIRVGLQAQPMHSELVKKILGNKATFSPIVTLEPRRRKFHKPITMTIPVPKASSDVMLNGFGGDAPTLRLLCSITGGTTPAQWEDITGTTPLTFVNECVSFTTNVSARFWLIDCRQIQESVTFASQVYREIICVPYMAKFVVFAKSHDPIEARLRCFCMTDDKVDKTLEQQENFAEVARSRDVEVLEGKPIYVDCFGNLVPLTKSGQHHIFSFFAFKENRLPLFVKVRDTTQEPCGRLSFMKEPKSTRGLVHQAICNLNITLPIYTKESESDQEQEEEIDMTSEKNPQDEQERIEERLAYIADHLGFSWTELARELDFTEEQIHQIRIENPNSLQDQSHALLKYWLERDGKHATDTNLVECLTKINRMDIVHLMETNTEPLQERISHSYAEIEQTITLDHSEGFSVLQEELCTAQHKQKEEQAVSKESETCDHPPIVSEEDISVGYSTFQDGVPKTEGDSSATALFPQTHKEQVQQDFSGKMQDLPEESSLEYQQEYFVTTPGTETSETQKAMIVPSSPSKTPEEVSTPAEEEKLYLQTPTSSERGGSPIIQEPEEPSEHREESSPRKTSLVIVESADNQPETCERLDEDAAFEKGDDMPEIPPETVTEEEYIDEHGHTVVKKVTRKIIRRYVSSEGTEKEEIMVQGMPQEPVNIEEGDGYSKVIKRVVLKSDTEQSEDNNE

SEQ ID NO: 67254 - protein, 1207 aa, Homo sapiens
MRTTKVYKLVIHKKGFGGSDDELVVNPKVFPHIKLGDIVEIAHPNDEYSPLLLQVKSLKEDLQKETISVDQTVTQVFRLRPYQDVYVNVVDPKDVTLDLVELTFKDQYIGRGDMWRLKKSLVSTCAYITQKVEFAGIRAQAGELWVKNEKVMCGYISEDTRVVFRSTSAMVYIFIQMSCEMWDFDIYGDLYFEKAVNGFLADLFTKWKEKNCSHEVTVVLFSRTFYDAKSVDEFPEINRASIRQDHKGRFYEDFYKVVVQNERREEWTSLLVTIKKLFIQYPVLVRLEQAEGFPQGDNSTSAQGNYLEAINLSFNVFDKHYINRNFDRTGQMSVVITPGVGVFEVDRLLMILTKQRMIDNGIGVDLVCMGEQPLHAVPLFKLHNRSAPRDSRLGDDYNIPHWINHSFYTSKSQLFCNSFTPRIKLAGKKPASEKAKNGRDTSLGSPKESENALPIQVDYDAYDAQVFRLPGPSRAQCLTTCRSVRERESHSRKSASSCDVSSSPSLPSRTLPTEEVRSQASDDSSLGKSANILMIPHPHLHQYEVSSSLGYTSTRDVLENMMEPPQRDSSAPGRFHVGSAESMLHVRPGGYTPQRALINPFAPSRMPMKLTSNRRRWMHTFPVGMNPRTQNKDSLEDSVSTSPDPILTLSAPPVVPGFCCTVGVDWKSLTTPACLPLTTDYFPDRQGLQNDYTEGCYDLLPEADIDRRDEDGVQMTAQQVFEEFICQRLMQGYQIIVQPKTQKPNPAVPPPLSSSPLYSRGLVSRNRPEEEDQYWLSMGRTFHKVTLKDKMITVTRYLPKYPYESAQIHYTYSLCPSHSDSEFVSCWVEFSHERLEEYKWNYLDQYICSAGSEDFSLIESLKFWRTRFLLLPACVTATKRITEGEAHCDIYGDRPRADEDEWQLLDGFVRFVEGLNRIRRRHRSDRMMRKGTAMKGLQMTGPISTHSLESTAPPVGKKGTSALSALLEMEASQKCLGEQQAAVHGGKSSAQSAESSSVAMTPTYMDSPRKVSVDQTATPMLDGTSLGICTGQSMDRGNSQTFGNSQNIGEQGYSSTNSSDSSSQQLVASSLTSSSTLTEILEAMKHPSTGVQLLSEQKGLSPYCFISAEVVHWLVNHVEGIQTQAMAIDIMQWPCSSPPPPGTQQEWTTSPASSASGLRWPLWQKSSCTLRFLPFSCPGCLAGQPPMQVGTAPLAEVLEDGARRQHF

SEQ ID NO: 67255 - protein, 250 aa, Homo sapiens [sequence omitted]

SEQ ID NO: 67256 - protein, 409 aa, Homo sapiens
MPISSPTTSQPPTIHSSGSSQSSAHSQYNIQNISTGPRKNQIEIKLEPPQRNNSSKLRSSGPRTSSTSSSVNSQTLNRNQPTVYIAASPPNTDELMSRSQPKVYISANAATGDEQVMRNQPTLFISTNSGASAASRNMSGQVSMGPAFIHHHPPKSRAIGNNSATSPRVVVTQPNTKYTFKITVSPNKPPAVSPGVVSPTFELTNLLNHPDHYVETENIQHLTDPTLAHVDRISETRKLSMGSDDAAYTQALLVHQKARMERLQRELEIQKKKLDKLKSEVNEMENNLTRRRLKRSNSISQIPSLEEMQQLRSCNRQLQIDIDCLTKEIDLFQARGPHFNPSAIHNFYDNIGFVGPVPPKPKDQRSIIKTPKTQDTEDDEGAQWNCTACTFLNHPALIRCEQCEMPRHF

SEQ ID NO: 67257 - protein, 81 aa, Homo sapiens
MVGKMWPVLWTLCAEHLGNKSTHRRNLRLPHDLRIHSQGDRRCHLCGNSAGRSSGFAGKECHPALHLPHFHLQSRGTYSMG

SEQ ID NO: 67258 - protein, 275 aa, Homo sapiens
GTISSEIKSARGSHHLSIYAENSLKSDGYHKRTDRKSRIIAKNVSTSKPEFEFTTLDFPELQGAENNMSEIQKQPKWGPVHSVSTDISLLREVVKPAAVLSKGEIVVKNNPNESVTANAATNSPSCTRADPKNVSIPSSEALSSDPSYNKEKHIIHPTQKSKASQGSDLEQNEASRKNKKKKEKSTSKYEVLTVQEPPRIEDAEEFPNLAVASERRDRIETPKFQSKQQPQDNFKNNVKKSQLPVQLDLGGMLTALEKKQHSQHAKQSSKPVVVS

SEQ ID NO: 67259 - protein, 49 aa, Homo sapiens
ATFYGRMLDHEYTTKEVFRKNFFNDWRKAPLLDPLLWPDATPLPFTTAL

SEQ ID NO: 67260 - protein, 652 aa, Homo sapiens
MALSPGANLVFHEDPKMTPSPPSCGAPGLGSGTIPQPHPDMAQVPMLNLLPSPGLALVPDLNDSLSPVSGEASGLVSENTPRPDDSRAIAPASLQITSSCSGEALDLDSKDVSRPDSQGRLCPASNPILSPSSTEAPRLSSGNHPQSNSEDAFKCLSSKIFKLGQRNSNPSRHELNPFIRHHSREGLVLGHCISRPSSKALLIPTSNSSLDLDSNPLLNMGSRNTSKLNLNVAPDSHGTLIPDTNETITLASHNISESVSKGAFSTTWSTSSKETMNVASSGHSRSDLSVTITQASYVTLIPGSSYGISLHSSTHEPNSTISPPSCMTLILGSNETLSLDSSLLFSDTSTLTLSSQQDDAKDNSIHTVPLEENLESWSEMASIKVGQFPLGFPISNPAGKDAVTLQGIPEDGVSLLLPRLECNGAISAHCNLCLPGAFDEVTSCLVKVPEKTEGGNNMALVENVTTLQKSQDLLEAEGEKKTMIKKIMRQIQEEPLDSLSSSVRKQAMEILTQLSHTQPTLGMRERSELVNVCVHSVFSLPSVQAMQEKDEAKAETIQALYHQTLEALQTLLKALFIEDPTPAGLKSILEALGPWMNSGKAHERARAVNTNVSVLNHMLLTLPFFIAIQTDALGVPGAGASAGETHPSHWGS

SEQ ID NO: 67261 - protein, 108 aa, Homo sapiens
MDWGTLHTFIGGVNKHSTSIGKVWITVIFIFRVMILVVAAQEVWGDEQEDFVCNTLQPGCKNVCYDHFFPVSHIRLWALQLIFVSTPALLVAMHVAYYRHETTRKFRR

SEQ ID NO: 67262 - protein, 270 aa, Homo sapiens
MRPGTALQAVLLAVLLVGLRAATGRLLSASDLDLRGGQPVCRGGTQRPCYKVIYFHDTSRRLNFEEAKEACRRDGGQLVSIESEDEQKLIEKFIENLLPSDGDFWIGLRRREEKQSNSTACQDLYAWTDGSISQFRNWYVDEPSCGSEVCVVMYHQPSAPAGIGGPYMFQWNDDRCNMKNNFICKYSDEKPAVPSREAEGEETELTTPVLPEETQEEDAKKTFKESREAALNLAYILIPSIPLLLLLVVTTVVCWVWICRKRQKTGAARP

SEQ ID NO: 67263 - protein, 335 aa, Homo sapiens
MGSSEPLPIADGDRRRKKKRRGRATDSLPGKFEDMYKLTSELLGEGAYAKVQGAVSLQNGKEYAVKIIEKQAGHSRSRVFREVETLYQCQGNKNILELIEFFEDDTRFYLVFEKLQGGSILAHIQKQKHFNEREASRVVRDVAAALDFLHTKGIAHRDLKPENILCESPEKVSPVKICDFDLGSGMKLNNSCTPITTPELTTPCGSAEYMAPEVVEVFTDQATFYDKRCDLWSLGVVLYIMLSGYPPFVGHCGADCGWDRGEVCRVCQNKLFESIQEGKYEFPDKDWAHISSEAKDLISKLLVRDAKQRLSAAQVLQHPWVQGEQQHNGPDALRS

SEQ ID NO: 67264 - protein, 42 aa, Homo sapiens
MSYFGEHFWGEKNHGFEVLYHSVKQGPISTKELADFIRERAT

SEQ ID NO: 67265 - protein, 184 aa, Homo sapiens
LSQKGYLKKENMAALCRTAESQEKDRAGDQFADSDPKPESSLGLHLQAELQCTQLDLERKLKLNENAISRLQANQKSVLVSVSEVKAVAEMQFGELLAAVRKAQANVMLFLEEKEQAALSQANGIKAHLEYRSAEMEKSKQELERMAAISNTVQFLEEYCKFKNTEDITFPSVYVGLKDKLSGI

SEQ ID NO: 67266 - protein, 29 aa, Homo sapiens
MRLTRCQAALAAAITLNLLVLFYVSWLQH

SEQ ID NO: 67267 - protein, 107 aa, Homo sapiens
GRPYMASRPPGDLAEAGGRALQSLQLRLLTPTFEGINGLLLKQHLVQNPVRLWQLLGGTFYFNTSRLKQKNKEKDKSKGKAPEEDEEGFWQQNLPVVLQAAVHEVCI

SEQ ID NO: 67268 - protein, 1937 aa, Homo sapiens
MASGLGSPSPCSAGSEEEDMDALLNNSLPPPHPEDPEEDLSETETPKLKKKKKPKKPRDPKIPKSKRQKKERMLLCRQLGDSSGEGPEFVEEEEEVALRSDSEGSDYTPGKKKKKKLGPKKEKKSKSKRKEEEEEEDDDDDSKEPKSSAQLLEDWGMEDIDHVFSEEDYRTLTNYKAFSQFVRPLIAAKNPKIAVSKMMMVLGAKWREFSTNNPFKGSSGASVAAAAAAAVAVVESMVTATEVAPPPPPVEVPIRKAKTKEGKGPNARRKPKGSPRVPDAKKPKPKKVAPLKIKLGGFGSKRKRSSSEDDDLDVESDFDDASINSYSVSDGSTSRSSRSRKKLRTTKKKKKGEEEVTAVDGYETDHQDYCEVCQQGGEIILCDTCPRAYHMVCLDPDMEKAPEGKWSCPHCEKEGIQWEAKEDNSEGEEILEEVGGDLEEEDDHHMEFCRVCKDGGELLCCDTCPSSYHIHCLNPPLPEIPNGEWLCPRCTCPALKGKVQKILIWKWGQPPSPTPVPRPPDADPNTPSPKPLEGRPERQFFVKWQGMSYWHCSWVSELQLELHCQVMFRNYQRKNDMDEPPSGDFGGDEEKSRKRKNKDPKFAEMEERFYRYGIKPEWMMIHRILNHSVDKKGHVHYLIKWRDLPYDQASWESEDVEIQDYDLFKQSYWNHRELMRGEEGRPGKKLKKVKLRKLERPPETPTVDPTVKYERQPEYLDATGGTLHPYQMEGLNWLRFSWAQGTDTILADEMGLGKTVQTAVFLYSLYKEGHSKGPFLVSAPLSTIINWEREFEMWAPDMYVVTYVGDKDSRAIIRENEFSFEDNAIRGGKKASRMKKEASVKFHVLLTSYELITIDMAILGSIDWACLIVDEAHRLKNNQSKFFRVLNGYSLQHKLLLTGTPLQNNLEELFHLLNFLTPERFHNLEGFLEEFADIAKEDQIKKLHDMLGPHMLRRLKADVFKNMPSKTELIVRVELSPMQKKYYKYILTRNFEALNARGGGNQVSLLNVVMDLKKCCNHPYLFPVAAMEAPKMPNGMYDGSALIRASGKLLLLQKMLKNLKEGGHRVLIFSQMTKMLDLLEDFLEHEGYKYERIDGGITGNMRQEAIDRFNAPGAQQFCFLLSTRAGGLGINLATADTVIIYDSDWNPHNDIQAFSRAHRIGQNKKVMIYRFVTRASVEERITQVAKKKMMLTHLVVRPGLGSKTGSMSKQELDDILKFGTEELFKDEATDGGGDNKEGEDSSVIHYDDKAIERLLDRNQDETEDTELQGMNEYLSSFKVAQYVVREEEMGEEEEVEREIIKQEESVDPDYWEKLLRHHYEQQQEDLARNLGKGKRIRKQVNYNDGSQEDRGVCGRPRPPPMGRSTRAVGPAHLPSLPPDWQDDQSDNQSDYSVASEEGDEDFDERSEAPRRPSRKGLRNDKDKPLPPLLARVGGNIEVLGFNARQRKAFLNAIMRYGMPPQDAFTTQWLVRDLRGKSEKEFKAYVSLFMRHLCEPGADGAETFADGVPREGLSRQHVLTRIGVMSLIRKKVQEFEHVNGRWSMPELAEVEENKKMSQPGSPSPKTPTPSTPGDTQPNTPAPVPPAEDGIKIEENSLKEEESIEGEKEVKSTAPETAIECTQAPAPASEDEKVVVEPPEGEEKVEKAEVKERTEEPMETEPKGAADVEKVEEKSAIDLTPIVVEDKEEKKEEEEKKEVMLQNGETPKDLNDEKQKKNIKQRFMFNIADGGFTELHSLWQNEERAATVTKKTYEIWHRRHDYWLLAGIINHGYARWQDIQNDPRYAILNEPFKGEMNRGNFLEIKNKFLARRFKLLEQALVIEEQLRRAAYLNMSEDPSHPSMALNTRFAEVECLAESHQHLSKESMAGNKPANAVLHKVLKQLEELLSDMKADVTRLPATIARIPPVAVRLQMSERNILSRLANRAPEPTPQQVAQQQ

SEQ ID NO: 67269 - protein, 82 aa, Homo sapiens
  MOD_RES (1)..(1): Any amino acid
XSYDTGSHPASAIYSVETINDGNFHIVELLALDQSLSLSVDGGNPKIITNLSKQSTLNFDSPLYVGGMPGKSNVASLRQGAL

SEQ ID NO: 67270 - protein, 237 aa, Homo sapiens
  MOD_RES (1)..(1): Any amino acid
XVASMRLAYQELQIDRKKEEKKLQNLEGKKREQAESSVSHSVLSEMQVIEQETPVSAKSSRSQLDLFDDVGTFASGPPKYKDNPFSLGESFGSRWDTDAAWGMDRVEEKEPEVTISSIRPISERATNRREVESRSSGLESSEARQKFAGAKAISSDMFFGREVDAEYEARSRLQQLSGSSAISSSDLFGDMDGAHGAGSVSLGNVLPTADIAQFKQGVKSVAGKMAVLANGVMNSLQ

SEQ ID NO: 67271 - protein, 139 aa, Homo sapiens
AGLDSSFYGHLKRNWIWTSYIINQAKKENTAAENGLTVRLQTFLSKRPMPLSARGNSRLNIWGEARVGSELCAGWEEQFEVDREPSLDRNRRVRGGKSQKRKRLKKDPGKKIKRKKKGYVKKAKGCATMMKPTRVPCSG

SEQ ID NO: 67272 - protein, 75 aa, Homo sapiens
MVTEKAAYIGTSNWSEDYFSSTAGVGLVVTQSPGAQPAGATVQEQLRQLFERDWSSRYAVGLDGQAPGQDCVWQG

SEQ ID NO: 67273 - protein, 66 aa, Homo sapiens
MAAMSLLRRVSVTAVAALSGRPLGTRLGFGGFLTRGFPKAAEILHCIDWDSSSNFHNSGECIHWSS

SEQ ID NO: 67274 - protein, 160 aa, Homo sapiens
MASSSVPPATVSAATAGPGPGFGFASKTKKKHFVQQKINELSQVPPPVMLLPDDFKASSKIKVNNHLFHRENLPSHFKFKEYCPQVFRNLRDRFGIDDQDYLVSLTRNPPSESEGSDGRFLISYDRTLVIKEVSSEDIADMHSNLSNYHQYIVKCHGNTL

SEQ ID NO: 67275 - protein, 176 aa, Homo sapiens
  MOD_RES (1)..(1): Any amino acid
XFIYSLKQMLLNVEANSAKVQEDLEAEFQSLFSLLEELKEGMLMKIKQDRASRTYELQNQLAACTRALESSEELLETANQTLQAMDSEDFPQAAKQIKDGVTMAPAFRLSLKAKVSDNMSHLMVDFAQERQMLQALKFLPVPSAPVIDLAESLVPSAVRCLQKRGSATSSSNTSLT

SEQ ID NO: 67276 - protein, 32 aa, Homo sapiens
  MOD_RES (1)..(1): Any amino acid
XQFLENYEKEDITVAELEGNSNSLWTISPPKT

SEQ ID NO: 67277 - protein, 177 aa, Homo sapiens
MDNRFATAFVIACVLSLISTIYMAASIGTDFWYEYRSPVQENSSDLNKSIWDEFISDEADEKTYNDALFRYNGTVGLWRRCITIPKNMHWYSPPERTESFDVVTKCVSFTLTEQFMEKFVDPGNHNSGIDLLRTYLWRCQFLLPFVSLGLMCFGALIGLCACICRSLYPTIATGILH

SEQ ID NO: 67278 - protein, 251 aa, Homo sapiens
GTTEDYDRDKKYGFCPETGYSLFLVAAHEFGHAMGLEHSQDPGALMAPIYTYTKNFRLSQDDIKGIQELYGASPDIDLGTGPTPTLGPVTPEICKQDIVFDGIAQIRGEIFFFKDRFIWRTVTPRDKPMGPLLVATFWPELPEKIDAVYEAPQEEKAVFFAGNEYWIYSASTLERGYPKPLTSLGLPPDVQRVDAAFNWSKNKKTYIFAGDKFWRYNEVKKKMDPGFPKLIADAWNAIPDNLDAVVDLQGG

SEQ ID NO: 67279 - protein, 89 aa, Homo sapiens
MPRRKKKVKEVSESRNLEKKDVETTSSVSVKRKRRLEDAFIVISDSDGEEPKEENGLQKTKTKQSNRAKCLAKRKIAQMTEEEQFALAL

SEQ ID NO: 67280 - protein, 927 aa, Homo sapiens
MASDASHALEAALEQMDGIIAGTKTGADLSDGTCEPGLASPASYMNPFPVLHLIEDLRLALEMLELPQERAALLSQIPGPTAAYIKEWFEESLSQVNHHSAASNETYQERLARLEGDKESLILQVSVLTDQVEAQGEKIRDLEVCLEGHQVKLNAAEEMLQQELLSRTSLETQKLDLMTEVSELKLKLVGMEKEQREQEEKQRKAEELLQELRHLKIKVEELENERNQYEWKLKATKAEVAQLQEQVALKDAEIERLHSQLSRTAALHSESHTERDQEIQRLKMGMETLLLANEDKDRRIEELTGLLNQYRKVKEIVMVTQGPSERTLSINEEEPEGGFSKWNATNKDPEELFKQEMPPRCSSPTVGPPPLPQKSLETRAQKKLSCSLEDLRSESVDKCMDGNQPFPVLEPKDSPFLAEHKYPTLPGKLSGATPNGEAAKSPPTICQPDATGSSLLRLNRGRSVSAPVLGDTESGWDDTAVVNDLSSTSSGTESGPQSPLTPDGKRNPKGIKKFWGKIRRTQSGNFYTDTLGMAEFRRGGLRATAGPRLSRTRDSKGQKSDANAPFAQWSTERVCAWLEDFGLAQYVIFARQWVSSGHTLLTATPQDMEKELGIKHPLHRKKLVLAVKAINTKQEEKSALLDHIWVTRWLDDIGLPQYKDQFHESRVDRRMLQYLTVNDLLFLKVTSQLHHLSIKCAIHVLHVNKFNPHCLHRRPADESNLSPSEVVQWSNHRVMEWLRSVDLAEYAPNLRGSGVHGGLIILEPRFTGDTLAMLLNIPPQKTLLRRHLTTKFNALIGPEAEQEKREKMASPAYTPLTTTAKVRPRKLGFSHFGNIRKKKFDESTDYICPMEPSDGVSDSHRVYSGYRGLSPLDAPELDGLDQMAPSEGTVTQIGLLSQDIHRLTTMLSQDQLLNDSRLPAPNSDDWR

SEQ ID NO: 67281 - protein, 277 aa, Homo sapiens
MNSTVRQLRVPSHVPLRDPSWESLRNVPKLKKSRGMQGEQGRRLFRLLLNDLPGRDRLPCSYPQPHVEQASTSASPRLLAVNIPEDTLLSYPESSLPLQRHCAFHRFSKAKFESLFRTYDKDITFQYFKSFKRVRINFSNPFSAADARLQLHKTEFLGKEMKLYFAQTLHIGSSHLAPPNPDKQFLISPPASPPVGWKQVEDATPVINYDLLYAISKLGPGEKYELHAATDTTPSVVVHVCESDQEKEEEEEMERMRRPKPKIIQTRRPEYTPIHLS

SEQ ID NO: 67282 - protein, 166 aa, Homo sapiens
MESGALDDFDKAKPSPAPPSTTTAPDASGPQKRSPGDTAKDALFASQEKFFQELFDSELASQATAEFEKAMKELAEEEPHLVEQFQKLSEAAGRVELQHVGRRADQGHGGARHGRRGWGREHPPHHAEYYAEPTLQGCAVPITEGDHRKVSRMVAESSGISTSRAV

SEQ ID NO: 67283 - protein, 799 aa, Homo sapiens
MNGDSRAAVVTSPPPTTAPHKERYFDRVDENNPEYLRERNMAPDLRQDFNMMEQKKRVSMILQSPAFCEELESMIQEQFKKGKNPTGLLALQQIADFMTTNVPNVYPAAPQGGMAALNMSLGMVTPVNDLRGSDSIAYDKGEKLLRCKLAAFYRLADLFGWSQLIYNHITTRVNSEQEHFLIVPFGLLYSEVTASSLVKINLQGDIVDRGSTNLGVNQAGFTLHSAIYAARPDVKCVVHIHTPAGAAVSAMKCGLLPISPEALSLGEVAYHDYHGILVDEEEKVLIQKNLGPKSKVLILRNHGLVSVGESVEEAFYYIHNLVVACEIQVRTLASAGGPDNLVLLNPEKYKAKSRSPGSPVGEGTGSPPKWQIGEQEFEALMRMLDNLGYRTGYPYRYPALREKSKKYSDVEVPASVTGYSFASDGDSGTCSPLRHSFQKQQREKTRWLNSGRGDEASEEGQNGSSPKSKTKVWTNITHDHVKPLLQSLSSGVCVPSCITNCLWTKEDGHRTSTSAVPNLFVPLNTNPKEVQEMRNKIREQNLQDIKTAGPQSQVLCGVVMDRSLVQDAPLSDCTETIEGLELTEQTFSPAKSLSFRKGELVTASKAIIEKEYQPHVIVSTTGPNPFTTLTDRELEEYRREVERKQKGSEENLDEAREQKEKSPPDQPAVPHPPPSTPIKLEEDLVPEPTTGDDSDAATFKPTLPDLSPDEPSEALGFPMLEKEEEAHRPPSPTEAPTEASPEPAPDPAPVAEEAAPSAVEEGAAADPGSDGSPGKSPSKKKKKFRTPSFLKKSKKKSDS

SEQ ID NO: 67284 - protein, 53 aa, Homo sapiens
MAGRVPSLLVLLVFPSSCLAFRSPLSVFKRFKETTRPFSNECLGTTRPVVPID

SEQ ID NO: 67285 - protein, 392 aa, Homo sapiens
MAAVATCGSVAASTGSAVATASKSNVTSFQRRGPRASVTNDSGPRLVSIAGTRPSVRNGQLLVSTGLPALDQLLGGGLAVGTVLLIEEDKYNIYSPLLFKYFLAEGIVNGHTLLVASAKEDPANILQELPAPLLDDKCKKEFDEDVYNHKTPESNIKMKIAWRYQLLPKMEIGPVSSSRFGHYYDASKRMPQELIEASNWHGFFLPEKISSTLKVEPCSLTPGYTKLLQFIQNIIYEEGFDGSNPQKKQRNILRIGIQNLGSPLWGDDICCAENGGNSHSLTKFLYVLRGLLRTSLSACIITMPTHLIQNKAIIARVTTLSDVVVGLESFIGSERETNPLYKDYHGLIHIRQIPRLNNLICDESDVKDLAFKLKRKLFTIEVREFLCFSLQS

SEQ ID NO: 67286 - protein, 45 aa, Homo sapiens
MATSIGVSFSVGDGVPEAEKNAGEPENTYILRPVFQQRRVQALCG

SEQ ID NO: 67287 - protein, 158 aa, Homo sapiens
MDGEDIPDFSSLKEETAYWKELSLKYKQSFQEARDELVEFQEGSRELEAELEAQLVQAEQRNRDLQADNQRLKYEVEALKEKLEHQYAQSYKQVSVLEDDLSQTRAIKEQLHKYVRELEQANDDLERAKRATIVSLEDFEQRLNQAIERNAFLESELD

SEQ ID NO: 67288 - protein, 198 aa, Homo sapiens
MLWKLVENVKYEDIYEMLVHTYSSMDRHDGVPSHSSRLSQLGSVSQGPYSSAPPLSHTPSSDFQPPYFPPPYQPLPYHQSQDPYSHVNDPYSLNPLHQPQQHPWGQRQRQEVGSEAGSLLPQPRAALPQLSGLDPRRDYHSVRRPDVLLHSAHHGLDAGMGDSLSLHGLGHPGMEDVQSVEDANNSGMNLLDQSVIKK

SEQ ID NO: 67289 - protein, 402 aa, Homo sapiens
MIVPAAPYLPGLIQGNQEAAAAPDTMAQPYASAQFAPPQNGIPAEYTAPHPHPAPEYTGQTTVPEHTLNLYPPAQTHSEQSPADTSAQTVSGTATQTDDAAPTDGQPQTQPSENTENKSQPKRLHVSNIPFRFRDPDLRQMFGQFGKILDVEIIFNERGSKGFGFVTFENSADADRAREKLHGTVVEGRKIEVNNATARVMTNKKTVNPYTNGWKLNPVVGAVYSPEFYAGTVLLCQANQEGSSMYSAPSSLVYTSAMPGFPYPAATAAAAYRGAHLRGRGRTVYNTFRAAAPPPPIPAYGGVVYQDGFYGADIYGGYAAYRYAQPTPATAAAYSDSYGRVYAADPYHHALAPAPTYGVGAMNAFAPLTDAKTRSHADDVGLVLSSLQASIYRGGYNRFAPY

SEQ ID NO: 67290 - protein, 87 aa, Homo sapiens
MTTFDHQNSENVKLFSAFSGSSDWDNLIVHSRQPQKKPHSVSNGSPVCMSKLTKSLPASPSTSDFCQTRSCISEHRYLSIGDLFTCF

SEQ ID NO: 67291 - protein, 107 aa, Homo sapiens
  MOD_RES (1)..(1): Any amino acid
XDAYWEKLYVDQAAGTPLLYVHALRDAPEEVPSFRLGQHLYGTYRTRLHENNWICIQEDTGLLYLNRSLDHSSWEKLSVRNLTSLCRPRLSPAHRLPQGLPVTHIPS

SEQ ID NO: 67292 - protein, 117 aa, Homo sapiens
MPAALVENSQVICEVWASNLEEEMRKIREIVLSYSYIAMDTEFPGVVVRPIGEFRSSIDYQYQLLRCNVDLLKIIQLGLTFTNEKGEYPSGINTWQFNFKFNLTYKKEKVNNNTCVA

SEQ ID NO: 67293 - protein, 33 aa, Homo sapiens
GTPGMRHSLPNSRIMIHQPSGGARSPPWRGTAT

SEQ ID NO: 67294 - protein, 36 aa, Homo sapiens
MLPPKHLSATKPKKSWAPNLYELDSDLTKEPDVIIG

SEQ ID NO: 67295 - protein, 141 aa, Homo sapiens
  MOD_RES (1)..(1): Any amino acid
XNSLPNKDHRNDIMLVKMASPVSITWAVRPLTLSSRCVTAGTSCLISGWGSTSSPQLRLPHTLRCANITIIEHQKCENAYPGNITDTMVCASVQEGGKDSCQSLQGIISWGQDPCAITRKPGVYTKVCKYVDWIQETMKNN

SEQ ID NO: 67296 - protein, 361 aa, Homo sapiens
AVPSDGQAREKLALYVYEYLLHVGAQKSAQTFLSEIRWEKNITLGEPPGFLHSWWCVFWDLYCAAPERRDTCEHSSEAKAFHDYSAAAAPSPVLGNIPPNDGMPGGPIPPGFFQPFMSPRYAGGPRPPIRMGNQPPGGVPGTQPLLPNSMDPTRQQGHPNMGGSMQRMNPPRGMGPMGPGPQNYGSGMRPPPNSLGPAMPGINMGPGAGRPWPNPNSANSIPYSSSSPGTYVGPPGGGGPPGTPIMPSPADSTNSSDNIYTMINPVPPGGSRSNFPMGPGSDGPMGGMGGMEPHHMNGSLGSGDIDGLPKNSPNNISGISNPPGTPRDDGELGGNFLHSFQNDNYSPSMTMSVSPLLRDAE

SEQ ID NO: 67297 - protein, 188 aa, Homo sapiens
MSFLVSKPERIRRWVSEKFIVEGLRDLELFGEQPPGDTRRKTNDASSESIASFSKQEVMSSFLPEGGCYELLTVIGKGFEDLMTVNLARYKPTGEYVTVRRINLEACSNEMVTFLQGELHVSKLFNHPNIVPYRATFIADNELWVVTSFMAYGSAKDLICTHFMDGMNELAIAYILQGVLKALDYIHH

SEQ ID NO: 67298 - protein, 815 aa, Homo sapiens
MLQLWKVVRPARQLELHRLILLLIAFSLGSMGFLAYYVSTSPKAKEPLPLPLGDCSSGGAAGPGPARPPVPPRPPRPPETARTEPVVLVFVESAYSQLGQEIVAILESSRFRYSTELAPGRGDMPTLTDNTHGRYVLVIYENLLKYVNLDAWSRELLDRYCVEYGVGIIGFFRAHEHSLLSAQLKGFPLFLHSNLGLRDYQVNPSAPLLHLTRPSRLEPGPLPGDDWTIFQSNHSTYEPVLLASLRPAEPAVPGPVLRRARLPTVVQDLGLHDGIQRVLFGHGLSFWLHKLIFVDAVAYLTGKRLCLDLDRYILVDIDDIFVGKEGTRMKVADVEALLTTQNKLRTLVPNFTFNLGFSGKFYHTGTEEEDAGDDMLLKHRKEFWWFPHMWSHMQPHLFHNRSVLADQMRLNKQFALEHGIPTDLGYAVAPHHSGVYPIHTQLYEAWKSVWGIQVTSTEEYPHLRPARYRRGFIHNGIMVLPRQTCGLFTHTIFYNEYPGGSRELDRSIRGGELFLTVLLNPISIFMTHLSNYGNDRLGLYTFESLVRFLQCWTRLRLQTLPPVPLAQKYFELFPQERSPLWQNPCDDKRHKDIWSKEKTCDRLPKFLIVGPQKTGTTAIHFFLSLHPAVTSSFPSPSTFEEIQFFNSPNYHKGIDWYMDFFPVPSNASTDFLFEKSATYFDSEVVPRRGAALLPRAKIITVLTNPADRAYSWYQHQRAHGDPVALNYTFYQVISASSQTPLALRSLQNRCLVPGYYSTHLQRWLTYYPSGQLLIVDGQELRTNPAASMESIQKFLGLMMIRDFGARDLKVVRLAV

SEQ ID NO: 67299 - protein, 124 aa, Homo sapiens
PSKLCRHSLKCLECNEVFQDETSLATHFQQAADTSGQQMKKHPCRQCDKSFSSSHSLCRHNRIKHKGIRKVYACSHCPDSRRTFTKRLMLEKHVQLMHGIKDPDLKEMTDATNEEETEIKEDTK

SEQ ID NO: 67300 - protein, 408 aa, Homo sapiens
DRKHADSILEKYVTEIVMSIVTTFFSSPFSDQSTTLQTRQPVFVQLLQGVFRVYHCNWLMPSQKASVESCIRVLSDVAKSRAIAIPVDLDSQVNNLFLKSHSIVQKTAMNWRLSARNAARRDSVLAASRDYRNIIERLQDIVSALEDRLRPLVQAELSVLVDVLHRPELLFPENTDARRKCESGGFICKLIKHTKQLLEENEEKLCIKVLQTLREMMTKDRGYGEKLISIDELDNAELPPAPDSENATEELEPSPPLRQLEDHKRGEALRQVLVNRYYGNVRPSGRRESLTSFGNGPLSAGGPGKPGGGGGGSGSSSMSRGEMSLAEVQCHLDKEGASNLVIDLIMNASSDRVFHESILLAIALLEGGNTTIQLYQFEKSQNLSPQEIEPLTRIRGCAHTMLCLKDDI

SEQ ID NO: 67301 - protein, 56 aa, Homo sapiens
MFSLMASCCGWFKRWREPVRKVTLLMVGLDNAGKTATAKGIQGGTMFSNLGVWKEN

SEQ ID NO: 67302 - protein, 77 aa, Homo sapiens
MKRRMFPRPCLARMPGSRGSRVLVDARDKLGIPWQYSENEKHGMFLMAFENKAGLPVEPATFQLYVPALSALWRDSG

SEQ ID NO: 67303 - protein, 151 aa, Homo sapiens
MSKPHSEAGTAFIQTQQLHAAMADTFLEHMCRLDIDSPPITARNTGIICTIGPASRSVETLKEMIKSGMNVARLNFSHGTHEYHAETIKNVRTATESFASDPILYRPVAVALDTKGPEIRTGLIKGSGTAEVELKKGATLKITLDNAYMEK

SEQ ID NO: 67304 - protein, 150 aa, Homo sapiens
MFILFPVCGSKFKSNSDREARERKRRRQLRASVFALALPLSLGPCWALWVAVPKASATIRGPQRRLLASLLQENTEILGYLLGSVAAFGSWASRIPPLSRIMESRCVAQAGVQWRDLGSLQPSPPNFKQFSCLSLPSSWDYSCQWSCRSC

SEQ ID NO: 67305 - protein, 241 aa, Homo sapiens
MLGVRCLLRSVRFCSSAPFPKHKPSAKLSVRDALGAQNASGERIKIQGWIRSVRSQKEVLFLHVNDGSSLESLQVVADSGLDSRELNFGSSVEVQGQLIKSPSKRQNVELKAEKIKVIGNCDAKDFPIKYKERHPLEYLRQYPHFRCRTNVLGSILRIRSEATAAIHSFFKDSGFVHIHTPIITSNDSEGAGELFQLEWGADLRTEHEKYLVKHCGNIPVFVINYPLTLKPFYMRDNEDGP

SEQ ID NO: 67306 - protein, 90 aa, Homo sapiens
  MOD_RES (1)..(1): Any amino acid
XAFYRGYLPNVLGIIPYAGIDLAVYETLKNWWLQQYSHDSADPGILVLLACGTISSTCGQIASYPLALVRTRMQAQDAVSLCFPGWSAMT

SEQ ID NO: 67307 - protein, 150 aa, Homo sapiens
MHTGDPKQDLAYERQYEQQTYQVIPEVIKNFIQYFHKTVSDLIDQKVYELQASRVSSDVIDQKVYEIQDIYENSWTKLTERFFKNTPWPEAEAIAPQVGNDAVFLILYKELYYRHIYAKVSGGPSLEQRFESYYNYCNLFNYILNADGPA

SEQ ID NO: 67308 - protein, 26 aa, Homo sapiens
MASSGTTDVTNRNSPATPPNTLNLRS

SEQ ID NO: 67309 - protein, 69 aa, Homo sapiens
MATAGGGSGADPGSRGLLRLLSFCVLLAVSLSMALHGLCNNPLRHIAGCHVEHVSVTISVCPRNQKNGL

SEQ ID NO: 67310 - protein, 13 aa, Homo sapiens
  MOD_RES (1)..(1): Any amino acid
XNIPGDKARKDFD

SEQ ID NO: 67311 - protein, 30 aa, Homo sapiens
MVLNSLDKMIQLQKNTANIRNICVLAHVDH

SEQ ID NO: 67312 - protein, 7 aa, Homo sapiens
MSLHFLY

SEQ ID NO: 67313 - protein, 84 aa, Homo sapiens
KIAFVIWLLSPYTKGASLIYRKFLHPLLSSKEREIDDYIVQAKERGYETMVNFGRQGLNLAATAAVTAAVKDFWLTSAPLLQSI

SEQ ID NO: 67314 - protein, 66 aa, Homo sapiens
MRHCINCCIQLLPDGAHKQQVNCQGGPHHGHQACPTCKGENKILFRVDSKQMNLLAVLEVRTEGNE

SEQ ID NO: 67315 - protein, 318 aa, Homo sapiens
  MOD_RES (1)..(1): Any amino acid
XVEQFMFQIKTLRKKNQKYHERNSRLKEEQIWHIRHLLKELSEEKAEGLPVVTREDVEEAMKEKWKFERDQEKNLREHYKITLEDTRKKIIKETLLQLDQKKEWATQNAVKLIDKGSYLEIWENDWLKKEVAIHRKEVEELKNAIHELEAENLVLIDQLSNCRLVDLKIPRRLYLTQAAGLEVPPEEMSLELPETHIEKSELQPTEVESRDLMSSSDESTILHLSHENSIEDLQYVKIDKEENSGTEFGDTDMKYLLYEDEKDFKDYVNLGPLGVKLMSVESKKMPIHFQEKEIPVKLYKDVRSPESHITYKMMKSFL

SEQ ID NO: 67316 - protein, 527 aa, Homo sapiens
MPPNINWKEIMKVDPDDLPRQEELADNLLISLSKVEVNELKSEKQENVIHLFRITQSLMKMKAQEVELALEEVEKAGEEQAKFENQLKTKVMKLENELEMAQQSAGGRDTRFLRNEICQLEKQLEQKDRELEDMEKELEKEKKVNEQLALRNEEAENENSKLRRENKRLKKKNEQLCQDIIDYQKQIDSQKETLLSRRGEDSDYRSQLSKKNYELIQYLDEIQTLTEANEKIEVQNQEMRKNLEESVQEMEKMTDEYNRMKAIVHQTDNVIDQLKKENDHYQLQVQELTDLLKSKNEEDDPIMVAVNAKVEEWKLILSSKDDEIIEYQQMLHNLREKLKNAQLDADKSNVMALQQGIQERDSQIKMLTEQVEQYTKEMEKNTCIIEDLKNELQRNKGASTLSQQTHMKIQSTLDILKEKTKEAERTAELAEADAREKDKELVEALKRLKDYESGVYGLEDAVVEIKNCKNQIKIRDREIEILTKEINKLELKISDFLDENEALRERVVVLGPQIRLLINLDYQITAF

SEQ ID NO: 67317 - protein, 255 aa, Homo sapiens
  MOD_RES (1)..(1): Any amino acid
XSPVTTPLGLIMLKTTSEELACPREDLSVARKEELRKLLLDQVQTVLGLLTGDLLSNLLQSPSSAKLLNQPIPILDVESEYICSLALECLAHLFSWIPLSASITPSLLTTIFHFARFGCDIRARKMASVNGSSQNCVSGQERGRLGVLAMSCINELMSKNCVPMEFEEYLLRMFQQTFYLLQKITKDNNAHTVKSRLEELDESYIEKFTDFLRLFVSVHLRRIESYSQFPVVEFLTLLFKYTFHQPTHEGYFSCL

SEQ ID NO: 67318 - protein, 51 aa, Homo sapiens
MSEESDMDKAIKAASICFRMVYRTWRVGIYPSLPICLKSAFWKSAVGKRKH

SEQ ID NO: 67319 - protein, 91 aa, Homo sapiens
MAASPGSGSANPRKFSEKIALHTQRQAEETRAFEQLMTDLTLSRVQFQKLQQLRLTQYHGGSLPNVSQLRSSASEFQVERNSSPCVDGLRQ

SEQ ID NO: 67320 - protein, 189 aa, Homo sapiens
  MOD_RES (1)..(1): Any amino acid
XRSRGRVRARRAPTVEGLYKADQRFGPGVETYPDGSQDVGLWFREQLIKLCTQIPSGFSLLRYPEFSSFITHSPARISLSEEEKTEWGLQEGQDPFFYDYKRFLLNDNLTLPPEMYVYSTNSDHLPMTSSFRKELDARIFLNEIPPFVEDGEPWFIINETPLLVKIQKQTYKFRLTATTTLSTFSWTVG

SEQ ID NO: 67321 - protein, 185 aa, Homo sapiens
MWEANPEMFHKAEELFSKTTNNEVDDMDTSDTQWGWFYLAECGKWHMFQPDTNSQCSVSSEDIEKSFKTNPCGSISFTTSKFSYKIDFAEMKQMNLTTGKQRLIKRAPFSISAFSYICENEAIPMPPHWENVNTQVPYQLIPLHNQTHEYNEVANLFGKTMDRNRIKRIQRIQNLDLWEFFCRYR

SEQ ID NO: 67322 - protein, 69 aa, Homo sapiens
MVGVKPVGSDPDFQPELSGAGSRLAVVKFTMRGCGPCLRIAPAFSSMSNKYPQAVFLEVDVHQCQYLFL

SEQ ID NO: 67323 - protein, 405 aa, Homo sapiens
MAPEEDAGGEALGGSFWEAGNYRRTVQRVEDGHRLCGDLVSCFQERARIEKAYAQQLADWARKWRGTVEKGPQYGTLEKAWHAFFTAAERLSALHLEVREKLQGQDSERVRAWQRGAFHRPVLGGFRESRAAEDGFRKAQKPWLKRLKEVEASKKSYHAARKDEKTAQTRESHAKADSAVSQEQLRKLQERVERCAKEAEKTKAQYEQTLAELHRYTPRYMEDMEQAFETCQAAERQRLLFFKDMLLTLHQHLDLSSSEKFHELHRDLHQGIEAASDEEDLRWWRSTHGPGMAMNWPQFEEWSLDTQRTISRKEKGGRSPDEVTLTSIVPTRDGTAPPPQSPGSPGTGQDEEWSDEESPRKAATGVRVRALYDYAGQEADELSFRAGEELLKMSEEDEQGWCQGQ

SEQ ID NO: 67324 - protein, 171 aa, Homo sapiens
LDTELDLYKKMQAGEEVTELRRKYTELQLEAAKRGILSSGRGRGIHSRGRGAVHGRGRGRGRGRGVPGHAVVDHRPRALEISAFTESDREDLLPHFAQYGEIEDCQIDDSSLHAVITFKTRAEAEAAAVHGARFKGQDLKLAWNKPVTNISAVETEEVEPDEEEQREIIIA

SEQ ID NO: 67325 - protein, 123 aa, Homo sapiens
MSSDRQRSDDESPSTSSGSSDADQRDPAAPEPEEQEERKPSATQQKKNTKLSSKTTAKLSTSAKRIQKELAEITLDPPPNCSAGPKGDNIYEWRSTILGPPGSVYEGGVFFLDITFSSDYPFK

SEQ ID NO: 67326 - protein, 96 aa, Homo sapiens
MPAVASVPKELYLSSSLKDLNKKTEVKPEKISTKSYVHSALKIFKTAEECRLDRDEERAYVLYMKYVTVYNLIKKRPDFKQQQDYFHSILGPGNIK

SEQ ID NO: 67327 - protein, 504 aa, Homo sapiens
GMGAGPACPLPPLAGGEAFPFPSPEQGLALSGAGFPGMLGALPLPLSLGQPPPSPLLNHSLFGVLTGGGGQPPPEPLLPPPGGPGPPLAPGEPEGPSLLVASLLPPPPSDLLPPPSAPPSNLLASFLPLLALGPTAGDGEGSAEGAGGPSGEPFSGLGDLSPLLFPPLSAPPTLIALNSALLAATLDPPSGTPPQPCVLSAPQPGPPTSSVTTATTDPGASSLGKAPSNSGRPPQLLSPLLGASLLGDLSSLTSSPGALPSLLQPPGPLLSGQLGLQLLPGGGAPPPLSEASSPLACLLQSLQIPPEQPEAPCLPPESPASALEPEPARPPLSALAPPHGSPDPPVPELLTGRGSGKRGRRGGGGLRGINGEARPARGRKPGSRREPGRLALKWGTRGGFNGQMERSPRRTHHWQHNGELAEGGAEPKDPPPPGPHSEDLKVPPGVVRKSRRGRRRKYNPTRNSNSSRQDITLEPSPTARAAVPLPPRARPGRPAKNKRRKLAP

SEQ ID NO: 67328 - protein, 47 aa, Homo sapiens
MAAAGWRDGSGQEKYRLVVVGGGGVGKSALTIQFIQNHLLKKYLHCE

SEQ ID NO: 67329 - protein, 216 aa, Homo sapiens
MEGAPPGSLALRLLLFVALPASGWLTTGAPEPPPLSGAPQDGIRINVTTLKDDGDISKQQVVLNITYESGQVYVNDLPVNSGVTRISCQTLIVKNENLENLEEKEYFGIVSVRILVHEWPMTSGSSLQLIVIQEEVVEIDGKQVQQKDVTEIDILVKNRGVLRHSNYTLPLEESMLYSISRDSDILFTLPNLSKKEKVLVHCKPLASILSGMWKPL

SEQ ID NO: 67330 - protein, 255 aa, Homo sapiens
  MOD_RES (1)..(1): Any amino acid
XTSHGFYEEEVKKTLQQFPGGSIDLQKEDNGIGILTLNNPSRMNAFSGVMMLQLLEKVIELENWTEGKGLIVRGAKNTFSSGSDLNAVKSLGTPEESCRWNTEFLYTLHPVSPFINILYSYGWNGRMHVHAKHLNKIYEVKKQRGKILLGLSRLPLISVALVQGWALGGGAEFTTACDFRLMTPESKIRFVHKEMGIIPSWGGTTRLVEIIGSRQALKVLSGALKLDSKNALNIGMVEEVLQSSDETKSLEEAQE

SEQ ID NO: 67331 - protein, 139 aa, Homo sapiens
MREYKLVVLGSGGVGKSALTVQFVQGIFVEKYDPTIEDSYRKQVEVDAQQCMLEILDTAGTEQFTAMRDLYMKNGQGFALVYSITAQSTFNDLQDLREQILRVKDTDDVPMILVGNKCDLEDERVVGKEQGQNLARQWN

SEQ ID NO: 67332 - protein, 237 aa, Homo sapiens
MAKPTSKDSGLKEKFKILLGLGTPRPNPRSAEGKQTEFIITAEILRELSMECGLNNRIRMIGQICEVAKTKKFEEHAVEALWKAVADLLQPERPLEARHAVLALLKAIVQGQGERLGVLRALFFKVIKDYPSNEDLHERLEVFKALTDNGRHITYLEEELADFVLQWMDVGLSSEFLLVLVNLVKFNSCYLDEYIARMVQMLHELCLTHAEHPAPRAVAGAQQAPECLLGGWDPQGG

SEQ ID NO: 67333 - protein, 502 aa, Homo sapiens
MRNWLVLLCPCVLGAALHLWLRLRSPPPACASGAGPAGGVSLLLPRLECNGAVSAHPNLHLPGSRDSPASASQVAGITDQLALFPQWKSTHYDVVVGVLSARNNHELRNVIRSTWMRHLLQHPTLSQRVLVKFIIGAHGCEVPVEDREDPYSCKLLNITNPVLNQEIEAFSLSEDTSSGLPEDRVVSVSFRVLYPIVITSLGVFYDANDVGFQRNITVKLYQAEQEEALFIARFSPPSCGVQVNKLWYKPVEQFILPESFEGTIVWESQDLHGLVSRNLHKVTVNDGGGVLRVITAGEGALPHEFLEGVEGVAGGFIYTIQEGDALLHNLHSRPQRLIDHIRNLHEEDALLKEESSIYDDIVFVDVVDTYRNVPAKLLNFYRWTVETTSFNLLLKTDDDCYIDLEAVFNRIVQKNLDGPNFWWGNFRLNWAVDRTGKWQELEYPSPAYPAFACGSGYVISKDIVKWLASNSGRLKTYQGEDVSMGIWMAAIGPKRYQEYYHL

SEQ ID NO: 67334 - protein, 103 aa, Homo sapiens
MGPLRESKEHRVQHHDKEISRSRIPRLILRPHMPQQQHKVSPASESPFSEEESREFNPSSSGRSARTVSSNSFCSDDTGCPSSQSVSPVKTPSDAGNSPIGFC

SEQ ID NO: 67335 - protein, 1336 aa, Homo sapiens
  MOD_RES (1)..(1): Any amino acid
XLSEGNVEQELRASLAALRLASPEPLVAFSHHVLDKLVRLVIRPPIISGQIVNLGRGAFEAMAHVVSLVHRSLEAAQDARGHCPQLAAYVHYAFRLPGTEPSLPDGAPPVTVQAATLARGSGRPASLYLARSKSISSSNPDLAVAPGSVDDEVSRILASKGIDRSHSWVNSAYAPGGSKAVLRRAPPYCGADPRQLLHEELALQWVVSSSAVREAILQHAWFFFQLMVKSMALHLLLGQRLDTPRKLRFPGRFLDDITALVGSVGLEVITRVHKDVELAEHLNASLAFFLSDLLSLVDRGFVFSLVRAHYKQVATRLQSSPNPAALLTLRMEFTRILCSHEHYVTLNLPCCPLSPPASPSPSVSSTTSQSSTFSSQAPDPKVTSMFELSGPFRQQHFLAGLLLTELALALEPEAEGAFLLHKKAISAVHSLLCGHDTDPRYAEATVKARVAELYLPLLSIARDTLPRLHDFAEGPGQRSRLASMLDSDTEGEGDIAGTINPSVAMAIAGGPLAPGSRASISQGPPTASRAGCALSAESSRTLLACVLWVLKNTEPALLQRWATDLTLPQLGRLLDLLYLCLAAFEYKGKKAFERINSLTFKKSLDMKARLEEAILGTIGARQEMVRRSRERSPFGNPENVRWRKSVTHWKQTSDRVDKTKDEMEHEALVEGNLATEASLVVLDTLEIIVQTVMLSEARESVLGAVLKVVLYSLGSAQSALFLQHGLATQRALVSKFPELLFEEDTELCADLCLRLLRHCGSRISTIRTHASASLYLLMRQNFEIGHNFARVKMQVTMSLSSLVGTTQNFSEEHLRRSLKTILTYAEEDMGLRDSTFAEQVQDLMFNLHMILTDTVKMKEHQEDPEMLIDLMYRIARGYQGSPDLRLTWLQNMAGKHAELGNHAEAAQCMVHAAALVAEYLALLEDHRHLPVGCVSFQNISSNVLEESAISDDILSPDEEGFCSGKHFTELGLVGLLEQAAGYFTMGGLYEAVNEVYKNLIPILEAHRDYKKLAAVHGKLQEAFTKIMHQSSGWERVFGTYFRVGFYGAHFGDLDEQEFVYKEPSITKLAEISHRLEEFYTERFGDDVVEIIKDSNPVDKSKLDSQKAYIQITYVEPYFDTYELKDRVTYFDRNYGLRTFLFCTPFTPDGRAHGELPEQHKRKTLLSTDHAFPYIKTRIRVCHREETVLTPVEVAIEDMQKKTRELAFATEQDPPDAKMLQMVLQGSVGPTVNQGPLEVAQVFLAEIPEDPKLFRHHNKLRLCFKDFCKKCEDALRKNKALIGPDQKEYHRELERNYCRLREALQPLLTQRLPQLMAPTPPGLRNSLNRASFRKADL

SEQ ID NO: 67336 - protein, 93 aa, Homo sapiens
DVRNDWETTIENFHVVETLADNAIIIYQTHKRVWPASQRDVLYLSVIRKIPALTENDPETWIVCNFSVDHDSAPLNNRCVRAKINVAMICQTL

SEQ ID NO: 67337 - protein, 118 aa, Homo sapiens
MPANSRDTQGPQNKDKASRTPHRARAHRWLLLYYALCFSLSKASAHTVELNNMFGQIQSPGYPDSYPSDSEVTWNITVPDGFRIKLYFMHFNLESSYLCEYDYVKVETEDQVLATFCG

SEQ ID NO: 67338 - protein, 251 aa, Homo sapiens
MPPTQAESVIRSIIREIGQECAAHGEIVSETLIAFMVKAVVLDPSNGFNMDRTLMKSDVQNLVKLCMTRLLDTKNPSLDTIKMQVYFDMNYTNRVEFLEEHHRVLESRLGSVTREITDNRACAKEELESLYRKIISYVLLRSGLGSPTDIKTVREVTAALQSVFPQAELGTFLTLSKKDKERQLKELTMIVTGIRLFNRDCGKGGEGIDDLPAVLHVAIPATMQHIDYQLETARSQVYRYTAILEKAANDP

SEQ ID NO: 67339 - protein, 251 aa, Homo sapiens
  MOD_RES (1)..(1): Any amino acid
XPDEEGACQPCPINCTHSPLTSIISAVVGILLVVVLGVVFGILIKRRQQKIRKYTMRRLLQETELVEPLTPSGAMPNQAQMRILKETELRKVKVLGSGAFGTVYKGIWIPDGENVKIPVAIKVLRENTSPKANKEILDEAYVMAGVGSPYVSRLLGICLTSTVQLVTQLMPYGCLLDHVRENRGRLGSQDLLNWCMQIAKGMSYLEDVRLVHRDLAARNVLVKSPNHVKITDFGLARLLDIDETEYHADGG

SEQ ID NO: 67340 - protein, 255 aa, Homo sapiens
DSEFPIDMQPNPNLNVSKESLSPAKFDYKLKNIFRLHELPVSCVSMQPHKDILVSCGEDRLWKVLGLPKCNVLLTGFGHTDWLSDCCFHPSERCRCTLYGHTDSVNSIEFFPFSNTLLTSSADKTLSIWDARTGICEQSLYGHMHSINDAIFDPRGHMIASCDACGVTKLWDFRKLLPIVSIDIGPSPGNEVNFDSSGRVLAQASGNGVIHLLDLKSGEIHKLMGHENEAHTVVFSHDGEILFSGGSDGTVRTWS

SEQ ID NO: 67341 - protein, 446 aa, Homo sapiens
MGLEALVPLAMIVAIFLLLVDLMHRHQRWAARYPPGPLPLPGLGNLLHVDFQNTPYCFDQLRRRFGDVFSLQLAWTPVVVLNGLAAVREAMVTRGEDTADRPPAPIYQVLGFGPRSQGRPFRPNGLLDKAVSNVIASLTCGRRFEYDDPRFLRLLDLAQEGLKEESGFLREVLNAVPVLLHIPALAGKVLRFQKAFLTQLDELLTEHRMTWDPAQPPRDLTEAFLAKKEKAKGSPESSFNDENLRIVVGNLFLAGMVTTLTTLAWGLLLMILHLDVQLRVQQEIDDVIGQVRRPEMGDQAHMPYTTAVIHEVQRFGDIIPLSVTHMTSHDIEVQGFRIPKGTTLITNLSSVLKDEAVWKKPFRFHPEHFLDAQGHFVKPEAFLPFSAGRRACLGEPLARMELFLFFTSLLQHFSFSVAAGQPRPSHSRVVSFLVTPSPYELCAVPR

SEQ ID NO: 67342 - protein, 575 aa, Homo sapiens
MLWFSGVGALAERYCRRSPGITCCVLLLLNCSGVPMSLASSFLTGSVAKCENEGEVLQIPFITDNPCIMCVCLNKEVTCKREKCPVLSRDCALAIKQRGACCEQCKGCTYEGNTYNSSFKWQSPAEPCVLRQCQEGVVTESGVRCVVHCKNPLEHLGMCCPTCPGCVFEGVQYQEGEEFQPEGSKCTKCSCTGGRTQCVREVCPILSCPQHLSHIPPGQCCPKCLGQRKVFDLPFGSCLFRSDVYDNGSSFLYDNCTACTCRDSTVVCKRKCSHPGGCDQGQEGCCEECLLRVPPEDIKVCKFGNKIFQDGEMWSSINCTICACVKGRTECRNKQCIPISSCPQGKILNRKGCCPICTESLEISWDGDSFVEVMAAPHLKGKLCGLCGNYNGHKRDDLIGGDGNFKFDVDDFAESWRVESNEFCNRPQRKPVPELCQGTVKVKLRAHRECQKLKSWEFQTCHSTVDYATFYRSCVTDMCECPVHKNCYCESFLAYTRACQREGIKVHWEPQQNCAATQCKHGAVYDTCGPGCIKTCDNWNEIGPCNKPCVAGCHCPANLVLHKGRCIKPVLCPQR

SEQ ID NO: 67343 - protein, 159 aa, Homo sapiens
  MOD_RES (1)..(1): Any amino acid
XPPLLAVTAAPPAQPLAKKKGVKRKADTTTPTPTAILAPGSPASPPGSLEPKAARLPPMRRESGRPIKPPRKDLPDSQQQHQSSKKGKLSEQLKHCNGILKELLSKKHAAYAWPFYKPVDASALGLHDYHDIIKHPMDLSTVKVPTAWGRWDAQAVMGA

SEQ ID NO: 67344 - protein, 903 aa, Homo sapiens
MVLSLTGLIAFSFLQATLALNPEDPNVCSHWESYAVTVQESYAHPFDQIYYTRCTDILNWFKCTRHRISYKTAYRRGLRTMYRRRSQCCPGYYESGDFCIPLCTEECVHGRCVSPDTCHCEPGWGGPDCSSGCDSDHWGPHCSNRCQCQNGALCNPITGACVCAAGFRGWRCEELCAPGTHGKGCQLPCQCRHGASCDPRAGECLCAPGYTGVYCEELCPPGSHGAHCELRCPCQNGGTCHHITGECACPPGWTGAVCAQPCPPGTFGQNCSQDCPCHHGGQCDHVTGQCHCTAGYMGDRCQEECPFGSFGFQCSQHCDCHNGGQCSPTTGACECEPGYKGPRCQERLCPEGLHGPGCTLPCPCDADNTISCHPVTGACTCQPGWSGHHCNESCPVGYYGDGCQLPCTCQNGADCHSITGGCTCAPGFMGEVCAVSCAAGTYGPNCSSICSCNNGGTCSPVDGSCTCKEGWQGLDCTLPCPSGTWGLNCNESCTCANGAACSPIDGSCSCTPGWLGDTCELPCPDGTFGLNCSEHCDCSHADGCDPVTGHCCCLAGWTGIRCDSTCPPGRWGPNCSVSCSCENGGSCSPEDGSCECAPGFRGPLCQRICPPGFYGHGCAQPCPLCVHSSRPCHHISGICECLPGFSGALCNQVCAGGYFGQDCAQLCSCANNGTCSPIDGSCQCFPGWIGKDCSQACPPGFWGPACFHACSCHNGASCSAEDGACHCTPGWTGLFCTQRCPAAFFGKDCGRVCQCQNGASCDHISGKCTCRTGFTGQHCEQRCAPGTFGYGCQQLCECMNNSTCDHVTGTCYCSPGFKGIRCDQAALMMEELNPYTKISPALGAERHSVGAVTGIMLLLFLIVVLLGLFAWHRRRQKEKGRDLAPRVSYTPAMRMTSTDYSLS

SEQ ID NO: 67345 - protein, 41 aa, Homo sapiens
MESLTLEDVAVDFTWEEWQFLSPAQKDLYRDVMLENYSNLV

SEQ ID NO: 67346 - protein, 69 aa, Homo sapiens
MVYHPNIDLEGNVCLNILREDWKPVLTINSIIYGLQYLFLEPNPEDPLNKEAAEVLQNNRRLFEQNVQR

SEQ ID NO: 67347 - protein, 370 aa, Homo sapiens
MPPSGLRLLPLLLPLLWLLVLTPGRPAAGLSTCKTIDMELVKRKRIEAIRGQILSKLRLASPPSQGEVPPGPLPEAVLALYNSTRDRVAGESAEPEPEPEADYYAKEVTRVLMVETHNEIYDKFKQSTHSIYMFFNTSELREAVPEPVLLSRAELRLLRLKLKVEQHVELYQKYSNNSWRYLSNRLLAPSDSPEWLSFDVTGVVRQWLSRGGEIEGFRLSAHCSCDSRDNTLQVDINAPRRRTAACGSCTLTSARTSAGSGSTSPRATMPTSASGPAPTFGAWTRSTARYVWPTGLRDALGGSQDGGRGERKRSKVREVLALYNQHNPGASAAPCCVPQALEPLPIVYYVGRKPKVEQLSNMIVRSCKCS

SEQ ID NO: 67348 - protein, 67 aa, Homo sapiens
MTGGTNKTSSSISEILDKVQEDAEDVLFSLGFGQEDHKDTSRIPARFFTTPSQAKGIDFQLFLKSQV

SEQ ID NO: 67349 - protein, 119 aa, Homo sapiens
MAQSKLDCRSPVGLDCCNCCLDLAHRSGLQRGSSGENNNPGSPTVSNFRQLQEKLVFENLNTDKLNSIMRQDSLEPVLRDPCYLINEGICNRNIDQTMLSILLFFHSASGASVVAIDNK

SEQ ID NO: 67350 - protein, 73 aa, Homo sapiens
  MOD_RES (1)..(1): Any amino acid
XCWLQCAASEPCRAVFREAEVTLEAGGAEQEPGQALGKGKKVTEGKESIEDLPIQTYLTKTQERLGGCSNICP

SEQ ID NO: 67351 - protein, 179 aa, Homo sapiens
VAVFFGGLSIKKDEEVLKKNCPHIVVGTPGRILALARNKSLNLKHIKHFILDECDKMLEQLDMRRDVQEIFRMTPHEKQVMMFSATLSKEIRPVCRKFMQDPMEIFVDDETKLTLHGLQQYYVKLKDNEKNRKLFDLLDVLEFNQVVIFVKSVQRCIALAQLLVEQNFPAIAIHRGMPQ

SEQ ID NO: 67352 - protein, 37 aa, Homo sapiens
MGNPLLDISAVVDKDFLDKYSLKPNDQILAEDKHKEL

SEQ ID NO: 67353 - protein, 25 aa, Homo sapiens
LTRLAAILAKHFADARIVGTGVSPW

SEQ ID NO: 67354 - protein, 65 aa, Homo sapiens
MEMDEDPDNLPAQGQGNIIITKYEQGHRAGAAVDLGHEQVDVRKYTNNLGIVHEMELPRVSALEV

SEQ ID NO: 67355 - protein, 181 aa, Homo sapiens
  MOD_RES (1)..(1): Any amino acid
XVLQKKKKHSTEGVKLTALNDSSLDLSMDSDNSMSVPSPTSATKTSPLNSSGSSQGRNSPAPAVTAASVTNIQATEVSVPQVNSSESSGGTSSESIPQTATQPAISPPPKPTVSRVVSSTRLVNPPPRSSGNAATSGNAATKIPTPIVGVKRTSSPHKEESPKKTKTEEKTSSTDLSDIPA

SEQ ID NO: 67356 - protein, 948 aa, Homo sapiens
MGPWGWKLRWTVALLLAAAGTAVGDRCERNEFQCQDGKCISYKWVCDGSAECQDGSDESQETCLSVTCKSGDFSCGGRVNRCIPQFWRCDGQVDCDNGSDEQGCPPKTCSQDEFRCHDGKCISRQFVCDSDRDCLDGSDEASCPVLTCGPASFQCNSSTCIPQLWACDNDPDCEDGSDEWPQRCRGLYVFQGDSSPCSAFEFHCLSGECIHSSWRCDGGPDCKDKSDEENCAVATCRPDEFQCSDGNCIHGSRQCDREYDCKDMSDEVGCVNVTLCEGPNKFKCHSGECITLDKVCNMARDCRDWSDEPIKECGTNECLDNNGGCSHVCNDLKIGYECLCPDGFQLVAQRRCEDIDECQDPDTCSQLCVNLEGGYKCQCEEGFQLDPHTKACKAVGSIAYLFFTNRHEVRKMTLDRSEYTSLIPNLRNVVALDTEVASNRIYWSDLSQRMICSTQLDRAHGVSSYDTVISRDIQAPDGLAVDWIHSNIYWTDSVLGTVSVADTKGVKRKTLFRENGSKPRAIVVDPVHGFMYWTDWGTPAKIKKGGLNGVDIYSLVTENIQWPNGITLDLLSGRLYWVDSKLHSISSIDVNGGNRKTILEDEKRLAHPFSLAVFEDKVFWTDIINEAIFSANRLTGSDVNLLAENLLSPEDMVLFHNLTQPRGVNWCERTTLSNGGCQYLCLPAPQINPHSPKFTCACPDGMLLARDMRSCLTEAEAAVATQETSTVRLKVSSTAVRTQHTTTRPVPDTSRLPGATPGLTTVEIVTMSHQALGDVAGRGNEKKPSSVRALSIVLPIATELGLWSRGQLCDRACLSLQCSSSSFAWGSSFYGRTGGLRTSTASTLTTPSIRRPQRMRSTFATTRTATATPRDRWSVWRMTWREHLPGVPSLPRTLPETSPALFYSKTEKTKALPARALFYIFIHLGGRTGFGQCPCNGLGWDFGFFLSS

SEQ ID NO: 67357 - protein, 17 aa, Homo sapiens
MASTEEQYDLKIVKVEE

SEQ ID NO: 67358 - protein, 271 aa, Homo sapiens
MASPGCLLCVLGLLLCGAASLELSRPHGDTAKKPIIGILMQKCRNKVMKNYGRYYIAASYVKYLESAGARVVPVRLDLTEKDYEILFKSINGILFPGGSVDLRRSDYAKVAKIFYNLSIQSFDDGDYFPVWGTCLGFEELSLLISGECLLTATDTVDVAMPLNFTGGQLHSRMFQNFPTELLLSLAVEPLTANFHKWSLSVKNFTMNEKLKKFFNVLTTNTDGKIEFISTMEVFLGIFLNGVVKKKSKRIKGARMKKEMKKMTSVSSNIAD

SEQ ID NO: 67359 - protein, 61 aa, Homo sapiens
IMNYYGKGKVRITLVTKNDPYKPHPHDLVGKDCRDGYYEAEFGQERRPLLISKITTTPNIP

SEQ ID NO: 67360 - protein, 98 aa, Homo sapiens
AAAAVEAAAPMGALWGLVHDFVVGQQEGPADQVAADVKSGNYTVLQVVEALGSSLENPEPRTRARAIQLLSQVLLHCHTLLLEKEGTGVTNRNVFLDC

SEQ ID NO: 67361 - protein, 614 aa, Homo sapiens
MGKRQHQKDKMYITCAEYTHFYGGKKPDLPQTNFRRLPFDHCSLSLQPFVYPVCTPDGIVFDLLNIVPWLKKYGTNPSNGEKLDGRSLIKLNFSKNSEGKYHCPVLFTVFTNNTHIVAVRTTGNVYAYEAVEQLNIKAKNFRDLLTDEPFSRQDIITLQDPTNLDKFNVSNFYHVKNNMKIIDPDEEKAKQDPSYYLKNTNAETRETLQELYKEFKGDEILAATMKAPEKKKVDKLNAAHYSTGKVSASFTSTAMVPETTHEAAAIDEDVLRYQFVKKKGYVRLHTNKGDLNLELHCDLTPKTCENFIRLCKKHYYDGTIFHRSIRNFVIQGGDPTGTGTGGESYWGKPFKDEFRPNLSHTGRGILSMANSGPNSNRSQFFITFRSCAYLDKKHTIFGRVVGGFDVLTAMENVESDPKTDRPKEEIRIDATTVFVDPYEEADAQIAQERKTQLKVAPETKVKSSQPQAGSQGPQTFRQGVGKYINPAATKRAAEEEPSTSATVPMSKKKPSRGFGDFSSWLQCSGVIMAHCSLDLLGSSNPPASASQVAGTTAVHHYIQLYMSGFLTPTSVIFSGTAYLYNQCGPLTNAITWDKFSDPRLTEPKPLQGGLLGLF

SEQ ID NO: 67362 - protein, 80 aa, Homo sapiens
REHLVPCEDVLLTKPEGIMQIPRNSHRTTMGCQWRLVAPLNHIIQLNIINFPMKPTTFVCHGHLRVYEGFGPGKKLIGEC

SEQ ID NO: 67363 - protein, 37 aa, Homo sapiens
MALVTLQRSPTPSAASSSASNSELEAGSEEDRKLNLR

SEQ ID NO: 67364 - protein, 53 aa, Homo sapiens
MAVVKTPSRGLKNAKEPFNNASPHLLKNLVEEPKKRKEVPNHLLESTSGQCFQ

SEQ ID NO: 67365 - protein, 57 aa, Homo sapiens
MGEPAGVAGTMESPFSPGLFHRLDEDWDSALFAELGYFTDTDELQLEAANETYILCF

SEQ ID NO: 67366 - protein, 264 aa, Homo sapiens
LLSSEYIERHIEHGGKTVEVKGGEHCYYQGHIRGNPDSFVALSTCHGLHGMFYDGNHTYLIEPEENDTTQEDFHFHSVYKSRLFEFSLDDLPSEFQQVNITPSKFILKPRPKRSKRQLRRYPRNVEEETKYIELMIVNDHLMFKKHRLSVVHTNTYAKSVVNMADLIYKDQLKTRIVLVAMETWATDNKFAISENPLITLREFMKYRRDFIKEKSDAVHLFSGSQFESSRSGAAYIGGICSLLKGGGVNEVGVNICTIQSVWEN

SEQ ID NO: 67367 - protein, 71 aa, Homo sapiens
MEEKYGGDVLAGPGGGGGLGPVDVPSARTAFFMVLFQKPFSSGKTITKHQWIKIFKHAVAGCIISLLWFFG

SEQ ID NO: 67368 - protein, 1210 aa, Homo sapiens
MEADGAGEQMRPLLTRVTSRGPDEEAVVDLGKTSSTVNTKFEKEELESHRAVYIGVHVPFSKESRRRHRHRGHKHHHRRRKDKESDKEDGRESPSYDTPSQRVQFILGTEDDDEEHIPHDLFTEMDELCYRDGEEYEWKETARWLKFEEDVEDGGDRWSKPYVATLSLHSLFELRSCILNGTVMLDMRASTLDEIADMVLDNMIASGQLDESIRENVREALLKRHHHQNEKRFTSRIPLVRSFADIGEGLSASRHSLRTGLSASNLSLRGESPLSLLLGHLLPSSRAGTPAGSRCTTPVPTPQNSPPSSPSISRLTSRSSQESQRQAPELLVSPASDDIPTVVIHPPEEDLEAALKGEEQKNEENVDLTPGILASPQSAPGNLDNSKSGEIKGNGSGGSRENSTVDFSKVDMNFMRKIPTGAEASNVLVGEVDFLERPIIAFVRLAPAVLLTGLTEVPVPTRFLFLLLGPAGKAPQYHEIGRSIATLMTDEIFHDVAYKAKDRNDLLSGIDEFLDQVTVLPPGEWDPSIRIEPPKSVPSQEKRKIPVFHNGSTPTLGETPKEAAHHAGPELQRTGRLFGGLILDIKRKAPFFLSDFKDALSLQCLASILFLYCACMSPVITFGGLLGEATEGRISAIESLFGASLTGIAYSLFAGQPLTILGSTGPVLVFEKILYKFCRDYQLSYLSLRTSIGLWTSFLCIVLVATDASSLVCYITRFTEEAFAALICIIFIYEALEKLFDLGETYAFNMHNNLDKLTSYSCVCTEPPNPSNETLAQWKKDNITAHNISWRNLTVSECKKLRGVFLGSACGHHGPYIPDVLFWCVILFFTTFFLSSFLKQFKTKRYFPTKVRSTISDFAVFLTIVIMVTIDYLVGVPSPKLHVPEKFEPTHPERGWIISPLGDNPWWTLLIAAIPALLCTILIFMDQQITAVIINRKEHKLKKGAGYHLDLLMVGVMLGVCSVMGLPWFVAATVLSISHVNSLKVESECSAPGEQPKFLGIREQRVTGLMIFILMGLSVFMTSVLKFIPMPVLYGVFLYMGVSSLKGIQLFDRIKLFGMPAKHQPDLIYLRYVPLWKVHIFTVIQLTCLVLLWVIKVSAAAVVFPMMVLALVFVRKLMDLCFTKRELSWLDDLMPESKKKKEDDKKKKEKEEAERMLQDDDDTVHLPFEGGSLLQIPVKALKYSPDKPVSVKISFEDEPRKKYVDAETSL

SEQ ID NO: 67369 - protein, 57 aa, Homo sapiens
MATKTTCMSSQGSDDEQIKRENIRSLTMSGHVGFESLPDQLVNRSIQQGFCFNILCV

SEQ ID NO: 67370 - protein, 65 aa, Homo sapiens
MAGVACLGKAADADEWCDSGLGSLGPDAAAPGGPGLGAELGPGLSWAPLVFGYVTEDGDTLLGRH

SEQ ID NO: 67371 - protein, 66 aa, Homo sapiens
MRGAGPSPRQSPRTLRPDPGPAMSFFRRKVKGKEQEKTSDVKSIKGCRTKSCCNQCHFCQHGLLFK

SEQ ID NO: 67372 - protein, 472 aa, Homo sapiens
MSWESGAGPGLGSQGMDLVWSAWYGKCVKGKGSLPLSAHGIVVAWLSRAEWDQVTVYLFCDDHKLQRYALNRITVWRSRSGNELPLAVASTADLIRCKLLDVTGGLGTDELRLLYGMALVRFVNLISERKTKFAKVPLKCLAQEVNIPDWIVDLRHELTHKKMPHINDCRRGCYFVLDWLQKTYWCRQLENSLRETWELEEFREGIEEEDQEEDKNIVVDDITEQKPEPQDDGKSTESDVKADGDSKGSEEVDSHCKKALSHKELYERARELLVSYEEEQFTVLEKFRYLPKAIKAWNNPSPRVECVLAELKGVTCENREAVLDAFLDDGFLVPTFEQLAALQIEYEENVDLNDVLVPKPFSQFWQPLLRGLHSQNFTQALLERMLSELPALGISGIRPTYILRWTVELIVANTKTGRNARRFSAGQWEARRGWRLFNCSASLDWPRMVESCLGSPCWASPQLLRIAVLGGS

SEQ ID NO: 67373 - protein, 136 aa, Homo sapiens
  MOD_RES (1)..(1): Any amino acid
XTTGEPATPKRRKAEPEALQSLRRSTRHSANCDRLSESSASPQPKRRQQDTSASMPKLFLHLEKKTPVHSRSSSPIPLTPSKEGSAVFAGFEGRRTNEINEVLSWKLVPDNYPPGDQPPPPSYIYGAQHLLRLFGF

SEQ ID NO: 67374 - protein, 94 aa, Homo sapiens
MWQRELGSREGAHHWEGLKTSSWALQGRACAGVCLSMEGGAAAATPTALPYYVAFSQLLGLTLVAMTGAWLGLYRGGIAWESDLQFNAHPLCMV

SEQ ID NO: 67375 - protein, 87 aa, Homo sapiens
MTHALEWPSLTAQWLPDVTRPEGKDFSIHRLVLGTHTSDEQNHLVIASVQLPNDDAQFDASHYDSEKGEFGGFGSVSGKIEIEIKIN

SEQ ID NO: 67376 - protein, 603 aa, Homo sapiens
MELQPPEASIAVVSIPRQLPGSHSEAGVQGLSAGDDSETGSDCVTQAGLQLLASSDPPALASKNAEVTGTMSQDTEVDMKEVELNELEPEKQPMNAASGAAMSLAGAEKNGLVKIKVAEDEAEAAAAAKFTGLSKEELLKVAGSPGWVRTRWALLLLFWLGWLGMLAGAVVIIVRAPRCRELPAQKWWHTGALYRIGDLQAFQGHGAGNLAAPISGLKGRLDYLSSLKVKGLVLGPIHKNQKDDVAQTDLLQIDPNFGSKEDFDSLLQSAKKKSIRVILDLTPNYRGENSWFSTQVDTVATKVKDALEFWLQAGVDGFQVRDIENLKDASSFLAEWQNITKGFSEDRLLIAGTNSSDLQQILSLLESNKDLLLTSSYLSDSGSTGEHTKSLVTQYLNATGNRWCSWSLSQARLLTSFLPAQLLRLYQLMLFTLPGTPVFSYGDEIGLDAAALPGQPMEAPVMLWDESSFPDIPGAVSANMTVKGQSEDPGSLLSLFRRLSDQRSKERSLLHGDFHAFSAGPGLFSYIRHWDQNERFLVVLNFGDVGLSAGLQASDLPASASLPAKADLLLSTQPGREEGSPLELERLKLEPHEGLLLRFPYAA

SEQ ID NO: 67377 - protein, 152 aa, Homo sapiens
MQHRGFLLLTLLALLALTSAVAKKKEEGALQCSVPGDHPRHQALHPQDQSKGQSQEREGKGLDAKPGCQGAPGVTWGLAHALPLPGPRCDPPVPSVCSLALINHALPCPSHSPAPPLSAQSGEGQGILGSLSLPQSNVSPRARFCSSPQFHY

SEQ ID NO: 67378 - protein, 194 aa, Homo sapiens
WRQLFDVVIVQADKPSFFTDRRKPFRKLDEKGSLQWDRITRLEKGKIYRQGNLFDFLRLTEWRGPRVLYFGDHLYSDLADLMLRHGWRTGAIIPELEREIRIINTEQYMHSLTWQQALTGLLERMQTYQDAESRQVLAAWMKERQELSCLLNYRVDFTFYPRRTPLQHEAPLWMDQLCTGCMKTPFLGDMAHIR

SEQ ID NO: 67379 - protein, 499 aa, Homo sapiens
MGKRQHQKDKMYITCAEYTHFYGGKKPDLPQTNFRRLPFDHCRNIVPWLKKYGTNPSNGEKLDGRSLIKLNFSKNSEGKYHCPVLFTVFTNNTHIVAVRTTGNVYAYEAVEQLNIKAKNFRDLLTDEPFSRQDIITLQDPTNLDKFNVSNFYHVKNNMKIIDPDEEKAKQDPSYYLKNTNAETRETLQELYKEFKGDEILAATMKAPEKKKVDKLNAAHYSTGKVSASFTSTAMVPETTHEAAAIDEDVLRYQFVKKKGYVRLHTNKGDLNLELHCDLTPKTCENFIRLCKKHYYDGTIFHRSIRNFVIQGGDPTGTGTGGESYWGKPFKDEFRPNLSHTGRGILSMANSGPNSNRSQFFITFRSCAYLDKKHTIFGRVVGGFDVLTAMENVESDPKTDRPKEEIRIDATTVFVDPYEEADAQIAQERKTQLKVAPETKVKSSQPQAGSQGPQTFRQGVGKYINPAATKRAAEEEPSTSATVPMSKKKPSRGFGDFSSW

SEQ ID NO: 67380 - protein, 55 aa, Homo sapiens
LPLGRQTSQQPAGPPAQQRPPPQEPAPPRPSLSQDEVKAETIRSLRKSFASLFSD

SEQ ID NO: 67381 - protein, 47 aa, Homo sapiens
PEALTSPPKPTLATPRWTLPWPWDTGKVIENHILKLFQSNLVPADPE

SEQ ID NO: 67382 - protein, 168 aa, Homo sapiens
MATPASAPDTRALVADFVGYKLRQKGYVCGAGPGEGPAADPLHQAMRAAGDEFETRFRRTFSDLAAQLHVTPGSAQQRFTQVSDELFQGGPNWGRLVAFFVFGAALCAESVNKEMEPLVGQVQEWMVAYLETQLADWIHSSGGWVRSFSIAALHILLQSWSPGGRWGL

SEQ ID NO: 67383 - protein, 56 aa, Homo sapiens
MASRKEGTGSTATSSSSTAGAAGKGKGKGGSGDSAVKQVQIDGLGNAFKYVDRKYC

SEQ ID NO: 67384 - protein, 38 aa, Homo sapiens
MSGFSPELIDYLEGKISFEEFERRREERKTREKKVRRC

SEQ ID NO: 67385 - protein, 1449 aa, Homo sapiens
HCSYSNRSVVGVLVHYQKRHPEIKVTAKYIRQAPPTAAMMRGVEGPQGSPRPPAPIQQLNRSSSERDGPPVENEMFFCQHCDYGNRTVKGVLIHYQKKHRDFKANADVIRQHTATIRSLCDRNQKKPASCVLVSPSNLERDKTKLRALKCRQCSYTSPYFYALRKHIKKDHPALKATVTSIMRWAFLDGLIEAGYHCEWCIYSHTEPNGLLLHYQRRHPEHYVDYTYMATKLWAGPDPSPPSLTMPAEAKTYRCRDCVFEAVSIWDITNHYQAFHPWAMNGDESVLLDIIKEKDAVEKPILSSEELAGPVNCENSIPTPFPEQEAECPEDARLSPEKSLQLASANPAISSTPYQCTVCQSEYNNLHGLLTHYGKKHPGMKVKAADFAQDIDINPGAVYKCRHCPYINTRIHGVLTHYQKRHPSIKVTAEDFVHDVEQSADISQNDVEETSRIFKQGYGAYRCKLCPYTHGTLEKLKIHYEKYHNQPEFDVFSQSPPKLPVPLEPEMTTEVSPSQVSITEEEVGEEPVSTSHFSTSHLVSHTVFRCQLCKYFCSTRKGIARHYRIKHNNVRAQPEGKNNLFKCALCAYTNPIRKGLAAHYQKRHDIDAYYTHCLAASRTISDKPNKVIIPSPPKDDSPQLSEELRRAVEKKKCSLCSFQSFSKKGIVSHYMKRHPGVFPKKQHASKLGGYFTAVYADEHEKPTLMEEEERGNFEKAEVEGEAQEIEWLPFRCIKCFKLSFSTAELLCMHYTDHHSRDLKRDFIILGNGPRLQNSTYQCKHCDSKLQSTAELTSHLNIHNEEFQKRAKRQERRKQLLSKQKYADGAFADFKQERPFGHLEEVPKIKERKVVGYKCKFCVEVHPTLRAICNHLRKHVQYGNVPAVSAAVKEADDPAHLFLDGLEAAKDASGALVGRVDGEHCLLDGMLEDETRPGGYHCSQCDRVLMSMQGLRSHERSHLALAMFTREDKYSCQYCSFVSAFRHNLDRHMQTHHGHHKPFRCKLCSFKSSYNSRLKTHILKAHAGEHAYKCSWCSFSTMTISQLKEHSLKVHGKALTLPRPRIVSLLSSHSHHSSQKATPAEEVEDSNDSSYSEPPDVQQQLNHYQSAALARNNSRVSPVPLSGAAAGTEQKTEAVLHCEFCEFSSGYIQSIRRHYRDKHGGKKLFKCKDCSFYTGFKSAFTMHVEAGHSAVPEEGPKDLRCPLCLYHTKYKRNMIDHIVLHREERVVPIEVCRSKLSKYLQGVVFRCDKCTFTCSSDESLQQHIEKHNELKPYKCQLCYYETKHTEELDSHLRDEHKVSRNFELVGRVNLDQLEQMKEKMESSSSDDEDKEEEMNSKAEDRELMRFSDHGAALNTEKRFPCEFCGRAFSQGSEWERHVLRHGMALNDTKQVSREEIHPKEIMENSVKMPSIEEKEDDEAIGIDFSLKNETVAICVVTADKSLLENAEAKKE

SEQ ID NO: 67386 - protein, 254 aa, Homo sapiens
MSAFDTNPFADPVDVNPFQDPSVTQLTNAPQGGLAEFNPFSETNAATTVPVTQLPGSSQPAVLQPSVEPTQPTPQLLLRQASKFPPAQFLAVSELSERQMLLGGESILRDSYMRKLPKAVVSAAQAGLLRQQEELDRKAAELERKERELQNTVANLHVRQNNWPPLPSWCPVKPCFYQDFSTEIPADYQRICKMLYYLWMLHSVTLFLNLLACLAWFSGNSSKGVDFGLSILWFLIFTPCAFLCWYRPIYKAFR

SEQ ID NO: 67387 - protein, 352 aa, Homo sapiens
MEAEDQGELFLHLRSVARAPQTLSMHRLQRKLKEAARKIISLRLEKEQLIEMGNRLRAELGRPERWLLHHALPPAPEARKPGEEPRRPLDRSPPLGQVQPHFTSQDAKSAEDEAPSRHLGKHQPRSAQVGSRLDALQGPKTQHSIHTVTCKSPRQKEDRSPKPPQAPQHPEEHGRQSHSSSSFASGTLQDMWRLLDLGSSPSGVTSQGDSTPEMGSHYVTQAGLELLGSSSPAALASQSAEMTGVGPTPSLAWSGALHPNMNQEASLVRSTWAPGMRGGMNGGSSSVCKNMQRGPHWSPSQQPCSGIRTVLLSRKERTLLSCFSLPAPVVLVPLLLSGQAVTERAGHAGDIL

SEQ ID NO: 67388 - protein, 145 aa, Homo sapiens
  MOD_RES (1)..(1): Any amino acid
XDETYFSFLRKFVHTFHGQLILSQDFLQMLLENIPEEKRLELSVENIYQDWLESSGIPKPLQRERRAGAECGLARQVRAEVTKWIGVNRRPRKRKRREKEEVFEKTLNWSHLRNRERRRKKWITFKTLGGILFTVKQMRNLFAQV

SEQ ID NO: 67389 - protein, 641 aa, Homo sapiens
MNDRLGEDESLLMKLYSFLLNDSPLNPLLASFFSKVLSILISRKPEQIVDFLKKKHDFVDLIIKHIGTSAIMDLLLRLLTCIEPPQPRQDVLNKSVMKTTWGVLDPPVGNTRLNVIRLISSLLQTNTSSINGDLMELNSIGVILNMFFKYTWNNFLHTQVEICIALILASPFENTENATITDQDSTGDNLLLKHLFQKCQLIERILEAWEMNEKKQAEGGRRHGYMGHLTRIANCIVHSTDKGPNSALVQQLIKDLPDEVRERWETFCTSSLGETNKRNTVDLVTTCHIHSSSDDEIDFKETGFSQDSSLQQAFSDYQMQQMTSNFIDQFGFNDEKFADQDDIGNVSFDRVSDINFTLNTNESGNIALFEACCKERIQQFDDGGSDEEDIWEEKHIAFTPESQRRSSSGSTDSEESTDSEEEDGAKQDLFEPSSANTEDKMEVDLSEPPNWSANFDVPMETTHGAPLDSVGSDVWSTEEPMPTKETGWASFSEFTSSLSTKDSLRSNSPVEMETSTEPMDPLTPSAAALAVQPEAAGSVAMEASSDGEEDAESTDKVTETVMNGGMKETLSLTVDAKTETAVFKSEEGKLSTSQDAACKDAEECPETAEAKCAAPRPPSSSPEQRTGQPSAPGDTSVNGPV

SEQ ID NO: 67390 - protein, 136 aa, Homo sapiens
  MOD_RES (1)..(1): Any amino acid
XETEKQAVRRALIEERGRFCTFITFLQPVVNGELTMLGEITHLQGIIDDLVVLTAEPHKLPPASEQVIKDLKGSDYSWSYQTPPSSPSSSSSRKSSMCSLAQPATTTARLSSVSSHDSGFVSQDATYSKPPSPMPS

SEQ ID NO: 67391 - protein, 82 aa, Homo sapiens
MPPPEEAAAVSAPPPAPAGTLLPGPSKWQKPAGTPVPRIRRLLEASHRGQGDPPSLRPLKPPPPPRQLSVKDTVPRAPSQFP

SEQ ID NO: 67392 - protein, 115 aa, Homo sapiens
MGTRLLCWVVLGFLGTDHTGAGVSQSPRYKVAKRGRDVALRCDSISGHVTLYWYRQTLGQGSEVLTYSQSDAQRDKSGRPSGRFSAERPERSVSTLKIQCTEQGDSAVYLCASSL

SEQ ID NO: 67393 - protein, 136 aa, Homo sapiens
MEDSPTMVRVDSPTMVRGENQVSPCQGRRCFPKALGYVTGDMKELANQLKDKPVVLQFIDWILRGISQVVFVNNPVSGILILVGLLVQNPWWALTGWLGTVVSTLMALLLSQDRSLIASGLYGYNATLVGVLMAVF

SEQ ID NO: 67394 - protein, 688 aa, Homo sapiens
MNVRGAAPGVRASPRPWQFPTSQRLPAGSPEAAPCSASGCCWPGSAASWRQDPEQISYIIPIDEKLYTVHLKQRYFLADNFMIYLYNQGSMNTYSSDIQTQCYYQGNIEGYPDSMVTLSTCSGLRGILQFENVSYGIEPLESAVEFQHVLYKLKNEDNDIAIFIDRSLKEQPMDDNIFISEKSEPAVPDLFPLYLEMHIVVDKTLYDYWGSDSMIVTNKVIEIVGLANSMFTQFKVTIVLSSLELWSDENKISTVGEADELLQKFLEWKQSYLNLRPHDIAYLLIYMDYPRYLGAVFPGTMCITRYSAGVALQCGPASCCDFRTCVLKDGAKCYKGLCCKDCQILQSGVECRPKAHPECDIAENCNGTSPECGPDITLINGLSCKNNKFICYDGDCHDLDARCESVFGKGSRNAPFACYEEIQSQSDRFGNCGRDRNNKYVFCGWRNLICGRLVCTYPTRKPFHQENGDVIYAFVRDSVCITVDYKLPRTVPDPLAVKNGSQCDIGRVCVNRECVESRIIKASAHVCSQQCSGHGVCDSRNKCHCSPGYKPPNCQIRSKGFSIFPEEDMGSIMERASGKTENTWLLGFLIALPILIVTTAIVLARKQLKKWFAKEEEFPSSESKSEGSTQTYASQSSSEGSTQTYASQTRSESSSQADTSKSKSEDSAEAYTSRSKSQDSTQTQSSSN

SEQ ID NO: 67395 - protein, 58 aa, Homo sapiens
MSSAPEPPTFKKEPPKEKEFQSPGLRGVRTTTLFRAVNPELFIKPELSILPTFWTLRP

SEQ ID NO: 67396 - protein, 209 aa, Homo sapiens
ADIWSLGITAIELARGEPPHSELHPMKVLFLIPKNNPPTLEGNYSKPLKEFVEACLNKEPSFRPTAKELLKHKFILRNAKKTSYLTELIDRYKRWKAEQSHDDSSSEDSDAETDGQASGGSDSGDWIFTIREKDPKNLENGALQPSDLDRNKLKEKSQACGGNLGSIEELRGAIYLAEEACPGISDTMVAQLVQRLQRYSLSGGGTSSH

SEQ ID NO: 67397 - protein, 33 aa, Homo sapiens
MAQPGSGCKATTRCLEGTAPPAMAQSDAEALAG

SEQ ID NO: 67398 - protein, 230 aa, Homo sapiens
MATASGASDLSGSGAPPPGVGAQAAAAAEEEEREVVRVRVKHGDGAPGGLPHVFSPQKCESFLPPEFRSFAVDPQITSLDVLQHILIRAFDLSGKKNFGISYLGRDRLGQEVYLSLLSDWDLSTAFATASKPYLQLRVDIRPSEDSPLLEDWDIISPKDVIGSDVLLAEKRSSLTTAALPFTQSILTQVGRTLSKVQQVLSWSYGEDVKPFKPPLSDAEFHTYLNHEGQL

SEQ ID NO: 67399 - protein, 118 aa, Homo sapiens
MTPQSLLQTTLFLLSLLFLVQGAHGRGHREDFRFCSQRNQTHRSSLHYKPTPDLRISIENSEEALTVHAPFPAAHPASRSFPDPRGLYHFCLYWNRHAGRLHLLYGKRDFLLSDKASS

SEQ ID NO: 67400 - protein, 336 aa, Homo sapiens
MKLLTRAGSFSRFYSLKVAPKVKATAAPAGAPPQPQDLEFTKLPNGLVIASLENYSPVSRIGLFIKAGSRYEDFSNLGTTHLLRLTSSLTTKGASSFKITRGIEAVGGKLSVTATRENMAYTVECLRGDVDILMEFLLNVTTAPEFRRWEVADLQPQLKIDKAVAFQNPQTHVIENLHAAAYRNALANPLYCPDYRIGKVTSEELHYFVQNHFTSARMALIGLGVSHPVLKQVAEQFLNMRGGLGLSGAKANYRGGEIREQNGDSLVHAAFVAESAVAGSAEANAFSVLQHVLGAGPHVKRGSNTTSHLHQAVAKATQQPFDEQAESWIPNVSGVF

SEQ ID NO: 67401 - protein, 63 aa, Homo sapiens
MHDSGLLNITKVSFSDRGKYTCVASNIYGTVNNTVTLRVIFTSGDMGVYYMVVCLVAFTIVMV

SEQ ID NO: 67402 - protein, 112 aa, Homo sapiens
  MOD_RES (1)..(1): Any amino acid
XGDFTGYIESPNYPGNYPANTECTWTINPPPKRRILIVVPEIFLPIEDDCGDYLVMRKTSSSNSVTTYETCQTYERPIAFTSRSKKLWIQFKSNEGNSARGFQVPYVTYDDA

SEQ ID NO: 67403 - protein, 632 aa, Homo sapiens
MTPTLAALLCLGLSLGPRTHVQAGPFPKPTLWAEPGSVISWGSPVTIWCQGSLEAQEYRLDKEGSPEPWDRNNPLEPKNKARFSIPSITEHHAGRYRCHYYSSAGWSEPSDPLELVMTGAYSKPTLSALPSPVVASGGNMTLQCGSQKGYHHFVLMKEGEHQLPRTLDSQQLHSGGFQALFPVGPVNPSHRWRFTCYYYYMNTPRVWSHPSDPLEILPSGVSRKPSLLTLQGPVLAPGQSLTLQCGSDVGYDRFVLYKEGERDFLQRPGQQPQAGLSQANFTLGPVSPSHGGQYRCYGAHNLSSEWSAPSDPLNILMAGQIYDTVSLSAQPGPTVASGENVTLLCQSWWQFDTFLLTKEGAAHPPLRLRSMYGAHKYQAEFPMSPVTSAHAGTYRCYGSYSSNPHLLSHPSEPLELVVSGHSGGSSLPPTGPPSTPGLGRYLEVLIGVSVAFVLLLFLLLFLLLRRQRHSKHRTSDQRKTDFQRPAGAAETEPKDRGLLRRSSPAADVQEENLYAAVKDTQSEDRVELDSQQSPHDEDPQAVTYAPVKHSSPRREMASPPSSLSGEFLDTKDRQVEEDRQMDTEAAASEASQDVTYAQLHSLTLRRKATEPPPSQEGEPPAEPSIYATLAIH

SEQ ID NO: 67404 - protein, 196 aa, Homo sapiens
  MOD_RES (1)..(1): Any amino acid
XTAMRILGGVISAISEAAAQYNPEPPPPRTHYSNIEANESEEVRQFRRLFAQLAGDDMEVSATELMNILNKVVTRHPDLKTDGFGIDTCRSMVAVMDSDTTGKLGFEEFKYLWNNIKRWQAIYKQFDTDRSGTICSSELPGAFEAADESGNMDFDNFISCLVRLDAMFRAFKSLDKDGTGQIQVNIQEWLQLTMYS

SEQ ID NO: 67405 - protein, 127 aa, Homo sapiens
MSSESSKKRKPKVIRSDGAPAEGKRNRSDTEQEGKYYSEEAEVDLRDPGRDYELYKYTCQELQRLMAEIQDLKSRGGKDVAIEIEERRIQSCVHFMTLKKLNRLAHIRLKKGRDQTHEVVVKRLSRK

SEQ ID NO: 67406 - protein, 94 aa, Homo sapiens
SVELPLDADVQTSNLLITFLKYSSIVMQDTKDEHRLHSGKLCLIILTCIAEPMRHRKKAADKNLPCRPLVCAVLDLMVEFIVTHMMKEFPMDLY

SEQ ID NO: 67407 - protein, 119 aa, Homo sapiens
KKIIETKMLMGEVMREAAFSLAEAKFTAGDFSTTVIQNVNKAQVKIRAKKDNVAGVTLPVFEHYHEGTDSYELTGLARGGEQLAKLKRNYAKAVELLVELASLQVKENTREEKDSKGKI

SEQ ID NO: 67408 - protein, 1120 aa, Homo sapiens
MELEKSGALLESGTYEDNYYGTPKPPAEPAPLLLNVTDQILPGATPSAEGKRKRNKSVSNMEKASIEPPEEEEEERPVVNGNGVVVTPESSEHEDKSAGASGEMPSQPYPAPVYSQPEELKEQMDDTKPTKPEDNEEPDPLPDNWEMAYTEKGEVYFIDHNTKTTSWLDPRLAKKAKPPEECKENELPYGWEKIDDPIYGTYYVDHINRRTQFENPVLEAKRKLQQHNMPHTELGTKPLQAPGFREKPLFTRDASQLKGTFLSTTLKKSNMGFGFTIIGGDEPDEFLQVKSVIPDGPAAQDGKMETGDVIVYINEVCVLGHTHADVVKLFQSVPIGQSVNLVLCRGYPLPFDPEDPANSMVPPLAIMERPPPVMVNGRHNYETYLEYISRTSQSVPDITDRPPHSLHSMPTDGQLDGTYPPPVHDDNVSMASSGATQAELMTLTIVKGAQGFGFTIADSPTGQRVKQILDIQGCPGLCEGDLIVEINQQNVQNLSHTEVVDILKDCPIGSETSLIIHRGGFFSPWKTPKPIMDRWENQGSPQTSLSAPAIPQNLPFPPALHRSSFPDSTEAFDPRKPDPYELYEKSRAIYESRQQVPPRTSFRMDSSGPDYKELDVHLRRMESGFGFRILGGDEPGQPILIGAVIAMGSADRDGRLHPGDELVYVDGIPVAGKTHRYVIDLMHHAARNGQVNLTVRRKVLCGGEPCPENGRSPGSVSTHHSSPRSDYATYTNSNHAAPSSNASPPEGFASHSLQTSDVVIHRKENEGFGFVIISSLNRPESGSTITVPHKIGRIIDGSPADRCAKLKVGDRILAVNGQSIINMPHADIVKLIKDAGLSVTLRIIPQEELNSPTSAPSSEKQSPMAQQSPLAQQSPLAQPSPATPNSPIAQPAPPQPLQLQGHENSYRSEVKARQDVKPDIRQPPFTDYRQPPLDYRQPPGGDYQQPPPLDYRQPPLLDYRQHSPDTRQYPLSDYRQPQDFDYFTVDMEKGAKGFGFSIRGGREYKMDLYVLRLAEDGPAIRNGRMRVGDQIIEINGESTRDMTHARAIELIKSGGRRVRLLLKRGTGQVPEYGMVPSSLSMCMKSDKHGSPYFYLLGHPKDTTNPPPGVLPLPPPQVCRK

SEQ ID NO: 67409 - protein, 639 aa, Homo sapiens
RDDMEHGWEVVDSNDSASQHQEELPPPPLPPGWEEKVDNLGRTYYVNHNNRTTQWHRPSLMDVSSESDNNIRQINQEAAHRRFRSRRHISEDLEPEPSEGGDVPEPWETISEEVNIAGDSLGLALPPPPASPGSRTSPQELSEELSRRLQITPDSNGEQFSSLIQREPSSRLRSCSVTDAVAEQGHLPPEDPRLKFPVHMRSKTSLNPNDLGPLPPGWEERIHLDGRTFYIDHNSKITQWEDPRLQNPAITGPAVPYSREFKQKYDYFRKKLKKPADIPNRFEMKLHRNNIFEESYRRIMSVKRPDVLKARLWIEFESEKGLDYGGVAREWFFLLSKEMFNPYYGLFEYSATDNYTLQINPNSGLCNEDHLSYFTFIGRVAGLAVFHGKLLDGFFIRPFYKMMLGKQITLNDMESVDSEYYNSLKWILENDPTELDLMFCIDEENFGQTYQVDLKPNGSEIMVTNENKREYIDLVIQWRFVNRVQKQMNAFLEGFTELLPIDLIKIFDENELELLMCGLGDVDVNDWRQHSIYKNGYCPNHPVIQWFWKAVLLMDAEKRIRLLQFVTGTSRVPMNGFAELYGSNGPQLFTIEQWGSPEKLPRAHTCFNRLDLPPYETFEDLREKLLMAVENAQGFEGVD

SEQ ID NO: 67410 - protein, 131 aa, Homo sapiens
MEGAGAGSGFRKELVSRLLHLHFKDDKTKVSGDALQLMVELLKVFVVGEPRAHAPSGHSIRNFAFFQRENQDVFSRFPQGPKLGSPEPVCQKQQSAACGRPRQKTRSVWTWTSWRRCFRSCSWTSRDLSRG

SEQ ID NO: 67411 - protein, 261 aa, Homo sapiens
  MOD_RES (1)..(1): Any amino acid
XEEDADFEQSMVLVACGPYTTSDSITYDPLLDLIAVINHDRPDVCILFGPFLDAKHEQVENCLLTSPFEDIFKQCLRTIIEGTRSSGSHLVFVPSLRDVHHEPVYPQPPFSYSDLSREDKKQVQFVSEPCSLSINGVIFGLTSTDLLFHLGAEEISSSSGTSDRFSRILKHILTQRSYYPLYPPQEDMAIDYESFYVYAQLPVTPDVLIIPSELRYFVKFLPFRWTKIKIGGNQGLVSLRRNSPVDCVGAWYLAQSPRRTS

SEQ ID NO: 67412 - protein, 213 aa, Homo sapiens
QQYAWGKMGSNSEVARLLASSDPLAQIAEDKPYAELWMGTHPRGDAKILDNRISQKTLSQWIAENQDSLGSKVKDTFNGNLPFLFKVLSVETPLSIQAHPNKELAEKLHLQAPQHYPDANHKPEMAIALTPFQGLCGFRPVEEIVTFLKTAAGNNMEDIFGELLLQLHQQYPGDIGCFAIYFLNLLTLKPGEAMFLEANVPHAYLKGGPWLCH

SEQ ID NO: 67413 - protein, 818 aa, Homo sapiens
MTSKQAMSSNEQERLLCYNGEVLVFQLSKGNFADKEPTKTPILHVRRMVFDRGTKVFVQKSTGFFTIKEENSHLKIMCCNCVSDFRTGINLPYIVIEKNKKNNVFEYFLLILHSTNKFEMRLSFKLGYEMKDGLRVLNGPLILWRHVKAFFFISSQTGKVVSVSGNFSSIQWAGEIENLGMVLLGLKECCLSEEECTQEPSKSDYAIWNTKFCVYSLESQEVLSDIYIIPPAYSSVVTYVHICATEIIKNQLRISLIALTRKNQLISFQNGTPKNVCQLPFGDPCAVQLMDSGGGNLFFVVSFISNNACAVWKESFQVAAKWEKLSLVLIDDFIGSGTEQVLLLFKDSLNSDCLTSFKITDLGKINYSSEPSDCNEDDLFEDKQENRYLVVPPLETGLKVCFSSFRELRQHLLLKEKIISKSYKALINLVQGKDDNTSSAEEKECLVPLCGEEENSVHILDEKLSDNFQDSEQLVEKIWYRVIDDSLVVGVKTTSSLKLSLNDVTLSLLMDQAHDSRFRLLKCQNRVIKLSTNPFPAPYLMPCEIGLEAKRVTLTPDSKKEESFVCEHPSKKECVQIITAVTSLSPLLTFSKFCCTVLLQIMERESGNCPKDRYVVCGRVFLSLEDLSTGKYLLTFPKKKPIEHMEDLFALLAAFHKSCFQITSPGYALNSMKVWLLEHMKCEIIKEFPEVYFCERPGSFYGTLFTWKQRTPFEGILIIYSRNQTVMFQCLHNLIRILPINCFLKNLKSGSENFLIDNMAFTLEKELVTLSSLSSAIAKHESNFMQRCEVSKGKSSVVAAALSDRRENIHPYRKELQR

SEQ ID NO: 67414 - protein, 620 aa, Homo sapiens
MGALTFRDVAIEFSLEEWQCLDSTQQNLYRNVMLENYRNLVFLGIAAFKPDLIIFLEQGKEPWNMKRHEMVEEPPVICSHFSQEFWPEQGIEDSFQKMILRRYDKCGHENLHLKISCTNVDECNVHKEGYNKLNQSLTTTQSKVFQCGKYANVFHKCSNSNRHKIRHTGEKGLKCKEYVRSFCMLSHLSQHERIYTRENSYKCEENGKAFNWSSTLTYYKSIHTGEKPYKCEECGKAFSKFSILTKHKVIHTGEKPYKCEECGKAFNRSSILTKHKIIHTGEKPYKCEECGKGFSSVSTLNTHKAIHAEEKPYKCEECGKASNSSSKLMEHKRIHTGEKPYKCEECGKAFSWSSSLTEHKRIHAGEKPYKCEECGKAFNRSSILTKHKIIHTGEKPYKCEGCGKAFSKVSTLNTHKAIHAEEKPYKCEECGKASNSSSKLMEHKRIHTGEKPYKCEECGKAFSWSSSLTEHKRIHAGEKPYKCEECGKAFTWSSSFTKHKRIHAAEKPYKCEECGKGFSTFSILTKHKIIHTGEKRYKCEECGKAFSWSSILTEHKIIHTGEKPYKCEECGKAFSRSSSLTRHKRIHTGEKPYKCEECGKAFKSSSTVSYHKKIHTGENP

SEQ ID NO: 67415 - protein, 66 aa, Homo sapiens
MADNGTYECSVSLMSDLEGNTKSRVRLLVLVPPSKPECGIEGETIIGNNIQLTCQSKEGSPTPQYS

SEQ ID NO: 67416 - protein, 269 aa, Homo sapiens
MGGCAGSRRRFSDSEGEETVPEPRLPLLDHQGAHWKNAVGFCPRVLVSGICAAGSFVLVAFSHSVGTSLCGVVFASISSGLGEVTFLSLTAFYPRAVISWWSSGTGGAGLLGALSYLGLTQAGLSPQQTLLSMLGIPALLLASYFLLLTSPEAQDPGGEEEAESAARQPLIRTEAPESKPGSSSSLSLRERWTVFKGLLWYIVPLVVVYFAEYFINQGLFELLFFWNTSLSHAQQYRWYQMLYQAGVFASRSSLRCCRIRFTWALALLQ

SEQ ID NO: 67417 - protein, 83 aa, Homo sapiens
  MOD_RES (1)..(1): Any amino acid
XNKDQGTYEDYVEGLRVFDKEGNGTVMGAEIRHVLVTLGEKMTEEEVEMLVAGHEDSNGCINYEGKRRCEGLQESCSHHNPPA

SEQ ID NO: 67418 - protein, 1938 aa, Homo sapiens
MKQRKGQGSGGSRGRKKRGLSDISPSTSLPPLVEGQLRCFLKLTVNRVIWKIAKPPTCVLVRVRWWGETSDGTLFCPRDALQTEPKAVRTTTRYAIRCGPKQFTSYLTDMAVLVLEVITKLDGLPIGRVQINGLAQLSPTHQINGFFTIVSSTSKKLGELQVSLALEPLSETYDSYHPLPTTDMTENVLLSKQGFRENTEPSSTQFQVPSRPRDIHTIKIDGKELAANSSRSTTPRGKDHVCFAENPDTIKDSSFGLQHSLNSGQSLESVTLKGRAPRKQMSLLNSSEFQPQIRTVAKSHSDSCILSSNNLPTKDLLSALLEQGNKLRNAMVISAMKSSPETSMLLDQVHPPINEDSLRASTQIRAFSRNRFKDHIEDHLLPSTENTFWRHDTKADTRAIQLLLGSAELSQGNFWDGLGSPPDSPSPGSDVYCISELNDPQYDQSLLENLFYTAPKSDTSISDFLSEEDDIVPSKKISQSTALARSSKVLESSDHKLKKRSAGKRNRNLVEQQMLSETPEDAQTMTLSVDRLALLGRTHSVRIIIETMGVPPDSPQMTPGKKSYAGPPPKVTTAKKRTFFVEYHFPVGFSESGLGKTALITEVVRLASSKITDGKVKFQQRFVFPVQFGGPMIEHWWNSNLTFQIYVKKTPQKKPEVIGSVSLSLRAVIQSELLSFSDQLPVQQENGQSPFGPLKVTMELITDNKDFTGINTKLSGNTHYTPLCAPTSPNKALPELNQDMTCTKNPQNLNQIHEETAKKAQNLVLPNRKSPSPVAPHPSTFVATPASHNLVNQTNGTTKESALLLHVLLMVPDGKDFISGESEKQSPCNVYLNCKLFSTEEVTRSVIAWGTTQPVFNFSQVIPVSLSSKYLERLKNNVMVIETWNKVRSPGQDKLLGLVKLPLHQFYMSFKDAKISRLLLDAQYPVVAVDSYMPVIDVFSGHQNGSLRVFLAMGSSNQIMALQRLKNEEGTLPPFSPRPAHFLDQPTAASVAMAEDRGNGLMEHCFEIHIEMVKGLAPLQATVWGEADCYVQYYFPVQHSQSSVLKGPEFLENGITLKPFRTATTLCVPDPIFNSEHHHSLLLPAEVPVQRLLLSAFSAQGLVPGGGVQFEIWCRYYYPNVRDQKVAKGTLPLSRICAMVTTQHREDVGIQTFNLPLTPRIENRKELRNQSSGLLDVGLRYRRSPRTAEGVLAARTVSISVQIIRACGLQAAAKALAEREPALQFSATVGVNASVTTHLSFLPQGEQRRTHPVACSFCPEFSHHVEFTCNLVTQHCSGEACFLAELLEFAEVIFAVYHENTKSASDIISIESCKEYLLGVVKVPTKELLIKRSGITGWYPIILPEDGGLPHGLELMQKIVGGLELSISFTHRGDRERVLEAAEHLGWSFENSLKDFVRMDEGEPATVTISTPRLWLPIHCVLLAGHNHIHKNTYCYLRYKFYDHEAFWTPLKKPKESVNKKQIMVTFKASKRAEVTRGPSLLWYFREERLEIQVWRAYGNDSVERPHQTDSWIGSAYVDLARLGERSARTLTVSGVYPLFGRNASNLSGAALRVHVVLSSLSSHLEPTHELDSMDCSSHSESEQLPRRNDEVQLSPPEVISCHQKSPASTQVPCSSTTAEVRLTQEGPADLDGTFAVSILVERAMHLSLKGSPLTERKVSIPSCCVSFATADESSPVYTQVVENTDSPIWNFQQQSRLSKELLLDPQQTLVFKVWHKGDEERVIGFASVDLSPLLSGFQFVCGWYNITDFSGECQGQIKVAVSPLESLIHFKEERQARRGVETSKSLIPIYSPFSFPASDTYAAFSSHMARQTLDQLAHASSKELDFSSPGRSDTTRSQASRHEEHVQNIRRFHESLHLQGEAPLPCDDKLTTSPLSSQTSILTSLSPQTQTAISQHQESCRDHLGPGASSLDPGSQCILEKSSNLVLQVSSLITGSY

SEQ ID NO: 67419 - protein, 46 aa, Homo sapiens
  MOD_RES (1)..(1): Any amino acid
XEKRFADAASLLLSLMTSRIAPRSFWMTLLTDALPLLEQKQNRLMS

SEQ ID NO: 67420 - protein, 226 aa, Homo sapiens
MAETREEETVSAEASGFSDLSDSEFLEFLDLEDAQESKALVNMPGPSSESLGKDDKPISLQNWKRGLDILSPMERFHLKYLYVTDLATQNWCELQTAYGKELPGFLAPEKAAVLDTGASIHLARELELHDLVTVPVTTKEDAWAIKFLNILLLIPTLQSEGHIREFPVFGEGEGVLLVGVIDELHYTAKGELELAELKTRRRPMLPLEAQKKKDCFQVSLYKYIFD

SEQ ID NO: 67421 - protein, 110 aa, Homo sapiens
  MOD_RES (1)..(1): Any amino acid
XDCHRYSRRRRSRSRSRSHSRSRGRRYSRSRSRSRGRRSRSASPRRSRSISLRRSRSASLRRSRSGSIKGSRYFQSPSRSRSRSRSISRPRSSRSPSGSPRRSASPERMD

SEQ ID NO: 67422 - protein, 46 aa, Homo sapiens
MIISTPQRLTSSGSVLIGSPYTPAPAMVTQTHIAEATGWVPGDRKR

SEQ ID NO: 67423 - protein, 296 aa, Homo sapiens
MDPSKIAHTEYPVNTIIIHEDFDNNSMSNNIALLKTDTAMHFGNLVQSICFLGRMLHTPPVLQNCWVSGWNPTSATGNHMTMSVLRKIFVKDLDMCPLYKLQKTECGSHTKEETKTACLGDPGSPMMCQLQQFDLWVLRGVLNFGGETCPGLFLYTKVEDYSKWITSKAERAGPPLSSLHHWEKLISFSHHGPNATMTQKTYSDSELGHVGSYLQGQRRTITHSRLGNSSRDSLDVREKDVKESGRSPEASVQPLYYDYYGGEVGEGRIFAGQNRLYQPEEIILVSFVLVFFCSSI

SEQ ID NO: 67424 - protein, 150 aa, Homo sapiens
  MOD_RES (1)..(1): Any amino acid
XPETPGTKPSTTLAPRKTKRPGRRPRPRPRPKTTPSPEVPKSKPALEPATIQPEPLVPTTVPTTDIEPVTVRTEATVTTLAPKTSQRTRTRRPRPKHKTTPRPETLQTKLDFGPITPGTSSAPTTTTKRTRRPHPKPKTTPHPEVPQTKL

SEQ ID NO: 67425 - protein, 44 aa, Homo sapiens
MSGASSSEQNNNSYETKTPNLRMSEKKCCWSAVTGSWLTATLNS

SEQ ID NO: 67426 - protein, 314 aa, Homo sapiens
  MOD_RES (1)..(1): Any amino acid
XEGALIALAMKMGLDGLQQDYIRKAEYPFSSEQKWMAVKCVHRTQQDRPEICFMKGAYEQVIKYCTTYQSKGQTLTLTQQQRDVYQQEKARMGSAGLRASRLGLYSKTSQSVSGEEIDAMDVQQLSQIVPKVAVFYRASPRHKMKIIKSLQKNGSVVAMTGDGVNDAVALKAADIGVAMGQTGTDVCKEAADMILVDDDFQTIMSAIEEGKGIYNNIKNFVRFQLSTSIAALTLISLATLMNFPNPLNAMQILWINIIMDGPPAQSLGVEPVDKDVIRKPPRNWKDSILTKNLILKILVSSIIIVCGTLFVFWR

SEQ ID NO: 67427 - protein, 395 aa, Homo sapiens [sequence omitted]

SEQ ID NO: 67428 - protein, 810 aa, Homo sapiens
EEPILKPGCKEYFWLLCKLVDNIHIKDASQTTLLDLDALARHLADCIRSREILDHQDGNVEDDGLTGLLRLATSVVKHKPPFKFSREGQEFLRDIFNLLFLLPSLKDRQQPKCKSHSSRAAAYDLLVEMVKGSVENYRLIHNWVMAQHMQSHAPYKWDYWPHEDVRAECRFVGLTNLGATCYLASTIQQLYMIPEARQAVFTAKYSEDMKHKTTLLELQKMFTYLMESECKAYNPRPFCKTYTMDKQPLNTGEQKDMTEFFTDLITKIEEMSPELKNTVKSLFGGVITNNVVSLDCEHVSQTAEEFYTVRCQVADMKNIYESLDEVTIKDTLEGDNMYTCSHCGKKVRAEKRACFKKLPRILSFNTMRYTFNMVTMMKEKVNTHFSFPLRLDMTPYTEDFLMGKSERKEGFKEVSDHSKDSESYEYDLIGVTVHTGTADGGHYYSFIRDIVNPHAYKNNKWYLFNDAEVKPFDSAQLASECFGGEMTTKTYDSVTDKFMDFSFEKTHSAYMLFYKRMEPEEENGREYKFDVSSELLEWIWHDNMQFLQDKNIFEHTYFGFMWQLCSCIPSTLPDPKAVSLMTAKLSTSFVLETFIHSKEKPTMLQWIELLTKQFNNSQAACEWFLDRMADDDWWPMQILIKCPNQIVRQMFQRLCIHVIQRLRPVHAHLYLQPGMEDGSDDMDTSVEDIGGRSCVTRFVRTLLLIMEHGVKPHSKHLTEYFAFLYEFAKMGEEESQFLLSLQAISTMVHFYMGTKGPENPQVEVLSEEEGEEEEEEEDILSLAEEKYRPAALEKMIALVALLVEQSRSER

SEQ ID NO: 67429 - protein, 1186 aa, Homo sapiens
MVSSGCRMRSLWFIIVISFLPNTEGFSRAALPFGLVRRELSCEGYSIDLRCPGSDVIMIESANYGRTDDKICDADPFQMENTDCYLPDAFKIMTQRCNNRTQCIVVTGSDVFPDPCPGTYKYLEVQYECVPYIFVCPGTLKAIVDSPCIYEAEQKAGAWCKDPLQAADKIYFMPWTPYRTDTLIEYASLEDFQNSRQTTTYKLPNRVDGTGFVVYDGAVFFNKERTRNIVKFDLRTRIKSGEAIINYANYHDTSPYRWGGKTDIDLAVDENGLWVIYATEQNNGMIVISQLNPYTLRFEATWETVYDKRAASNAFMICGVLYVVRSVYQDNESETGKNSIDYIYNTRLNRGEYVDVPFPNQYQYIAAVDYNPRDNQLYVWNNNFILRYSLEFGPPDPAQVPTTAVTITSSAELFKTIISTTSTTSQKGPMSTTVAGSQEGSKGTKPPPAVSTTKIPPITNIFPLPERFCEALDSKGIKWPQTQRGMMVERPCPKGTRGTASYLCMISTGTWNPKGPDLSNCTSHWVNQLAQKIRSGENAASLANELAKHTKGPVFAGDVSSSVRLMEQLVDILDAQLQELKPSEKDSAGRSYNKLQKREKTCRAYLKAIVDTVDNLLRPEALESWKHMNSSEQAHTATMLLDTLEEGAFVLADNLLEPTRVSMPTENIVLEVAVLSTEGQIQDFKFPLGIKGAGSSIQLSANTVKQNSRNGLAKLVFIIYRSLGQFLSTENATIKLGADFIGRNSTIAVNSHVISVSINKESSRVYLTDPVLFTLPHIDPDNYFNANCSFWNYSERTMMGYWSTQGCKLVDTNKTRTTCACSHLTNFAILMAHREIAYKDGVHELLLTVITWVGIVISLVCLAICIFTFCFFRGLQSDRNTIHKNLCINLFIAEFIFLIGIDKTKYAIACPIFAGLLHFFFLAAFAWMCLEGVQLYLMLVEVFESEYSRKKYYYVAGYLFPATVVGVSAAIDYKSYGTEKACWLHVDNYFIWSFIGPVTFIILLNIIFLVITLCKMVKHSNTLKPDSSRLENIKSWVLGAFALLCLLGLTWSFGLLFINEETIVMAYLFTIFNAFQGVFIFIFHCALQKKVRKEYGKCFRHSYCCGGLPTESPHSSVKASTTRTSARYSSGTQSRIRRMWNDTVRKQSESSFISGDINSTSTLNQGLTSHGLRAHLQDLYHLEDIH

SEQ ID NO: 67430 - protein, 64 aa, Homo sapiens
MGKSYHPGCFRCIVCNKCLDGIPFTVDFSNQVYCVTDYHKNYAPKCAACGQPILPSEGCEDIVR

SEQ ID NO: 67431 - protein, 292 aa, Homo sapiens
MGRRALLLLLLSFLAPWATIALRPALRALGSLHLPTNPTSLPAVAKNYSVLYFQQKVDHFGFNTVKTFNQRYLVADKYWKKNGGSILFYTGNEGDIIWFCNNTVVCQYLKNPNVSDSLLLQNIFQALNVYYNYSGQVKCLNISETATSSLGTLGWSYQACTEVVMPFCTNGVDDMFEPHSWNLKELSDDCFQQWGVRPRPSWITTMYGGKNISSHTNIVFSNGELDPWSGGGVTKDITDTLVAVTISEGAHHLDLRTKNALDPMSVLLARSLEVRHMKNWIRDFYDSAGKQH

SEQ ID NO: 67432 - protein, 174 aa, Homo sapiens
  MOD_RES (1)..(1): Any amino acid
XEDKKPKGKSPPMAEATPVIVTTEEIAEIKRKNELRVKIKEEHLAALQFEEIATQFRLELIKTKALALLEDLVTKVVDVYKLMEKWLGERYLNEMASTEKLTDVARYHIETSTKIQNELYLSQEDFFINGNIKVFPDPPPSIRPPPVEKEEDGTLTIEQLDSLRDQFLDMAPKE

SEQ ID NO: 67433 - protein, 216 aa, Homo sapiens
MNEYPKKRKRKTLHPSRYSDSSGISRIADGFNGIFSDHCYSVCSMRQPDLKYFDNKDDDSDTETSNDLPKFADGIKARNRNQNYLVPSPVLRILDHTAFSTEKSADIVICDEECDSPESVNQQTQEESPIEVHTAEDVPIAVEVHAISEDYDIETENNSSESLQDQTDEEPPAKLCKILDKSQALNVTAQQKWPLLRANSSGLYKCELCEFNSKYF

SEQ ID NO: 67434 - protein, 60 aa, Homo sapiens
MSDSLVVCEVDPELTEKLRKFRFRKETDNAAIIKHFPRGAQNGVAGETAQVRGLQLQVRA

SEQ ID NO: 67435 - protein, 295 aa, Homo sapiens
MPPPWHPPPRLLAVCLLTTTQATVVRDLVAVRMAEEQEFTQLCKLPAQPSHPHCVNNTYRSAQHSQALLRGLLALRDSGILFDVVLVVEGRHIEAHRILLAASCDYFRGMFAGGLKEMEQEEVLIHGVSYNAMCQILHFIYTSELELSLSNVQETLVAACQLQIPEIIHFCCDFLMSWVDEENILDVYRLAELFDLSRLTEQLDTYILKNFVAFSRTDKYRQLPLEKVYSLLSSNRLEVSCETEVYEGALLYHYSLEQVQADQISLHEPPKLLETVRFPLMEAEVLQRLHDKLDP

SEQ ID NO: 67436 - protein, 890 aa, Homo sapiens
MWPVLPSGQLNEEFDWPIQGLLVPSSPPMKKPICKTTEPYAPVRLRVLQNGEKNKNRSVTILGPDISPGRKTQCTEILNLPSAARRLYNEKGKEIFALKDLQRDELVYVSCGELWINPDLSIAQQKKQIFLRNLESDIAKIQIFCSTHKIEALVLEVQSDIVSGSKLAVHKPVAIFGEEKQVTEPEEKQMQEDPLTTENASSEILDSHVRAHLRMKACHTLPRYAWQETSHDFDEDDSLPKKTEKGLFENVEPQKKHSCSPKHSKLHKHCHQQFEYRDGQIISHAAPQLVLGVQGPNLRSGMEVVLVEKKSDGSHQRWIHQEDSRTFHLVSNPDLVLAVSMTKTRNEVCGYPVIVQKYKPYNNGAANQKWHYMKNIKALVAFHSTALDKEITSANYAGVCTSSVIKEENIDQPGYCYLSPDGKRKTMLCLACGQSMRTEKGLKQLLPGVPFLCISGTKTQKPFLQGPFKVISVAEVDLSCDKAEKTLSYYQARLLSLRMKTCTQAASHSGMAATHQKAVKIIAYKNGDGYRNGKLIVAGTFPMLLTECTEQLGLARAASKVYTKDGTPIFTLRDLVLWALDESFLQRDSEKQKQDAAPVGKEQIIVEKNPRMKVKNRLFAKSVTSDSLDGIDKSLLTLILRNPIAIWVSCGEPFLPPNALQKAEKLEKQNWLKKDRILADLDTMRHKMRQLKGRRVAACQPATMVPTKSPVQPVVVEGGWTEQTQQEIKLMELIRHTEAHLSEIQEMESKINFPIATKRIAVKPSNLYKQPNTKRVWIYLNGGRPEDGTYAWGKTISELLQDCSSRLKMTHPARALYTPSGEPIQSWDDIERDMVICVSMGHGFKTPKELKQLMEIRANYARIRRQQGPQATDIVVSPSTKLLSLAHLHN

SEQ ID NO: 67437 - protein, 95 aa, Homo sapiens
GFFDIPVDNLYAEPAVLKWIRENISEWRNCTIVSPDAGGAKRLLSAGATRVYAILTHGIFSGPAISRINNACFEAVVVTNTIPQEDKMKHCSKIQ

SEQ ID NO: 67438 - protein, 246 aa, Homo sapiens
MPGRSCVALVLLAAAVSCAVAQHAPPWTEDCRKSTYPPSGPTYRGAVPWYTINLDLPPYKRWHELMLDKAPVLKVIVNSLKNMINTFVPSGKIMQVVDEKLPGLLGNFPGPFEEEMKGIAAVTDIPLVNLDFQRNNKTVFKASSFAGYVGMLTGFKPGLFSLTLNERFSINGGYLGILEWILGKKDVMWIGFLTRTVLENSTSYEEAKNLLTKTKILAPAYFILGGNQSGEGCVITRDRKESLDVY

SEQ ID NO: 67439 - protein, 432 aa, Homo sapiens
MAGPPALPPPETAAAATTAAAASSSAASPHYQEWILDTIDSLRSRKARPDLERICRMVRRRHGPEPERTRAELEKLIQQRAVLRVSYKGSISYRNAARVQPPRRGATPPAPPAPPQQQQPPPPQPQPPPEGGAVRAGGAARPVSLREVVRYLGGSGGAGGRLTRGRVQGLLEEEAAARGRLERTRLGALALPRGDRPGRAPPAASARPSRSKRGGEERVLEKEEEEDDDEDEDEEDDVSEGSEVPESDRPAGAQHHQLNGERGPQSAKERVKEWTPCGPHQGQDEGRGPAPGSGTRQVFSMAAMNKEGGTASVATGPDSPSPVPLPPGKPALPGADGTPFGCPPGRKEKPSDPVEWTVMDVVEYFTEAGFPEQATAFQEQEIDGKSLLLMQRTDVLTGLSIRLGPALKIYEHHIKVLQQGHFEDDDPDGFLG

SEQ ID NO: 67440 - protein, 336 aa, Homo sapiens; identical to SEQ ID NO: 47311

SEQ ID NO: 67441 - protein, 811 aa, Homo sapiens
MTTEVGSVSEVKKDSSQLGTDATKEKPKEVAENQQNQSSDPEEEKGSQPPPAAESQSSLRRQKREKETSESRGISRFIPPWLKKQKSYTLVVAKDGGDKKEPTQAVVEEQVLDKEEPLPEEQRQAKGDAEEMAQKKQEIKVEVKEEKPSVSKEEKPSVSKVEMQPTELVSKEREEKVKETQEDKLEGGAAKRETKEVQTNELKAEKASQKVTKKTKTVQCKVTLLDGTEYSCDLEKHAKGQVLFDKVCEHLNLLEKDYFGLLFQESPEQKNWLDPAKEIKRQLRNLPWLFTFNVKFYPPDPSQLTEDITRYFLCLQLRQDIASGRLPCSFVTHALLGSYTLQAELGDYDPEEHGSIDLSEFQFAPTQTKELEEKVAELHKTHRGLSPAQADSQFLENAKRLSMYGVDLHHAKDSEGVDIKLGVCANGLLIYKDRLRINRFAWPKILKISYKRSNFYIKVRPAELEQFESTIGFKLPNHRAAKRLWKVCVEHHTFYRLVSPEQPPKAKFLTLGSKFRYSGRTQAQTRQASTLIDRPAPHFERTSSKRVSRSLDGAPIGVMDQSLMKDFPGAAGEISAYGPGLVSIAVVQDGDGRREVRSPTKAPHLQLIEGKSSHETLNIVEEKKRAEVGKDERVITEEMNGKEISPGSGPGEIRKVEPVTQKDSTSLSSESSSSSSESEEEDVGEYRPHHRVTEGTIREEQEYEEEVEEEPRPAAKIDGGAGGDSGTLLTAQTITSESVSTTTTTHITKTVKGGISETRIEKRIVITGDGDIDHDQALAQAIREAREQHPDMSVTRVVVHKETELAEEGED

SEQ ID NO: 67442 - protein, 79 aa, Homo sapiens
MEYLGGGSALDLLKPGPLEETYIATILREILKGLDYLHSERKIHRDIKAANVLLSEQGDVKLADFGVAGQLTDTQIKRN

SEQ ID NO: 67443 - protein, 87 aa, Homo sapiens
MNGTLDHPDQPDLDAIKMFVGQVPRTWSEKDLRELFEQYGAVYEINVLRDRSQNPPQSKGCCFVTFYTRKAALEAQNALHNMKVLPG

SEQ ID NO: 67444 - protein, 39 aa, Homo sapiens
MTEQMTLRGTLKGHNGWVTQIATTPQFPDMILSASRGTD

SEQ ID NO: 67445 - protein, 182 aa, Homo sapiens
MAAPAGGGGSAVSVLAPNGRRHTVKVTPSTVLLQVLEDTCRRQDFNPCEYDLKFQRSVLDLSLQWRFANLPNNAKLEMVPASRSREGPENMVRIALQLDDGSRLQDSFCSGQTLWELLSHFPQIRECLQHPGGATPVCVYTRDEVGGLLLLTQSPLTFSPLSNWKICCPAAVSRAVAGDSGS

SEQ ID NO: 67446 - protein, 37 aa, Homo sapiens
  MOD_RES (1)..(1): Any amino acid
XGATLSSAQSARAPGAEGAGSSAEGTAGLSVSTIPQP

SEQ ID NO: 67447 - protein, 279 aa, Homo sapiens
MGSKKLKRVGLSQELCDRLSRHQILTCQDFLCLSPLELMKVTGLSYRGVHELLCMVSRACAPKMQTAYGIKAQRSADFSPAFLSTTLSALDEALHGGVACGSLTEITGPPGCGKTQFCIMMSILATLPTNMGGLEGAVVYIDTESAFSAERLVEIAESRFPRYFNTEEKLLLTSSKVHLYRELTCDEVLQRIESLEEEIISKGIKLVILDSVASVVRKEFDAQLQGNLKERNKFLAREASSLKYLAEEFSIPVSFSFFLFFLFLSFVSFILHSLTYGIK

SEQ ID NO: 67448 - protein, 153 aa, Homo sapiens
MNMFKEAVTFKDVAVAFTEEELGLLGPAQRKLYRDVMVENFRNLLSVGHPPFKQDVSPIERNEQLWIMTTATRRQGNLGEKNQSKLITVQDRESEEELSCWQIWQQIANDLTRCQDSMINNSQCHKQGDFPYQVGTELSIQISEDENYIVNKA

SEQ ID NO: 67449 - protein, 327 aa, Homo sapiens
MSDKLKERKVSRLSPNGTCALVVEASDSPTRHLGGPMAGKCPHGTLSVEESRVRTPVSHKVIEKRRRDRINRCLNELGKTVPMALAKQGEPQEALAQIRSRVRSLVLSSATVPDQQALGRCEGPFLLLQSSGKLEKAEILEMTVQYLRALHSADFPRGREKAELLAEFANYFHYGYHECMKNLVHYLTTVERMETKDTKYARILAFLQSKARLGAEPAFPPLGSLPEPDFSYQLHPAGPEFAGHSPGEAAVFPQGSGAGPFPWPPGAARSPALPYLPSAPVPLASPAQQHSPFLTPVQGLDRHYLNLIGHAHPNALNLHTPQHPPVL

SEQ ID NO: 67450 - protein, 2208 aa, Homo sapiens
MKDKRKKKDRTWAEAARLALEKHPNSPMTAKQILEVIQKEGLKETSGTSPLACLNAMLHTNTRIGDGTFFKIPGKSGLYALKKEESSCPADGTLDLVCESELDGTDMAEANAHGEENGVCSKQVTDEASSTRDSSLTNTAVQSKLVSSFQQHTKKALKQALRQQQKRRNGVSMMVNKTVPRVVLTPLKVSDEQSDSPSGHLKWTKAEDIDIETPGSILVNTNLRALINKHTFASLPQHFQQYLLLLLPEVDRQMGSDGILRLSTSALNNEFFAYAAQGWKQRLAEGEFTPEMQLRIRQEIEKEKKTEPWKEKFFERFYGEKLGMSREESVKLTTGPNNAGAQSSSSCGTSGLPVSAQTALAEQQPKSMKSPASPEPGFCATLCPMVEIPPKDIMAELESEDILIPEESVIQEEIAEEVETSICECQDENHKTIPEFSEEAESLTNSHEEPQIAPPEDNLESCVMMNDVLETLPHIEVKIEGKSESPQEEMTVVIDQLEVCDSLIPSTSSMTHVSDTEHKESETAVETSTPKIKTGSSSLEGQFPNEGIAIDMELQSDPEEQLSENACISETSFSSESPEGACTSLPSPGGETQSTSEESCTPASLETTFCSEVSSTENTDKYNQRNSTDENFHASLMSEISPISTSPEISEASLMSNLPLTSEASPVSNLPLTSETSPMSDLPLTSETSSVSSMLLTSETTFVSSLPLPSETSPISNSSINERMAHQQRKSPSVSEEPLSPQKDESSATAKPLGENLTSQQKNLSNTPEPIIMSSSSIAPEAFPSEDLHNKTLSQQTCKSHVDTEKPYPASIPELASTEMIKVKNHSVLQRTEKKVLPSPLELSVFSEGTDNKGNELPSAKLQDKQYISSVDKAPFSEGSRNKTHKQGSTQSRLETSHTSKSSEPSKSPDGIRNESRDSEISKRKTAEQHSFGICKEKRARIEDDQSTRNISSSSPPEKEQPPREEPRVPPLKIQLSKIGPPFIIKSQPVSKPESRASTSTSVSGGRNTGARTLADIKARAQQARAQREAAAAAAVAAAASIVSGAMGSPGEGGKTRTLAHIKEQTKAKLFAKHQARAHLFQTSKETRLPPPLSSKEGPPNLEVSSTPETKMEGSTGVIIVNPNCRSPSNKSAHLRETTTVLQQSLNPSKLPETATDLSVHSSDENIPVSHLSEKIVSSTSSENSSVPMLFNKNSVPVSVCSTAISGAIKEHPFVSSVDKSSVLMSVDSANTTISACNISMLKTIQGTDTPCIAIIPKCIESTPISATTEGSSISSSMDDKQLLISSSSASNLVSTQYTSVPTPSIGNNLPNLSTSSVLIPPMGINNRFPSEKIAIPGSEEQATVSMGTTVRAALSCSDSVAVTDSLVAHPTVAMFTGNMLTINSYDSPPKLSAESLDKNSGPRNRADNSGKPQQPPGGFAPAAINRSIPCKVIVDHSTTLTSSLSLTVSVESSEASLDLQGRPVRTEASVQPVACPQVSVISRPEPVANEGIDHSSTFIAASAAKQDSKTLPATCTSLRELPLVPDKLNEPTAPSHNFAEQARGPAPFKSEADTTCSNQYNPSNRICWNDDGMRSTGQPLVTHSGSSKQKEYLEQSCPKAIKTEHANYLNVSELHPRNLVTNVALPVKSELHEADKGFRMDTEDFPGPELPPPAAEGASSVQQTQNMKASTSSPMEEAISLATDALKRVPGAGSSGCRLSSVEANNPLVTQLLQGNLPLEKVLPQPRLGAKLEINRLPLPLQTTSVGKTAPERNVEIPPSSPNPDGKGYLAGTLAPLQMRKRENHPKKRVARTVGEHTQVKCEPGKLLVEPDVKGVPCVISSGISQLGHSQPFKQEWLNKHSMQNRIVHSPEVKQQKRLLPSCSFQQNLFHVDKNGGFHTDAGTSHRQQFYQMPVAARGPIPTAALLQASSKTPVGCNAFAFNRHLEQKGLGEVSLSSAPHQLRLANMLSPNMPMKEGDEVGGTAHTMPNKALVHPPPPPPPPPPPPLALPPPPPPPPPLPPPLPNAEVPSDQKQPPVTMETTKRLSWPQSTGICSNIKSEPLSFEEGLSSSCELGMKQVSYDQNEMKEQLKAFALKSADFSSYLLSEPQKPFTQLAAQKMQVQQQQQLCGNYPTIHFGSTSFKRAASAIEKSIGILGSGSNPATGLSGQNAQMPVQNFADSSNADELELKCSCRLKAMIVCKGCGAFCHDDCIGPSKLCVACLVVR

SEQ ID NO: 67451 - protein, 89 aa, Homo sapiens
MLMAVLNCLFDSLSQMLRKNVEKRALLENMEGLFLAVDEIVDGGVILESDPQQVVHRVALRGEDVPLTEQTVSQVLQSAKEQIKWSLLR

SEQ ID NO: 67452 - protein, 188 aa, Homo sapiens
AEQLLEPHVQAPSLEPSVSPQDETAEVAVPAAVPAAEAEAEVTLRELQEALEEEVLTRQSLSREMEAIRTDNQNFASQLREAEARNRDLEAHVRQLQERMELLQAEGATAVTGVPSPRATDPPSHVRPLSFPCLRPAAHSADPLPGSWSPRPDIGLTLRLCDFRGQKPFIQPQISLRSGLTRFPPGSP

SEQ ID NO: 67453 - protein, 165 aa, Homo sapiens
  MOD_RES (1)..(1): Any amino acid
XLPLALHLASEFFLRNPNKDVRLLVACCLADIFRIYAPEAPYTSHDKLKWRVRKEAMMGLAQLYKKYCLHGEAGKEAAEKVSWIKDKLLHIYYQNSIDDKLLVEKIFAQYLVPHNLETEERMKCLYYLYASLDPNAVKALNEMWKCQNMLRSHVRELLDLHKQPT

SEQ ID NO: 67454 - protein, 53 aa, Homo sapiens
  MOD_RES (1)..(1): Any amino acid
XEVEGAEVGWYVTLHVSEVPVSVVECFRQGTPLIAFSLLPHEQKRTNINCRDS

SEQ ID NO: 67455 - protein, 255 aa, Homo sapiens
MDSETDMVRQIRALDSDMQTLVYENYNKFISATDTIRKMKNDFRKMEDEMDRLATNMAVITDFSARISATLQDRHERITKLAGVHALLRKLQFLFELPSRLTKCVELGAYGQAVRYQGRAQAVLQQYQHLPSFRAIQDDCQVITARLAQQLRQRFREGGSGAPEQAECVELLLALGEPAEELCEEFLAHARGRLEKELRNLEAELGPSPPAPDVLEFTDHGGSGFVGGLCQVAAAYQELFAAQGPAGAEKLAAFA

SEQ ID NO: 67456 - protein, 5388 aa, Homo sapiens
MAPIWGMDVPLPSDISLLLLFVFFIWRLWTLFSRNRSWKQVAAKINSETSKQHRLKKIQKLTGQRDPILYSSAQDPQWEENLRMACTEANLTCVSELPVGWTQEYILWSMERSLQQIFRYLESARSRLVEQDLPESQDMISSSTTSVLVAQKTVLCCCDYKKAKHSTDHSISFSSSCNDSSLSHLPVFSEGTTWEFRSHSLPISHKKQSSVFRNQGRTLPLFQLSEPQKSKIFQNLADLSPLQPQSSFINSISEPLNICKQKRKKNDERMSKSHLTSDHEPNSVSKERPRLPRWATFKLSPSVRRELEGHMSQKVFALRQQTAPLPLRKSWAMLNYITEVQGGVAESEKPQTQLSMPIHQNTEQNINNKSSDLPSFQLHVNAGVGSGSNSTETKLSQSLISDKQLQPGDGPQILGFKPLVTSMGSLPPRSLELNVIQEETPLLKNDPKHVLELSIEERVIGFPEKRIQQHKTQVTNVELTPRLSYQVKDSLKVTPLALLRVMDSMGMIPESHSEFAGLFSQLPSQVVKPMETMETVSITPKPPNQVIQSMEAAPRSQHQVMESERVATRLLNQVTDNKKVTPVALLQVMDSMGMINKSHPCIESVGMTPTPRYQVIESVKMNTLLNHQDTKPEKMNLRPQHAVTETVEMMPGPQHKVMESAGMTSGSQSQVMEQGKATPGLICQDTKSLEMISAPLHQVMGYVKGIPVALLQAMDFREIIPPAQPHVIESGGLTPSSQLQGRRSVHLVLPPEFQDINTVELTLRPPTEDTKSAELAPKPWLHDVRSEKVAPVLLLEDVKTPQMVECRRSIPETQVQGMKYGELNKGTQFKEVKAAEMSPKQNHEATEPERLTPWHQASESLEMISGPGYQGKEAKLTSDNCHQVEKSIGLTQPSLGTSPGPLSQTSESVEMSSVSFQDILKTMHQLGKAMGETPVSQHTTKESLDLIPGSEMQSVKSEGVTTEPQPHDMKFVYCNLGPCSEVTELSEIPPMSEYKETVGLALPQVAKTQGVIPVPPHSETGFLELTLGPGTQYEKSEPLLQNLKSMELTSESSPLLIGSKKLITEQKPHVMDLTPGPQLQGEKSKQLGLESQLQDMKHMNLIQQSTTGVVESEEMMPELPLQSMPLEDLTKREELQRVKSVDLNLGPSQPSVKSSELTSGPQLPSVRFSKIFPGPLLQGEKPVELISQPPHYGVKSDELTSDSPVQDIKLSDFIPEPTHQSVKFVQLTPESQPQDVKFVELSPGLFLQDVKFSDLIPEPKHQGFKHMQLTPGAQLEDIKSLDFVPESSLQSSQGTHIEDMKSVLSTEGSQFHSMKSAKLTSELPFQSVKSEEVNLGPWQQDIKFSELTSRPKLQGVNSADQTPGSMFHSVNFVEVVPKLGLQDSKLAKIFPGTQSMKQVGLNPELQLQDVKCFDLVPGTQPQGVKSLELNSGPQLQCVKVLEMTPGPKMQGVPPVTMAPGPEGEGVKPELLVPEPLFQGVKYVAGNQEPSLEAEVSYKLVSEPQMPDAESMELTPGPQLPSVNHSELTRQPQLQGIKSSELIQRPQLQNVNPVEWSPVLKLKGFRSEKLTSEPQLEDMTSAELISGPHLGDVKTMQLTPEPELEDVKSMTLTPEPQAGGVKLEEVTPGSKLQSELLTSGSHLEDMKSVTLTPGPCLESIKSMEITFPQPEGGKSVAITLGSQTEDVKSVEFTPDSELQGVKSVELTPCSRIQDLKTEELVLGTQLQDMKTAKLKLGLKMQGESMAFAPGPLLQGVKSMETLQRPQLQSVKPEELTSVPQMQDMKFVEITPCLKLRSLKSIKETQDPHLQCVKPVKLTPWQKRQAVKFVNITRGEEFEEVKSVDLALKQQFQGMAPVDLTLEPEQDGQISVNSQEQQCVNFEQVKKGSESEGVMSLELIPEPKSEGIKSVDLKSDLQSKGIKSSELTPESNMQDVKAKEFKHEPQLQSMKSPKLTPGPQLHQVKPLGSTVEPQIQSVKIVELNKELELGRMKSVQWITRPEFQGLKSVGLNLGSQSRSVKPAELKLSIQLGDMIASKLVLEPKLQGAKPMEFNRGPQLQCVKTSELSSGPQLQKGKMLASTSEPQLQGVKTVELNQDSQLTSVKSVQWIPGPEFQGVKTIGLNLGSQSQGVKPGESKSSIESGGVKSSQLTLGPKLQSVTSMEFNLGSQLHFVKAPELSQGPQLQKGKIPASTSEPYFQGVKTVELNQDSQLGNAKSVQWISGPEFQGVKTVGLNLGSQSRGVKPAELKSSTESGGVKSSELTLGPKLQGAKPVEFNFGPQLQCVKTPKMSRGPQLQKGKILASTSEPQLQGVKDVESNKDSQLGSVNSVQWIPGPEFQGVKSVLKCGSQSRVVTTVELKPSVQLRNVKSSELTPRPKLQSIQPLTSLQEHQLPGLKPIALKSGLQLRTVKSCGPISTSKLCDIKSMAFKPGLHSQDVKSSELTPRPQLHKVKPLEACPGTQLQDVKSPAFTQVPQFSGVKSGVLSQELPLQSDKTVALNSLLHLKSKKSSELAHQTELPGMKSEEFNSGPQWQCVKSSKLNPKTKSQDMKFRELNPSSQLKDIPYYDLTTRTKIQGVKSTDFKPGPQLQGVKSSESIPKTKLQEVKLMECNSGPRLQDLKSSRLIIGIKCQDIKSMDFSSGPHLQTVKSSEVIPGGKLQGVKSVEFKPSPKLQSEKSDLTLGRKFPGVKSVELESGPQLQDIKSSDLIMGIKLQDVKSMKFSSGQHFQGIKSSEVTSGTRLQSMKSMDFNSGQQTQSEKSSELIQGTNHQDVKSVEFHHGLKLQGVTSSELTPETKLQGGESVEFNSGPQWQDTKYSNSIMGTELQDVKSMEFSSGSHLQGMKSSEVIPATKLQKVKSVLMPRPMRQDVKSSELTVGTKVQDRTSLELSSTSQLQDRKLSMLTPGIHLQGVKSVEYNPGAKLEDMKSGLIKLQTVNSTEGNHDPELQVAKLSKLALESKIHSVAPSEFNAEKQQQDEKSHKLNPWPDLQSVKFMVFNPEPHLQHRKSSELCTGTKLQDVKSMKFNLQQQLQGVKSSELCLGTRLQGIQSLDFNPGPQLQGTKSAKLNPGPELQGIKSKVFCLGPHLQDVNSSVSIPEPPHQCVNSTGSNCGLPLQGVNSASIPAPKLQCISSNGCIPGPHLQGVNSAFIPQPKAHCVNSIGCNPGPYLQGMKSPELTPVSKLQGMKCSELNPGTEIQSETPMMFNPIPHLQGLKSELTPGSKLLRAAPMECNPGPQVQYVNSSELNPGLKLQCIDSMECKLAPHLQGVESGTKFQVMKFSELHPGPELQGIKSVVFNSVQHLQDVKCELTPGTKFQDITPKEFNSGPQLQGMNSEEFHSHLRQHNVRSVVFVPEPCSQDVKSVKSTLWPQPQSVNSSGLTSCFGSQCVKSVAFASKPCFQDVKPMELTPGAQQQGINYQELTSGWQDVKSMMLVPEPTRKFPSGPLLTSVRFSNLSPESQQQDVKSLEFTVEPKLQSVKHVKLSSVSLQQTIKSVELAPGSLPQRVKYGEQTPRTNYQIMESSELIPRPGHQFAKYAEMIPQPKYQIPKSANLISIPIYHATESSEMAQGLAYKGIDTVEKSVGLTPKLTGRAKESLGMLLQPDLQVPKFVDLTPMVRDQGSKFLGLTPEKSYQILETMELLSQSRPRVKDVGELYMKPLQQTVEYEGITPELKHYFTEAMGLTAEARIQANEFFGMTPKPTSQATGFAERSPRLCPQNLECVEVISEKRLQGEESVVLIPKSLHHVPDSASGMTPGLGHRVPESVELTSKSGVQVEKTLQLTPKPQHHVGSPGIISGLGHQVPESVNLTCKQWLQMEESLEVPLKQTSQVIGHEESVELTSEARQHREVSMGLTKSKNQSMKSPGTTPGPLGRIVEFMRISPEPLDQVTESARTQLQVAQSEEVILIDVPKVVQSVKVTPGPPFQIVKSVTIPRPTPQMVEYIELTPKLQYVRPSEHHTGPCLQDVKSTKLITKPKHQILETVELTGFQIVKTMLIPGPSLQIVKSEELAPGPIPQVVEPIGVALESGIEAINCVDLLPRPHLQELIVPAELTPSPCTQVKSAELTSPQTSPFEEHTILTHKQGLQAVKSTVIKTEPPKVMETEDLNLGHVCQNRDCQKLTSEELQVGTDFSRFLQSSSTTLISSSVRTASELGGLWDSGIQEVSRALDIKNPGTDILQPEETYIDPTMIQSLTFPLALHNQSSDKTANIVENPCPEILGVDVISKETTKRKQMEELENSLQRHLPQSWRSRSRTFQAESGVQKGLIKSFPGRQHNVWESHAWRQRLPRKYLSTMLMLGNILGTTMERKLCSQTSLAERATADTCQSIQNLFGIPAELMEPSQSLPEKGPVTISQPSVVKNYIQRHTFYHGHKKRMALRIWTRGSTSSIIQQYSGTRVRIKKTNSTFNGISQEVIQHMPVSCAGGQLPVLVKSESSLSIFYDREDLVPMEESEDSQSDSQTRISESQHSLKPNYLSQAKTDFSEQFQLLEDLQLKIAAKLLRSQIPPDVPPPLASGLVLKYPICLQCGRCSGLNCHHKLQTTSGPYLLIYPQLHLVRTPEGHGEVRLHLGFRLRIGKRSQISKYRERDRPVIRRSPISPSQRKAKIYTQASKSPTSTIDLQSGPSQSPAPVQVYIRRGQRSRPDLVEKTKTRAPGHYEFTQVHNLPESDSESTQNEKRAKVRTKKTSDSKYPMKRITKRLRKHRKFYTNSRTTIESPSRELAAHLRRKRIGATQTSTASLKRQPKKPSQPKFMQLLFQSLKRAFQTAHRVIASVGRKPVDGTRPDNLWASKNYYPKQNARDYCLPSSIKRDKRSADKLTPAGSTIKQEDILWGGTVQCRSAQQPRRAYSFQPRPLRLPKPTDSQSGIAFQTASVGQPLRTVQKDSSSRSKKNFYRNETSSQESKNLSTPGTRVQARGRILPGSPVKRTWHRHLKDKLTHKEHNHPSFYRERTPRGPSERTRHNPSWRNHRSPSERSQRSSLERRHHSPSQRSHCSPSRKNHSSPSERSWRSPSQRNHCSPPERSCHSLSERGLHSPSQRSHRGPSQRRHHSPSERSHRSPSERSHRSSSERRHRSPSQRSHRGPSERSHCSPSERRHRSPSQRSHRGPSERRHHSPSKRSHRSPARRSHRSPSERSHHSPSERSHHSPSERRHHSPSERSHCSPSERSHCSPSERRHRSPSERRHHSPSEKSHHSPSERSHHSPSERRRHSPLERSRHSLLERSHRSPSERRSHRSFERSHRRISERSHSPSEKSHLSPLERSRCSPSERRGHSSSGKTCHSPSERSHRSPSGMRQGRTSERSHRSSCERTRHSPSEMRPGRPSGRNHCSPSERSRRSPLKEGLKYSFPGERPSHSLSRDFKNQTTLLGTTHKNPKAGQVWRPEATR

SEQ ID NO: 67457 - protein, 54 aa, Homo sapiens
NQTFQNESRTSSTFPSVYTITSNDISVNTVDEENTVMVASASVSQSQLPGLGRI

SEQ ID NO: 67458 - protein, 1096 aa, Homo sapiens
MGSEDHGAQNPSCKIMTFRPTMEEFKDFNKYVAYIESQGAHRAGLAKIIPPKEWKPRQTYDDIDDVVIPAPIQQVVTGQSGLFTQYNIQKKAMTVGEYRRLANSEKYCTPRHQDFDDLERKYWKNLTFVSPIYGADISGSLYDDDVAQWNIGSLRTILDMVERECGTIIEGVNTPYLYFGMWKTTFAWHTEDMDLYSINYLHFGEPKSWYAIPPEHGKRLERLAIGFFPGSSQGCDAFLRHKMTLISPIILKKYGIPFSRITQEAGEFMITFPYGYHAGFNHGFNCAESTNFATLRWIDYGKVATQCTCRKDMVKISMDVFVRILQPERYELWKQGKDLTVLDHTRPTALTSPELSSWSASRASLKAKLLRRSHRKRSQPKKPKPEDPKFPGEGTAGAALLEEAGGSVKEEAGPEVDPEEEEEEPQPLPHGREAEGAEEDGRGKLRPTKAKSERKKKSFGLLPPQLPPPPAHFPSEEALWLPSPLEPPVLGPGPAAMEESPLPAPLNVVPPEVPSEELEAKPRPIIPMLYVVPRPGKAAFNQEHVSCQQAFEHFAQKGPTWKEPVSPMELTGPEDGAASSGAGRMETKARAGEGQAPSTFSKLKMEIKKSRRHPLGRPPTRSPLSVVKQEASSDEEASPFSGEEDVSDPDALRPLLSLQWKNRAASFQAERKFNAAAARTEPYCAICTLFYPYCQALQTEKEAPIASLGEGCPATLPSKSRQKTRPLIPEMCFTSGGENTEPLPANSYIGDDGTSPLIACGKCCLQVHASCYGIRPELVNEGWTCSRCAAHAWTAECCLCNLRGGALQMTTDRRWIHVICAIAVPEARFLNVIERHPVDISAIPEQRWKLKCVYCRKRMKKVSGACIQCSYEHCSTSFHVTCAHAAGVLMEPDDWPYVVSITCLKHKSGGHAVQLLRAVSLGQVVITKNRNGLYYRCRVIGAASQTCYEVNFDDGSYSDNLYPESITSRDCVQLGPPSEGELVELRWTDGNLYKAKFISSVTSHIYQVEFEDGSQLTVKRGDIFTLEEELPKRVRSRLSLSTGAPQEPAFSGEEAKAAKRPRVGTPLATEDSGRSQDYVAFVESLLQVQGRPGAPF

SEQ ID NO: 67459 - protein, 72 aa, Homo sapiens
MATLKDQLIYNLLKEEQTPQNKITVVGVGAVGMACAISILMKDLADELALVDVIEDKLKGEMMDLQHGSLFL

SEQ ID NO: 67460 - protein, 192 aa, Homo sapiens
MEPEPEPAAVEVPAGRVLSARELFAARSRSQKLPQRSHGPKDFLPDGSAAQAERLRRCREELWQLLAEQRVERLGSLVAAEWRPEEGFVELKSPAGKFWQTMGFSEQGRQRLHPEEALYLLECGSIHLFHQDLPLSIQEAYQLLLTDHTVTFLQYQVFSHLKRLGYVVRRFQPSTDGVSLCCPGWSRTPDLK

SEQ ID NO: 67461 - protein, 137 aa, Homo sapiens
SSSSQQNSPQMKNSPSFPFHGSRPAGLPGLGSSTQKVTHRVLGPVREPRSQDRRRQQQPLNHRPAGSLAPSPAPTSSGPASSHKLGSCLLPDSFNIPGLYPLPLKSGFASLLHGQARFFKPSWETRGITYPLGILNL

SEQ ID NO: 67462 - protein, 97 aa, Homo sapiens
MREIVHIQAGQCGNQIGAKFWEVISDEHGIDPSGNYVGDSDLQLERISVYYNEASSHKYVPRAILVDLEPGTMDSVRSGAFGHLFRPDNFIFGPHLL

SEQ ID NO: 67463 - protein, 93 aa, Homo sapiens
MGPPGSPWQWVTLLLGLLLPPAAPFWLLNVLFPPHTTPKAELSNHTRPVILARSQAGQTRCGELDVLPQDRGLLHHLAGSQHVPTPWGRLLDR

SEQ ID NO: 67464 - protein, 258 aa, Homo sapiens
MPGGPGVLQALPATIFLLFLLSAVYLGPGCQALWMHKVPASLMVSLGEDAHFQCPHNSSNNANVTWWRVLHGNYTWPPEFLGPGEDPNGTLIIQNVNKSHGGIYVCRVQEGNESYQQSCGTYLRVRREWPSPGPYSHCPAGDTRFIFEVGIEPVPSMWVSNRLGQRDGHSPLQSGVSGGSGALQEVGGARRLGRARGARALSHTTSLQSRPPGPSWTWGRAPRTESSQPRGSSSCSARWCLGRCCCSGNDGRTRSSGW

SEQ ID NO: 67465 - protein, 209 aa, Homo sapiens
FKAKFLTAWNNVKYGWVVKSRTSFSKISSIHLCGRRYRFEGEGELVVGTRAGGGLSTPAGVSLVAADRPALVGDIQRFQRDFVSRLWLTYRRDFPPLPGGCLTSDCGWGCMLRSGQMMLAQGLLLHFLPRDWTWAEGMGLGPPELSGSASPSRYHGPARWMPPRWAQGAPELEQERRHRQIVSWFADHPRAPFGLHRLVELGQSSGKKA

SEQ ID NO: 67466 - protein, 233 aa, Homo sapiens [sequence omitted]

SEQ ID NO: 67467 - protein, 76 aa, Homo sapiens
MAAVAAVAARRRRSWASLVLAFLGVCLGITLAVDRSNFKTCEESSFCDREAYGQASLHTEPCWTLYSLVLIPSRSI

SEQ ID NO: 67468 - protein, 378 aa, Homo sapiens
MLLSVPLLLGLLGLAVAEPAVYFKEQFLDGDGWTSRWIESKHKSDFGKFVLSSGKFYGDEEKDKGLQTSQDARFYALSASFEPFSNKGQTLVVQFTVKHEQNIDCGGGYVKLFPNSLDQTDMHGDSEYNIMFGPDICGPGTKKVHVIFNYKGKNVLINKDIRCKDDEFTHLYTLIVRPDNTYEVKIDNSQVESGSLEDDWDFLPPKKIKDPDASKPEDWDERAKIDDPTDSKPEDWDKPEHIPDPDAKKPEDWDEEMDGEWEPPVIQNPEYKGEWKPRQIDNPDYKGTWIHPEIDNPEYSPDPSIYAYDNFGVLGLDLWQVKSGTIFDNFLITNDEAYAEEFGNETWGVTKAAEKQMKDKQDEEQRPERSCRRAGRAK

SEQ ID NO: 67469 - protein, 496 aa, Homo sapiens
IRAAGSAAGSVCRAGAPGRTQVRAGSGPRTRFHRHPQPGHARRQTSCSRRPESSVPSEDEWYCPECRNDASEVVLAGERLRESKKKAKMASATSSSQRDWGKGMACVGRTKECTIVPSNHYGPIPGIPVGTMWRFRVQVSESGVHRPHVAGIHGRSNDGAYSLVLAGGYEDDVDHGNFFTYTGSGGRDLSGNKRTAEQSCDQKLTNTNRALALNCFAPINDQEGAEAKDWRSGKPVRVVRNVKGGKNSKYAPAEGNRYDGIYKVVKYWPEKGKSGFLVWRYLLRRDDDEPGPWTKEGKDRIKKLGLTMQYPEGYLEALANREREKENSKREEEEQQEGGFASPRTGKGKWKRKSAGGGPSRAGSPRRTSKKTKVEPYSLTAQQSSLIREDKSNAKLWNEVLASLKDRPASGSPFQLFLSKVEETFQCICCQELVFRPITTVCQHNVCKDCLDRSFRAQVFSCPACRYDLGRSYAMQVNQPLQTVLNQLFPGYGNGR

SEQ ID NO: 67470 - protein, 95 aa, Homo sapiens
MSGEENPASKPTPVQDVQGDGRWMSLHHRFVADSKDKEPEVVFIGDSLVQLMHQCEIWRELFSPLHALNFGIGGDGTQHVLWRLENGELEHIRPK

SEQ ID NO: 67471 - protein, 37 aa, Homo sapiens
MRVNHTVSTMLPTCMVHRQTMSCSGAGGITVVLNVLK

SEQ ID NO: 67472 - protein, 731 aa, Homo sapiens
SSEKAALDGPLDAALDHLRLGNTFTFRVTVLQASSISAEYADIFCQFNFIHRHDEAFSTEPLKNTGRGPPLGFYHVQNIAVEVTKSFIEYIKSQPIVFEVFGHYQQHPFPPLCKDVLSPLRPSRRHFPRVMPLSKPVPATKLSTLTRPCPGPCHCKYDLLVYFEICELEANGDYIPAVVDHRGGMPCMGTFLLHQGIQRRITVTLLHETGSHIRWKEVRELVVGRIRNTPETDESLIDPNILSLNILSSGYIHPAQDDRQFLDSDIPSVSLGNDTRTFYQFEAAWDSSMHNSLLLNRVTPYREKIYMTLSAYIEMENCTQPAVVTKDFCMVFYSRDAKLPASRSIRNLFGSGSLRASESNRVTGVYELSLCHVADAGSPGMQRRRRRVLDTSVAYVRGEENLAGWRPRSDSLILDHQWELEKLSLLQEVEKTRHYLLLREKLETAQRPVPEALSPAFSEDSESHGSSSASSPLSAEGRPSPLEAPNERQRELAVKCLRLLTHTFNREYTHSHVCVSASESKLSEMSVTLLRDPSMSPLGVATLTPSSTCPSLVEGRYGATDLRTPQPCSRPASPEPELLPEADSKKLPSPARATETDKEPQRLLVPDIQEIRVSPIVSKKGYLHFLEPHTSGWARRFVVVRRPYAYMYNSDKDTVERFVLNLATAQVEYSEDQQAMLKTPNTFAVCTEHRGILLQAASDKDMHDWLYAFNPLLAGTIRSKLSRRRSAQMRV

SEQ ID NO: 67473 - protein, 175 aa, Homo sapiens
MSYVFVNDSSQTNVPLLQACIDGDFNYSKRLLESGFDPNIRDSRGRTGLHLAAARGNVDICQLLHKFGADLLATDYQGNTALHLCGHVDTIQFLVSNGLKIDICAMESHSLLNPNLQQGEGVLSSFRTTWQEFVEDLGFWRVLLLIFVIALLSLGIAYYVSGVLPFVENQPELVH

SEQ ID NO: 67474 - protein, 38 aa, Homo sapiens
MALTVDVAGPAPWGFRITGGRDFHTPIMVTKAAIWGDY

SEQ ID NO: 67475 - protein, 445 aa, Homo sapiens
MAAVQMDPELAKRLFFEGATVVILNMPKGTEFGIDYNSWEVGPKFRGVKMIPPGIHFLHYSSVDKANPKEVGPRMGFFLSLHQRGLTVLRWSTLREEVDLSPAPESEVEAMRANLQELDQFLGPYPYATLKKWISLTNFISEATVEKLQPENRQICAFSDVLPVLSMKHTKDRVGQNLPRCGIECKSYQEGLARLPEMKPRAGTEIRFSELPTQMFPEGATPAEITKHSMDLSYALETVLNKQFPSSPQDVLGFRCVAQGGVQSVTQSCLTATSTSRAQVILLPRLPKVLGLLCLDRTFYIIGSANDITYILTGELQFAFVCFLLGNVYEAFEHWKRLLNLLCRSEAAMMKHHTLYINLISILYHQLGEIPADFFVDIVSQDNFLTSTLQVFFSSACSIAVDATLRKKAEKFQAHLTKKFRWDFAAEPEDCAPVVVELPEGIEMG

SEQ ID NO: 67476 - protein, 475 aa, Homo sapiens
MAACEGRRSGALGSSQSDFLTPPVGGAPWAVATTVVMYPPPPPPPHRDFISVTLSFGENYDNSKSWRRRSCWRKWKQLSRLQRNMILFLLAFLLFCGLLFYINLADHWKALAFRLEEEQKMRPEIAGLKPANPPVLPAPQKADTDPENLPEISSQKTQRHIQRGPPHLQIRPPSQDLKDGTQEEATKRQEAPVDPRPEGDPQRTVISWRGAVIEPEQGTELPSRRAEVPTKPPLPPARTQGTPVHLNYRQKGVIDVFLHAWKGYRKFAWGHDELKPVSRSFSEWFGLGLTLIDALDTMWILGLRKEFEEARKWVSKKLHFEKDVDVNLFESTIRILGGLLSAYHLSGDSLFLRKAEDFGNRLMPAFRTPSKIPYSDVNIGTGVAHPPRWTSDSTVAEVTSIQLEFRELSRLTGDKKFQDAWCCQLGVSPEELRVAVTWRMSRSSPGGRGAEAFNIIRSNTGLRRQAHLPSLQSHG

SEQ ID NO: 67477 - protein, 182 aa, Homo sapiens
MDASPSPFSLPKKLNELSARRGSDELLSSGIINGPFTMNSSTPSTANGNDSKKFKRDRPPCSPSRVLHLRKIPCDVTEAEIISLGLPFGKVTNLLMLKGKSQAFLEMASEEAAVTMVNYYTPITPHLRSQPVYIQYSNHRELKTDNLPNQARAQAALQAVSAVQSGSLALSGGPSNEGTVLP

SEQ ID NO: 67478 - protein, 75 aa, Homo sapiens
MVVGIVAAAALCILILLYAMYKYRNRDEGSYHVDESRNYISNSAQSNGAVVKEKQPSSAKSSNKNKKNKDKEYYV

SEQ ID NO: 67479 - protein, 82 aa, Homo sapiens
MLDVKMEDIKESIETMRTRLERSIQMLTLLRAFEARDRNLQEGNLERVNFWSAVNVAVLLLVAVLQVCTLKRFFQDKRPVPT

SEQ ID NO: 67480 - protein, 1281 aa, Homo sapiens
MALSDEPAAGGPEEEAEDETLAFGAALEAFGESAETRALLGRLREVHGGGAEREVALERFRVIMDKYQEQPHLLDPHLEWMMNLLLDIVQDQTSPASLVHLAFKFLYIITKVRGYKTFLRLFPHEVADVEPVLDLVTIQNPKDHEAWETRYMLLLWLSVTCLIPFDFSRLDGNLLTQPGQARMSIMDRILQIAESYLIVSDKARDAAAVLVSRFITRPDVKQSKMAEFLDWSLCNLARSSFQTMQGVITMDGTLQALAQIFKHGKREDCLPYAATVLRCLDGCRLPESNQTLLRKLGVKLVQRLGLTFLKPKVAAWRYQRGCRSLAANLQLLTQGQSEQKPLILTEDDDEDDDVPEGVERVIEQLLVGLKDKDTVVRWSAAKGIGRMAGRLPRALADDVVGSVLDCFSFQETDKAWHGGCLALAELGRRGLLLPSRLVDVVAVILKALTYDEKRGACSVGTNVRDAACYVCWAFARAYEPQELKPFVTAISSALVIAAVFDRDINCRRAASAAFQENVGRQGTFPHGIDILTTADYFAVGNRSNCFLVIRWRAQLRATVSLSARRLGPQLARAGLRGSISRADMEMFPLQIGVSDTQTGIELTGTPGRLWGETRRMGGPAVAPLSCSSSQPRWGVNDPHVFIAGFPEYTQPMIDHLVTMKISHWDGVIRELAARALHNLAQQAPEFSATQVFPRLLSMTLSPDLHMRHGSILACAEVAYALYKLAAQENRPVTDHLDEQAVQGLKQIHQQLYDRQLYRGLGGQLMRQAVCVLIEKLSLSKMPFRGDTVIDGWQWLINDTLRHLHLISSHSRQQMKDAAVSALAALCSEYYMKEPGEADPAIQEELITQYLAELRNPEEMTRCGFSLALGALPGFLLKGRLQQVLTGLRAVTHTSPEDVSFAESRRDGLKAIARICQTVGVKAGAPDEAVCGENVSQIYCALLGCMDDYTTDSRGDVGTWVRKAAMTSLMDLTLLLARSQPELIEAHTCERIMCCVAQQASEKIDRFRAHAASVFLTLLHFDSPPIPHVPHRGELEKLFPRSDVASVNWSAPSQAFPRITQLLGLPTYRYHVLLGLVVSLGGLTESTIRHSTQSLFEYMKGIQSDPQALGSFSGTLLQIFEDNLLNERVSVPLLKTLDHVLTHGCFDIFTTEEDHPFAVKLLALCKKEIKNSKDIQKLLSGIAVFCEMVQFPGDVRRQALLQLCLLLCHRFPLIRKTTASQVYETLLTYSDVVGADVLDEVVTVLSDTAWDAELAVVREQRNRLCDLLGVPRPQLVPQPGAC

SEQ ID NO: 67481 - protein, 238 aa, Homo sapiens
MKTYRQREKQGSKVQESTKGPDEAKIKALLERTGYTLDVTTGQRKYGGPPPDSVYSGVQPGIGTEVFVGKIPRDLYEDELVPLFEKAGPIWDLRLMMDPLSGQNRGYAFITFCGKEAAQEAVKLCDSYEIRPGKHLGVCISVANNRLFVGSIPKNKTKENILEEFSKVTEGLVDVILYHQPDDKKKNRGFCFLEYEDHKSAAQARRRLMSGKVKVWGNVVTVEWADPVEEPDPEVMAK

SEQ ID NO: 67482 - protein, 396 aa, Homo sapiens [sequence omitted]

SEQ ID NO: 67483 - protein, 306 aa, Homo sapiens
MCQCVRACVCVCVCACATQRASHSALPGTTISVKDWRLCLLDQFDACARSGLSEPRSLTLRVPSCGKPLPGPGARLGREVTPCLSFAFAWCWLKMCQEEQTSYMVVQTSEEGLAADAELPGPLLMLAQNCAVMHNLLGPACIFLRKGFAENRQPDRSLRPEEIEELREAFREFDKDKDGYINCRDLGNCMRTMGYMPTEMELIELSQQINMNLGGHVDFDDFVELMGPKLLAETADMIGVKELRDAFREFDTNGDGEISTSELREAMRKLLGHQVGHRDIEEIIRDVDLNGDGRVDFEEFVRMMSR

SEQ ID NO: 67484 - protein, 79 aa, Homo sapiens
MFAEFFGGRNPFDTFFGQRNGEEGMDIDDPFSGFPMGMGGFTNVNFGRSRSAQEPARKKQDPPVTHDLRVSLEEIYSGC

SEQ ID NO: 67485 - protein, 33 aa, Homo sapiens
  MOD_RES (1)..(1): Any amino acid
XFQRDGRSDFPFASSLVPPSTQNSCPGTISVNT

SEQ ID NO: 67486 - protein, 617 aa, Homo sapiens
MSVPGTPGAMEPAGEEERPPPAAEGEDDEEEVAAAAQTSGPAHGRSASSLEDADDQEEEMEAMVIGGGCCKEQELTYELQQGYRILGEFLQEKHRGLTAPFLQPLGGVATAEEEVAEGPRSGGRGGRAFPQQPGQGMCLLQMEEKFASGQYGGITEFVADFRLMLETCYRLHGVDHWISKQGQKLEMMLEQKLALLSRLREQERKEAEEASQKEIEEWERKLLAQAAPTCMETMWEIPAIGHFLCLAQQILNLPEIVFYELERCLLMPQCNAFLSKIMTSLLSPPHRRPTLHRRPTLPYRTWEAALRQKVQQWYTAVGQTENPDNCAEKLGLCPQFFKVLGEVNPLEEKPFHELPFYQKVWLLKGLCDFVYETQKEVQDAVLGQPIHECREVILGYDYLENAYVHFPQFCGADVRIYKQRPFQAPEFPIPPIKIQRVPRIKLEKLKCDYVSTSNGEHRCSRDSLPSSFKKEQENNFDPACCPAKMILDNHDISVEMGVKSNYEIRIRRPCEIKKTDCCKENLEKPRSPGEVTGFGEPLSPGEIRFIENQEKYGEASRIKIEPSPLKENTLKSCQIHVNGSHSDHPEINCHKVVRDILLEQSLQSHKKLKLTKMRAKK

SEQ ID NO: 67487 - protein, 252 aa, Homo sapiens
MSDTLTADVIGRRVEVNGEHATVRFAGVVPPVAGPWLGVEWDNPERGKHDGSHEGTVYFKCRHPTGGSFIRPNKVNFGTDFLTAIKNRYVLEDGPEEDRKEQIVTIGNKPVETIGFDSIMKQQSQLSKLQEVSLRNCAVSCAGEKGGVAEACPNIRKVDLSKNLLSSWDEVIHIADQLRHLEVLNVSENKLKFPSGSVLTGTLSVLKVLVLNQTGITWAEVLRCVAGCPGLEELYLESNNIFISESGRFSMS

SEQ ID NO: 67488 - protein, 100 aa, Homo sapiens
  MOD_RES (1)..(1): Any amino acid
XTKLGHGLLSGQYSKPPVKSELIEQVMKEEHKAARCPGILLAPGESSREEPHRLRKPKRCFSFFGGRTHSVLSDPESPLHGEGGLPDAVTCGHGGGNQQG

SEQ ID NO: 67489 - protein, 64 aa, Homo sapiens
HHCRACGQIFCGKCSSKYSTIPKFGIEKEVRVCEPCYEQLNRTSHPSQPCPVMGRCPESSFSFL

SEQ ID NO: 67490 - protein, 139 aa, Homo sapiens
MESEDLSGRELTIDSIMNKVRDIKNKFKNEDLTDELSLNKISADTTDNSGTVNQIMMMANNPEDWLSLLLKLEKNSVPLSDALLNKLIGRYSQAIEALPPDKYGQNESFARIQVRFAELKAIQEPDDARDYFQMARANC

SEQ ID NO: 67491 - protein, 1120 aa, Homo sapiens
MYGSARSVGKVEPSSQSPGRSPRLPRSPRLGHRRTNSTGGSSGSSVGGGSGKTLSMENIQSLNAAYATSGPMYLSDHENVGSETPKSTMTLGRSGGRLPYGVRMTAMGSSPNIASSGVASDTIAFGEHHLPPVSMASTVPHSLRQARDNTIMDLQTQLKEVLRENDLLRKDVEVKESKLSSSMNSIKTFWSPELKKERALRKDEASKITIWKEQYRVVQEENQHMQMTIQALQDELRIQRDLNQLFQQDSSSRTGEPCVAELTEENFQRLHAEHERQAKELFLLRKTLEEMELRIETQKQTLNARDESIKKLLEMLQSKGLSAKATEEDHERTRRLAEAEMHVHHLESLLEQKEKENSMLREEMHRRFENAPDSAKTKALQTVIEMKDSKISSMERGLRDLEEEIQMLKSNGALSTEEREEEMKQMEVYRSHSKFMKNKVEQLKEELSSKEAQWEELKKKAAGLQAEIGQVKQELSRKDTELLALQTKLETLTNQFSDSKQHIEVLKESLTAKEQRAAILQTEVDALRLRLEEKETMLNKKTKQIQDMAEEKGTQAGEIHDLKDMLDVKERKVNVLQKKIENLQEQLRDKEKQMSSLKERVKSLQADTTNTDTALTTLEEALAEKERTIERLKEQRDRDEREKQEEIDNYKKDLKDLKEKVSLLQGDLSEKEASLLDLKEHASSLASSGLKKDSRLKTLEIALEQKKEECLKMESQLKKAHEAALEARASPEMSDRIQHLEREITRYKDESSKAQAEVDRLLEILKEVENEKNDKDKKIAELESLTSRQVKDQNKKVANLKHKEQVEKKKSAQMLEEARRREDNLNDSSQQLQDSLRKKDDRIEELEEALRESVQITAEREMVLAQEESARTNAEKQVEELLMAMEKVKQELESMKAKLSSTQQSLAEKETHLTNLRAERRKHLEEVLEMKQEALLAAISEKDANIALLELSSSKKKTQEEVAALKREKDRLVQQLKQQTQNRMKLMADNYEDDHFKSSHSNQTNHKPSPDQIIQPLLELDQNRSKLKLYIGHLTTLCHDRDPLILRGLTPPASYNLDDDQAAWENELQKMTRGQLQDELEKGERDNAELQEFANAILQQIADHCPDILEQVVNALEESS

SEQ ID NO: 67492 - protein, 178 aa, Homo sapiens
LIRHPSCVNVSKWNAVICSGTYAQVYVQTWSTQNLSMTITRDEYPSNPMVLRGINQKAAFPQYQPVVMLEKGYTIHWNGPAPRTTFLYLVNFNKNDWIRVGLCYPSNTSFQVTFGYLQRQNGSLSKIEEYEPVHSLEELQRKQSERKFYFDSSTGDGVSLCCPGWSAVHRHSCGTLQP

SEQ ID NO: 67493 - protein, 99 aa, Homo sapiens
MAKNRRDRNSWGGFSEKTYEWSSEEEEPVKKAGPVQVLIVKDDHSFELDETALNRILLSEAVRDKEVVAVSVAGAFRKGKSFLMDFMLRYMYNQESVDW

SEQ ID NO: 67494 - protein, 150 aa, Homo sapiens
MQWAVGRRWAWAALLLAVAAVLTQVVWLWLGTQSFVFQREEIAQLARQYAGLDHELAFSRLIVELRRLHPGHVLPDEELQWVFVNAGGWMGAMCLLHASLSEYVLLFGTALGSRGHSGRYWAEISDTIISGTFHQWREGTTKSEVFYPGG

SEQ ID NO: 67495 - protein, 281 aa, Homo sapiens
  MOD_RES (1)..(1): Any amino acid
XRFQGSQKDNWGHFRLKKLLKDHASSMPNAESWPVVGQFSSVGSLGADESKWLCSEFKESMLTLGKESKTPGKSSVPLYLIYPSVENVRTSLEGYPAGGSLPYSIQTAEKQNWLHSYFHKWSAETSGRSNAMPHIKTYMRPSPDFSKIAWFLVTSANLSKAAWGALEKNGTQLMIRSYELGVLFLPSAFGLDSFKVKQKFFAGSQEPMATFPVPYDLPPELYGSKGETQIKENHGWICIRKTNRAQEKPLVSVGSWLMEPSGSSSLQRALCQPVWGLVATG

SEQ ID NO: 67496 - protein, 317 aa, Homo sapiens
MALRLLKLAATSASARVVAAGAQRVRGIHSSVQCKLRYGMWHFLLGDKASKRLTERSRVITVDGNICTGKGKLAKEIAEKLGFKHFPEAGIHYPDSTTGDGKPLATDYNGNCSLEKFYDDPRSNDGNSYRLQSWLYSSRLLQYSDALEHLLTTGQGVVLERSIFSDFVFLEAMYNQGFIRKQCVDHYNEVKSVTICDYLPPHLVIYIDVPVPEVQRRIQKKGDPHEMKITSAYLQDIENAYKKTFLPEMSEKCEVLQYSAREAQDSKKVVEDIEYLKFDKGPWLKQDNRTLYHLRLLCRAASTALGTTPRWETSGSG

SEQ ID NO: 67497 - protein, 88 aa, Homo sapiens
MCIIFFKFDPRPVSKNAYRLILAANRDEFYSRPSKLADFWGNNNEILSGLDMEEGKEGGTWLGISTRGKLAALTNYLQPQLDWQARGR

SEQ ID NO: 67498 - protein, 102 aa, Homo sapiens
MPSIKLQSSDGEIFEVDVEIAKQSVTIKTMLEDLGMDDEGDDDPVPLPNVNAAILKKVIQWCTHHKDDPPPPEDDENKEKRTDDIPVWDQEFLKVDQGTLFE

SEQ ID NO: 67499 - protein, 137 aa, Homo sapiens
MSSILPFTPPVVKRLLGWKKSAGGSGGAGGGEQNGQEEKWCEKAVKSLVKKLKKTGRLDELEKAITTQNCNTKCVTIPSTCSEIWGLSTPNTIDQWDTTGLYSFSEQTRSLDGRLQVSHRKGLPHVIYCRLWRWPDL

SEQ ID NO: 67500 - protein, 350 aa, Homo sapiens
MPSPRPVLLRGARAALLLLLPPRLLARPSLLLRRSLSAASCPPISLPAAASRSSMDGAGAEEVLAPLRLAVRQQGDLVRKLKEDKAPQVDVDKAVAELKARKRVLEAKELALQPKDDIVDRAKMEDTLKRRFFYDQAFAIYGGVSGLYDFGPVGCALKNNIIQTWRQHFIQEEQILEIDCTMLTPEPVLKTSGHVDKFADFMVKDVKNGECFRADHLLKAHLQKLMSDKKCSVEKKSEMESVLAQLDNYGQQELADLFVNYNVKSPITGNDLSPPVSFNLMFKTFIGPGGNMPGYLRPETAQGIFLNFKRLLEFNQGKLPFAAAQIGNSFRNEISPRSGLIRVRIHNGRN

SEQ ID NO: 67501 - protein, 51 aa, Homo sapiens
  MOD_RES (1)..(1): Any amino acid
XGLCSKEQKRVWFADGILPNGEVADTTKLSSGSKRCSEDFSPLSPDVPMCL

SEQ ID NO: 67502 - protein, 50 aa, Homo sapiens
MLENFTLLASLGCWHGAEAEEAPEQIASVGLLSSNIQQHQKQHCGEKPLK

SEQ ID NO: 67503 - protein, 173 aa, Homo sapiens
CFPYARQDKKDKVGESRAPISAKLVANMLSVAGADHIITMDLHASQIQGFFDIPVDNLYAEPAVLQWIRENIAEWKNCIIVSPDAGGAKRLLSAGATKVYAILTHGIFSGPAISRINNAAFEAVVVTNTIPQEDKMKHCTKIQVIDISMILAEAIRRTHNGESVSYLFSHVPL

SEQ ID NO: 67504 - protein, 108 aa, Homo sapiens
MFQVLVNIGNHFDLASSIFVAPRKGIYSFSFHVVKVYNRQTIQVSLMQNGYPVISAFAGDQDVTREAASNGVLLLMEREDKVHLKLERGNLMGGWKYSTFSGFLVFPL

SEQ ID NO: 67505 - protein, 783 aa, Homo sapiens
MGRGSGTFERLLDKATSQLLLETDWESILQICDLIRQGDTQAKYAVNSIKKKVNDKNPHVALYALEVMESVVKNCGQTVHDEVANKQTMEELKDLLKRQVEVNVRNKILYLIQAWAHAFRNEPKYKVVQDTYQIMKVEGHVFPEFKESDAMFAAERAPDWVDAEECHRCRVQFGVMTRKHHCRACGQIFCGKCSSKYSTIPKFGIEKEVRVCEPCYEQLNSIPCAHRKAEGKATSTTELPPEYLTSPLSQQSQLPPKRDETALQEEEELQLALALSQSEAEEKERLRQKSTYTSYPKAEPMPSASSAPPASSLYSSPVNSSAPLAEDIDPELARYLNRNYWEKKQEEARKSPTPSAPVPLTEPAAQPGEGHAAPTNVVENPLPETDSQPIPPSGGPFSEPQFHNGESEESHEQFLKALQNAVTTFVNRMKSNHMRGRSITNDSAVLSLFQSINGMHPQLLELLNQLDERRLYYEGLQDKLAQIRDARGALSALREEHREKLRRAAEEAERQRQIQLAQKLEIMRQKKQEYLEVQRQLAIQRLQEQEKERQMRLEQQKQTVQMRAQMPAFPLPYAQLQAMPAAGGVLYQPSGPASFPSTFSPAGSVEGSPMHGVYMSQPAPAAGPYPSMPSTAADPSMVSAYMYPAGATGAQAAPQAQAGPTASPAYSSYQPTPTAGYQNVASQAPQSLPAISQPPQSSTMGYMGSQSVSMGYQPYNMQNLMTTLPSQDASLPPQQPYIAGQQPMYQQMAPSGGPPQQQPPVAQQPQAQGPPAQGSEAQLISFD

SEQ ID NO: 67506 - protein, 92 aa, Homo sapiens
MSTEAQRVDDSPSTSGGSSDGDQRESVQQEPEREQVQPKKKEGKISSKTAAKLSTSAKRIQKELAEITLDPPPNCRLPSEQESITVILTAKV

SEQ ID NO: 67507 - protein, 177 aa, Homo sapiens
ELEDDAIYSVHVPAGLYRIRKGVSASAVPFTPSSPLLSCSQEGSRHTSKLSRHGSGADSDYENTQSGDPLLGLEGKRFLELGKEEDFHPELESLDGDLDPGLPSTEDVILKTEQVTKNIQELLRAAQEFKHDSFVPCSEKIHLAVTEMASLFPKVQGPKRGPGVGGPRAGAGVENPI

SEQ ID NO: 67508 - protein, 2514 aa, Homo sapiens
MKPMKKACTGLSGPGSGSKSPPATRAKALRRRGAGEGDKPEEEDDEAQQPQPQSGPEEAEEGEEEEAERGPGAEGPPLELHPGDPAPGPAEDPKGDGEAGRWEPSLSRKTATFKSRAPKKKYVEEHGAGSSGVAGAPEERVRTPEEASGLGVPPRPPTSTRSSSTDTASEHSADLEDEPAEACGPGPWPPGSTSGSYDLRQLRSQRVLARRGDGLFLPAVVRQVRRSQDLGVQFPGDRALTFYEGVPGAGVDVVLDATPPPGALVVGTAVCTCVEPGVAAYREGVVVEVATKPAAYKVRLSPGPSSQPGLPGSLPQPPQPLHREPEEAVWVARSSLRLLRPPWEPETMLRKPPTGPEEEQAEPGATLPPCPAALDPKQPEDAEVSKISFGGNLGTHCEEGEEKHPPALGTPALLPLPPPQLLSPPPKSPAFVGPGRPGEQPSPCQEGSQGGSRSSSVASLEKGTAPAARARTPLTAAQQKYKKGDVVCTPSGIRKKFNGKQWRRLCSRDGCMKESQRRGYCSRHLSMRTKEMEGLADSGPGGAGRPAAVAAREGSTEFDWGDETSRDSEASSVAARGDSRPRLVAPADLSRFEFDECEAAVMLVSLGSSRSGTPSFSPVSTQSPFSPAPSPSPSPLFGFRPANFSPINASPVIQRTAVRSRHLSASTPKAGVLTPPDLGPHPPPPAPRERHSSGILPTFQTNLTFTVPISPGRRKTELLPHPGALGAPGAGGGGAAPDFPKSDSLDSGVDSVSHTPTPSTPAGFRAVSPAVPFSRSRQPSPLLLLPPPAGLTSDPGPSVRRVPAVQRDSPVIVRNPDVPLPSKFPGEVGTAGEVRAGGPGRGCRETPVPPGVASGKPGLPPPLPAPVPITVPPAAPTAVAQPMPAFGLASSPFQPVAFHPSPAALLPVLVPSSYTSHPAPKKEVIMGRPGTVWTNVEPRSVAVFPWHSLVPFLAPSQPDPSVQPSEAQQPASHPVASNQSKEPAESAAVAHERPPGGTGSADPERPPGATCPESPGPGPPHPLGVVESGKGPPPTTEEEASGPPGEPRLDSETESDHDDAFLSIMSPEIQLPLPPGKRRTQSLSALPKERDSSSEKDGRSPNKREKDHIRRPMNAFMIFSKRHRALVHQRHPNQDNRTVSKILGEWWYALGPKEKQKYHDLAFQVKEAHFKAHPDWKWCNKDRKKSSSEAKPTSLGLAGGHKETRERSMSETGTAAAPGVSSELLSVAAQTLLSSDTKAPGSSSCGAERLHTVGGPGSARPRAFSHSGVHSLDGGEVDSQALQELTQMVSGPASYSGPKPSTQYGAPGPFAAPGEGGALAATGRPPLLPTRASRSQRAASEDMTSDEERMVICEEEGDDDVIADDGFGTTDIDLKCKERVTDSESGDSSGEDPEGNKGFGRKVFSPVIRSSFTHCRPPLDPEPPGPPDPPVAFGKGYGSAPSSSASSPASSSASAATSFSLGSGTFKAQESGQGSTAGPLRPPPPGAGGPATPSKATRFLPMDPATFRRKRPESVGGLEPPGPSVIAAPPSGGGNILQTLVLPPNKEEQEGGGARVPSAPAPSLAYGAPAAPLSRPAATMVTNVVRPVSSTPVPIASKPFPTSGRAEASPNDTAGARTEMGTGSRVPGGSPLGVSLVYSDKKSAAATSPAPHLVAGPLLGTVGKAPATVTNLLVGTPGYGAPAPPAVQFIAQGAPGGGTTAGSGAGAGSGPNGPVPLGILQPGALGKAGGITQVQYILPTLPQQLQVAPAPAPAPGTKAAAPSGPAPTTSIRFTLPPGTSTNGKVLAATAPTPGIPILQSVPSAPPPKAQSVSPVQAPPPGGSAQLLPGKVLVPLAAPSMSVRGGGAGQPLPLVSPPFSVPVQNGAQPPSKIIQLTPVPVSTPSGLVPPLSPATLPGPTSQPQKVLLPSSTRITYVQSAGGHALPLGTSPASSQAGTVTSYGPTSSVALGFTSLGPSGPAFVQPLLSGQAPLLAPGQVGVSPVPSPQLPPACAAPGGPVITAFYSGSPAPTSSAPLAQPSQAPPSLVYTVATSTTPPAATILPKGPPAPATATPAPTSPFPSATGSMTYSLVAPKAQRPSPKAPQKVKAAIASIPVGSFEAGASGRPGPAPRQPLEPGPVREPTAPESELEGQPTPPAPPPLPETWTPTARSSPPLPPPAEERTSAKGPETMASKFPSSSSDWRVPGQGLENRGEPPTPPSPAPAPAVAPGGSSESSSGRAAGDTPERKEAAGTGKKVKVRPPPLKKTFDSVDKVLSEVDFEERFAELPEFRPEEVLPSPTLQSLATSPRAILGSYRKKRKNSTDLDSAPEDPTSPKRKMRRRSSCSSEPNTPKSAKCEGDIFTFDRTGTEAEDVLGELEYDKVPYSSLRRTLDQRRALVMQLFQDHGFFPSAQATAAFQARYADIFPSKVCLQLKIREVRQKIMQAATPTEQPPGAEAPLPVPPPTGTAAAPAPTPSPAGGPDPTSPSSDSGTAQAAPPLPPPPESGPGQPGWEGAPQPSPPPPGPSTAATGR

SEQ ID NO: 67509 - protein, 68 aa, Homo sapiens
MSGGGTETPVGCEAAPGGGSKKRDSLGTAGSAHLIIKDLGEIHSRLLDHRPVIQGETRYFVKEFENED

SEQ ID NO: 67510 - protein, 74 aa, Homo sapiens
MVRDSMAAAFRPSNRVLLQALQILVYPGVGGSGSVSCRCPLGGIRGFSLGKEGRDGREGSVRSQLASLWSSHSS

SEQ ID NO: 67511 - protein, 300 aa, Homo sapiens
MHSLEKVTFEDVAIDFTQEEWDMMDTSKRKLYRDVMLENISHLVSLGYQISKSYIILQLEQGKELWWEGRVFLQDQNPDRESALKKKHMISMHPIIRKDTSTSMTMENSLILEDPFEYNDSGEDCTHSSTITQCLLTHSGKKPCVSKQCGKSLRNLLSPKPRKQIHTKGKSYQCNLCEKAYTNCFYLRRHKMTHTGERPYACHLCGKAFTQCSHLRRHEKTHTGERPYKCHQCGKAFIQSFNLRRHERTHLGQKCYECDKSGKAFSQSSGFRGNKIIHIGEKPHACLLCGKAFSLSSDLR

SEQ ID NO: 67512 - protein, 61 aa, Homo sapiens
  MOD_RES (1)..(1): Any amino acid
XEDLIIKGISVHISNAEPKHNSNRQLERSGRFGGNPALALLLSSSNMVTLKMVLGDLQRLN

SEQ ID NO: 67513 - protein, 60 aa, Homo sapiens
VTFPGALVPGGVADAAAAYKAAKAGAGLGGVPGVGGLGVSAGAVVPQPGAGVKPGKVPAL

SEQ ID NO: 67514 - protein, 183 aa, Homo sapiens
MAAPAVKVARGWSGLALGVRRAVLQLPGLTQVRWSRYSPEFKDPLIDKEYYRKPVEELTEEEKYVRELKKTQLIKAAPAGKTSSVFEDPVISKFTNMMMIGGNKVLARSLMIQTLEAVKRKQFEKYHAASAEEQATIERNPYTIFHQALKNCEPMIGLVPILKGGRFYQVNEWPGQESRALHM

SEQ ID NO: 67515 - protein, 17 aa, Homo sapiens
MPAKGRYFLNEGEEGPD

SEQ ID NO: 67516 - protein, 192 aa, Homo sapiens
MEEEVRLKKRKRRRNVDKDPAKEDVEKAKKRRGRPPAEKLSPNPPKLTKQMNAIIDTVINYKDSSGRQLSEVFIQLPSRKELPEYYELIRKPVDFKKIKERIRNHKYRSLGDLEKDVMLLCHNAQTFNLEGSQIYEDSIVLQSVFKSARQKIAKEEESEDESNEEEEEEDEEESESEAKSVKVKIKLNKKDD

SEQ ID NO: 67517 - protein, 170 aa, Homo sapiens
GDQFLVPAHEARGTQSEDQRPAGAASESELQEEGPKLGEERPKPHAGALEERGPRPVVSIVRPRHGPKRKPVKSLSLPGLRAHLKAEAELPPKLPLQEEEPEDSQSEPSPSAKQHKKAKKRKSLGAPVLHAVASMVSAPLETLRLEREWQSLDCSFSPCLWGPTWHNLAL

SEQ ID NO: 67518 - protein, 2046 aa, Homo sapiens
MDEVEQDQHEARLKELFDSFDTTGTGSLGQEELTDLCHMLSLEEVAPVLQQTLLQDNLLGRVHFDQFKEALILILSRTLSNEEHFQEPDCSLEAQPKYVRGGKRYGRRSLPEFQESVEEFPEVTVIEPLDEEARPSHIPAGDCSEHWKTQRSEEYEAEGQLRFWNPDDLNASQSGSSPPQDWIEEKLQEVCEDLGITRDGHLNRKKLVSICEQYGLQNVDGEMLEEVFHNLDPDGTMSVEDFFYGLFKNGKSLTPSASTPYRQLKRHLSMQSFDESGRRTTTSSAMTSTIGFRVFSCLDDGMGHASVERILDTWQEEGIENSQEILKALDFSLDGNINLTELTLALENELLVTKNSIHQAALASFKAEIRHLLERVDQVVREKEKLRSDLDKAEKLKSLMASEVDDHHAAIERRNEYNLRKLDEEYKERIAALKNELRKEREQILQQAGKQRLELEQEIEKAKTEENYIRDRLALSLKENSRLENELLENAEKLAEYENLTNKLQRNLENVLAEKFGDLDPSSAEFFLQEERLTQMRNEYERQCRVLQDQVDELQSELEEYRAQGRVLRLPLKNSPSEEVEANSGGIEPEHGLGSEECNPLNMSIEAELVIEQMKEQHHRDICCLRLELEDKVRHYEKQLDETVVSCKKAQENMKQRHENETHTLEKQISDLKNEIAELQGQAAVLKEAHHEATCRHEEEKKQLQVKLEEEKTHLQEKLRLQHEMELKARLTQAQASFEREREGLQSSAWTEEKVRGLTQELEQFHQEQLTSLVEKHTLEKEELRKELLEKHQRELQEGREKMETECNRRTSQIEAQFQSDCQKVTERCESALQSLEGRYRQELKDLQEQQREEKSQWEFEKDELTQECAEAQELLKETLKREKTTSLVLTQEREMLEKTYKEHLNSMVVERQQLLQDLEDLRNVSETQQSLLSDQILELKSSHKRELREREEVLCQAGASEQLASQRLERLEMEHDQERQEMMSKLLAMENIHKATCETADRERAEMSTEISRLQSKIKEMQQATSPLSMLQSGCQVIGEEEVEGDGALSLLQQGEQLLEENGDVLLSLQRAHEQAVKENVKMATEISRLQQRLQKLEPGLVMSSCLDEPATEFFGNTAEQTEQFLQQNRTKQVEGVTRRHVLSDLEDDEVRDLGSTGTSSVQRQEVKIEESEASVEGFSELENSEETRTESWELKNQISQLQEQLMMLCADCDRASEKKQDLLFDVSVLKKKLKMLERIPEASPKYKLLYEDVSRENDCLQEELRMMETRYDEALENNKELTAEVFRLQDELKKMEEVTETFLSLEKSYDEVKIENEGLNVLVLRLQGKIEKLQESVVQRCDCCLWEASLENLEIEPDGNILQLNQTLEECVPRVRSVHHVIEECKQENQYLEGNTQLLEKVKAHEIAWLHGTIQTHQERPRVQNQVILEENTTLLGFQDKHFQHQATIAELELEKTKLQELTRKLKERVTILVKQKDVLSHGEKEEELKAMMHDLQITCSEMQQKVELLRYESEKLQQENSILRNEITTLNEEDSISNLKLGTLNGSQEEMWQKTETVKQENAAVQKMVENLKKQISELKIKNQQLDLENTELSQKNSQNQEKLQELNQRLTEMLCQKEKEPGNSALEEREQEKFNLKEELERCKVQSSTLVSSLEAELSEVKIQTHIVQQENHLLKDELEKMKQLHRCPDLSDFQQKISSVLSYNEKLLKEKEALSEELNSCVDKLAKSSLLEHRIATMKQEQKSWEHQSASLKSQLVASQEKVQNLEDTVQNVNLQMSRMKSDLRVTQQEKEALKQEVMSLHKQLQNAGGKSWAPEIATHPSGLHNQQKRLSWDKLDHLMNEEQQLLWQENERLQTMVQNTKAELTHSREKVRQLESNLLPKHQKHLNPSGTMNPTEQEKLSLKRECDQFQKEQSPANRKVSQMNSLEQELETIHLENEGLKKKQVKLDEQLMEMQHLRSTATPSPSPHAWDLQLLQQQACPMVPREQFLQLQRQLLQAERINQHLQEELENRTSETNTPQALLPEQRAVHADSYRRIGHL

SEQ ID NO: 67519 - protein, 81 aa, Homo sapiens
MEPGDEDLDCDNDHVSKMSRIFNPHLNKTANGDCRRDPRERSRSPIERAVAPTMSLHGSHLYTSLPSLGLEQPLALTKNSL

SEQ ID NO: 67520 - protein, 263 aa, Homo sapiens
  MOD_RES (1)..(1): Any amino acid
XRSATNTTLPHMLMSQRVIAPNPAQLQGQRGPPKPGLVRTTTPNMNPAINYQPSSSSVPCQRTTSSAIYMNLASHIQPGTVNRVSSPLPSPSAMTDAANSQAAAKLALRKQLEKTLLEIPPPKPPAPLLHFLPSAANSEFIYMVGLEEVVQSVIDSQGKSCASLLRVEPFVCAQCRTDFTPHWKQEKNGKILCEQCMTSNQKKALKAEHTNRLKNAFVKALQQEQEIEQRLQQQAALSPTTAPAVSSVSKQETIMRHHTLRQA

SEQ ID NO: 67521 - protein, 102 aa, Homo sapiens
MDIEFECTVSGKPVPTVNWMKNGDVVIPSDYFQIVGGSNLRILGVVKSDEGFYQCVAENEAGNAQTSAQLIVPKPAIPSSSVLPSAPRDVVPVLVSSRFVRL

SEQ ID NO: 67522 - protein, 699 aa, Homo sapiens
MSLPSSCEYLTLGKVARFRSAYVHGSPYAINMPIDIKPQRRRFDVDNGTSAGRSPLDPMTSPGSGLILQANFVHSQRRESFLYRSDSDYDLSPKSMSRNSSIASDIHGDDLIVTPFAQVLASLRTVRNNFAALTNLQDRAPSKRSPMCNQPSINKATITEEAYQKLASETLEELDWCLDQLETLQTRHSVSEMASNKFKRMLNRELTHLSEMSRSGNQVSEFISNTFLDKQHEVEIPSPTQKEKEKKKRPMSQISGVKKLMHSSSLTNSSIPRFGVKTEQEDVLAKELEDVNKWGLHVFRIAELSGNRPLTVIMHTIFQERDLLKTFKIPVDTLITYLMTLEDHYHADVAYHNNIHAADVVQSTHVLLSTPALEAVFTDLEILAAIFASAIHDVDHPGVSNQFLINTNSELALMYNDSSVLENHHLAVGFKLLQEENCDIFQNLTKKQRQSLRKMVIDIVLATDMSKHMNLLADLKTMVETKKVTSSGVLLLDNYSDRIQVLQNMVHCADLSNPTKPLQLYRQWTDRIMEEFFRQGDRERERGMEISPMCDKHNASVEKSQVGFIDYIVHPLWETWADLVHPDAQDILDTLEDNREWYQSTIPQSPSPAPDDPEEGRQGQTEKFQFELTLEEDGESDTEKDSGSQVEEDTSCSDSKTLCTQDSESTEIPLDEQVEEEAVGEEEESQPEACVIDDRSPDT

SEQ ID NO: 67523 - protein, 119 aa, Homo sapiens
MQETFRNLASIGKKWKPQNIYVEYENLRRNLRIVGERLFESKEGHQHGEILTQVPDDMLKKTTTGVKSCESSVYGEVGSAHSSLNRHIRDDTGHKAYEYQEYGQKPYKCKYCKKPFNCL

SEQ ID NO: 67524 - protein, 34 aa, Homo sapiens
DGRGQKNSDAKCVAELQKEGRAHGKWHADSDTGH

SEQ ID NO: 67525 - protein, 80 aa, Homo sapiens
EVLRNKGYNRSLDMWSVGVIIYVSLSGTFPFNEDEDIHDQIQNAAFMYPPNPWKEISHEDVDLIQYNTYILGCLSSHCTA

SEQ ID NO: 67526 - protein, 1496 aa, Homo sapiens
MRTTKVYKLVIHKKGFGGSDDELVVNPKVFPHIKLGDIVEIAHPNDEYSPLLLQVKSLKEDLQKETISVDQTVTQVFRLRPYQDVYVNVVDPKDVTLDLVELTFKDQYIGRGDMWRLKKSLVSTCAYITQKVEFAGIRAQAGELWVKNEKVMCGYISEDTRVVFRSTSAMVYIFIQMSCEMWDFDIYGDLYFEKAVNGFLADLFTKWKEKNCSHEVTVVLFSRTFYDAKSVDEFPEINRASIRQDHKGRFYEDFYKVVVQNERREEWTSLLVTIKKLFIQYPVLVRLEQAEGFPQGDNSTSAQGNYLEAINLSFNVFDKHYINRNFDRTGQMSVVITPGVGVFEVDRLLMILTKQRMIDNGIGVDLVCMGEQPLHAVPLFKLHNRSAPRDSRLGDDYNIPHWINHSFYTSKSQLFCNSFTPRIKLAGKKPASEKAKNGRDTSLGSPKESENALPIQVDYDAYDAQVFRLPGPSRAQCLTTCRSVRERESHSRKSASSCDVSSSPSLPSRTLPTEEVRSQASDDSSLGKSANILMIPHPHLHQYEVSSSLGYTSTRDVLENMMEPPQRDSSAPGRFHVGSAESMLHVRPGGYTPQRALINPFAPSRMPMKLTSNRRRWMHTFPVGMNPRTQNKDSLEDSVSTSPDPILTLSAPPVVPGFCCTVGVDWKSLTTPACLPLTTDYFPDRQGLQNDYTEGCYDLLPEADIDRRDEDGVQMTAQQVFEEFICQRLMQGYQIIVQPKTQKPNPAVPPPLSSSPLYSRGLVSRNRPEEEDQYWLSMGRTFHKVTLKDKMITVTRYLPKYPYESAQIHYTYSLCPSHSDSEFVSCWVEFSHERLEEYKWNYLDQYICSAGSEDFSLIESLKFWRTRFLLLPACVTATKRITEGEAHCDIYGDRPRADEDEWQLLDGFVRFVEGLNRIRRRHRSDRMMRKGTAMKGLQMTGPISTHSLESTAPPVGKKGTSALSALLEMEASQKCLGEQQAAVHGGKSSAQSAESSSVAMTPTYMDSPRKDGAFFMEFVRSPRTASSAFYPQVSVDQTATPMLDGTSLGICTGQSMDRGNSQTFGNSQNIGEQGYSSTNSSDSSSQQLVASSLTSSSTLTEILEAMKHPSTGVQLLSEQKGLSPYCFISAEVVHWLVNHVEGIQTQAMAIDIMQKMLEEQLITHASGEAWRTFIYGFYFYKIVTDKEPDRVAMQQPATTWHTAGVDDFASFQRKWFEVAFVAEELVHSEIPAFLLPWLPSRPASYASRHSSFSRSFGGRSQAAALLAATVPEQRTVTLDVDVNNRTDRLEWCSCYYHGNFSLNAAFEIKLHWMAVTAAVLFEMVQGWHRKATSCGFLLVPVLEGPFALPSYLYGDPLRAQLFIPLNISCLLKEGSEHLFDSFEPETYWDRMHLFQEAIAHRFGFVQDKYSASAFNFPAENKPQYIHVTGEELRAELGRNSVSAAALLQAQVLRAAAAAAELHQLHQPEHVLRGAGRLQLGLQHHAHQNMALQRHRG

SEQ ID NO: 67527 - protein, 49 aa, Homo sapiens
MASSAAGCVVIVGRIKTLYPLNNSCSFPPAPAPGIHPSSFLSLWVPQEV

SEQ ID NO: 67528 - protein, 453 aa, Homo sapiens
MGPTRKPNVCSRLSRRALGCFSRDAGVVQRTNLGILRALVCQESTKFKNVWTTHSRSPIAYERGRIYFDNYRRCVSSVASEPRKLYEMPKCSKSEKIEDALLWECPVGDILPNSSDYKSSLIALTAHNWLLRISATTGKILEKIYLAPYCKFRYLSWDTPQEVIAVKSAQNRGSAVARQAGIQQHVLLYLAVFRVLPFSLVGILEINKKIFGNVTDATLSHGILIVMYSSGLVRLYSFQTIAEQFMQQKLDLGCACRWGGTTGTVGEAPFGIPCNIKITDMPPLLFEVSSLENAFQIGGHPWHYIVTPNKKKQKGVFHICALKDNSLNENVLTVTASGRVVKKSFNLLDDDPEQETFKIVDYEDELDLLSVVAVTQIDAEGKAHLDFHCNEYGTLLKSIPLVESWDVTYSHEVYFDRDLVLHIEQKPNRVFSCYVYQMICDTGEEEETINRSC

SEQ ID NO: 67529 - protein, 48 aa, Homo sapiens
MTTCSRQFTSSSSMKGSCGIGGGIGGGSSRISSVLAGGSCRAPSTYGG

SEQ ID NO: 67530 - protein, 134 aa, Homo sapiens
MSGFNFGGTGAPTGGFTFGTAKTATTTPATGFSFSTSGTGGFNFGAPFQPATSTPSTGLFSLATQTPATQTTGFTFGTATLASGGTGFSLGIGASKLNLSNTAATPAMANPSGFGLGSSNLTNAISSTVTSSQG

SEQ ID NO: 67531 - protein, 47 aa, Homo sapiens
MDLDLLDLNPRIIAAIKKAKLKSVKEVLHFSGPDLKRLTNLSSPEVW

SEQ ID NO: 67532 - protein, 161 aa, Homo sapiens
MPKPSREQSDDETEESVKFKRLHKLVNSTRRVRKKLIRVEEMKKPSTEGGEEHVFENSPVLDERSALYSGVHKKPLFFDGSPEKPPEDDSDSLTTSPSSSSLDTWGAGRKLVKTFSKGESRGLIKPPKKMGTFFSYPEEEKAQKVSRSLTEGEMKKGLGSL

SEQ ID NO: 67533 - protein, 327 aa, Homo sapiens
MNNTYYQECLFYLHNYSTNLAIISFYVRHSCLREALLHLLNKESPPEVFIEGIFQPSYKSGKLHTLENLLESIDPTLESWGKYLIAACQHLQKKNYYHILYELQQFMKDQVRAAMTCIRFFSHKAKSYTELGEKLSWLLKAKDHLKIYLQETSRSSGRKKTTFFRKKMTAADVSRHMNTLQLQMEVTRFLHRCESAGTSQITTLPLPTLFGNNHMKMDVACKVMLGGKNVEDGFGIAFRVLQDFQLDAAMTYCRAARQLVEKEKYSEIQQLLKCVSESGMAAKSDGDTILLNCLEAFKRIPPQELEGLIQAIHNDDNKVSGIVSKRW

SEQ ID NO: 67534 - protein, 169 aa, Homo sapiens
  MOD_RES (1)..(1): Any amino acid
XLNVGHLKLTFCSVGPTECAALAFVLQHLRRPVALQLDYNSVGDIGVEQLLPCLGVCKALYLRDNNISDRGICKLIECALHCEQLQKLALGNNYITAAGAQVLAEGLRGNTSLQFLGFWGNRVGDEGAQALAEALGDHQSLRWLSLVGNNIGSVGAQALALMLAKNVML

SEQ ID NO: 67535 - protein, 163 aa, Homo sapiens
MAVKKIAIFGATGQTGLTTLAQAVQAGYEVTVLVRDSSRLPSEGPRPAHVVVGDVLQAADVDKTVAGQDAVIVLLGTRNDLSPTTVMSEGARNIVAAMKAHGVDKVVACTSGDQPLTGAYTVTLDGRGPSRVISKHDLGHFMLRCLTTDEYDGHSTYPSHQYQ

SEQ ID NO: 67536 - protein, 109 aa, Homo sapiens
MAPEVVKREPYGKPVDVWGCGVILFILLSGCLPFYGTKERLFEGIIKGKYKMNPRQWSHISESAKDLVRRMLMLDPAERITVYEALNHPWLKVHEHSQVTFYTLSEHFQ

SEQ ID NO: 67537 - protein, 49 aa, Homo sapiens
MKCLVTGGNVKALPPDGELLPLCLCLLSLCPALLPAIPGSHPWSGPAAL

SEQ ID NO: 67538 - protein, 190 aa, Homo sapiens
LADLIPKEQARIKTFRQQHGKTVVGQITVDMMYGGMRGMKGLVYETSVLDPDEGIRFRGFSIPECQKLLPKAKGGEEPLPEGLFWLLVTGHIPTEEQVSWLSKEWAKRAALPSHVVTMLDNFPTNLHPMSQLSAAVTALNSESNFARAYAQGISRTKYWEQRSTEISTEKAAVLGPLTLTWTGLTISPTC

SEQ ID NO: 67539 - protein, 334 aa, Homo sapiens
MAAAAAAGPSPGSGPGDSPEGPEGEAPERRRKAHGMLKLYYGLSEGEAAGRPAGPDPLDPTDLNGAHFDPEVYLDKLRRECPLAQLMDSETDMVRQIRALDSDMQTLVYENYNKFISATDTIRKMKNDFRKMEDEMDRLATNMAVITDFSARISATLQDRHERITKLAGGRCRAGPAVGLSWGSGANVTLRPPGVHALLRKLQFLFELPSRLTKCVELGAYGQAVRYQGRAQAVLQQYQHLPSFRAIQDDCQVITARLAQQLRQRFREGGSGAPEQAECVELLLALGEPAEELCEEFLAHARGRLEKELRNLEAELGPSPPAPDVLEFTDHGGS

SEQ ID NO: 67540 - protein, 216 aa, Homo sapiens
  MOD_RES (1)..(1): Any amino acid
XCEVTEVSKLDGEASINNRKGKLIFFYEWSVKLNWTGTSKSGVQYKGHVEIPNLSDENSVDEVEISVSLAKDEPDTNLVALMKEEGVKLLREAMGIYISTLKTEFTQGMILPTMNGESVDPVGQPALKTEERKAKPAPSKTQARPVGVKIPTCKITLKETFLTSPEELYRVFTTQELVQAFTHAPATLEADRGGKFHMVDGNVSGEFTDLVSTCRP

SEQ ID NO: 67541 - protein, 490 aa, Homo sapiens
MGEVEAPGRLWLESPPGGAPPIFLPSDGQALVLGRGPLTQVTDRKCSRTQVELVADPETRTVAVKQLGVNPSTTGTQELKPGLEGSLGVGDTLYLVNGLHPLTLRWEETRTPESQPDTPPGTPLVSQDEKRDAELPKKRMRKSNPGWENLEKLLVFTAAGVKPQGKVAGFDLDGTLITTRSGKVFPTGPSDWRILYPEIPRKLRELEAEGYKLVIFTNQMSIGRGKLPAEEFKAKVEAVVEKLGVPFQVLVATHAGLYRKPVTGMWDHLQEQANDGTPISIGDSIFVGDAAGRPANWAPGRKKKDFSCADRLRTVSRSGPLCLPESRALLSASPEVVVAVGFPGAGKSTFLKKHLVSAGYVHVNRDTLGSWQRCVTTCETALKQGKRVAIDNTNPDAASRARYVQCARAAGVPCRCFLFTATLEQARHNNRFREMTDSSHIPVSDMVMYGYRKQFEAPTLAEGFSAILEIPFRLWVEPRLGRLYCQFSEG

SEQ ID NO: 67542 - protein, 364 aa, Homo sapiens
MASRLLHRLRHALAGDGPGEAAASPEAEQFPESSELEDDDAEGLSSRLSGTLSFTSAEDDEDDEDEDDEEAGPDQLPLGDGTSGEDAERSPPPDGQWGSQLLARQLQDFWKKSRNTLAPQRLLFEVTSANVVKDPPSKYVLYTLAVIGPGPPDCQPAQISRRYSDFERLHRNLQRQFRGPMAAISFPRKRLRRNFTAETIARRSRAFEQFLGHLQAVPELRHAPDLQDFFVLPELRRAQSLTCTGLYREALALWANAWQLQAQLGTPSGPDRPLLTLAGLAVCHQELEDPGEARACCEKALQLLGDKSLHPLLAPFLEAHVRLSWRLGLDKRQSEARLQALQEAGLTPTPPPSLKELLIKEVLD

SEQ ID NO: 67543 - protein, 185 aa, Homo sapiens
FAEKFQEVKEAAKIAKDKTQEKIETSSNHSQIIHFGQESGRETPSSTQASSVNGTDDEKASHAGPANTHLKSENDKLKIALTQSAANVKKWEIELQTLRESNARLTTALQESAASVEQWKRQFSICRDENDRLRNKIDELEEQCSEINREKEKNTQLKRRIEELEAELREKETELKDLRKQSEII

SEQ ID NO: 67544 - protein, 443 aa, Homo sapiens
  MOD_RES (1)..(1): Any amino acid
XPRLPRAGARERVRGFLTQTRVRSAQSPGGSLPSDDLGEMESSSSDYYNKDNEEESLLANVASLRHELKITEWSLQSLGEELSSVSPSENSDYAPNPSRSEKLILDVQPSHPGLLNYSPYENVCKISGSSTDFQKKPRDKMFSSSAPVDQEIKSLREKLNKLRQQNACLVTQNHSLMTKFESIHFELTQSRAKVSMLESAQQQAASVPILEEQIINLEAEVSAQDKVLREAENKLEQSQKMVIEKEQSLQESKEECIKLKVDLLEQTKQGKRAERQRNEALYNAEELSKAFQQYKKKVAEKLEKVQAEEEILERNLTNCEKENKRLQERCGLYKSELEILKEKLRQLKEENNNGKEKLRIMAVKNSEVMAQLTESRQSILKLESELENKDEILRDKFSLMNENRELKVRVAAQNERLDLCQQEIESSRVELRSLEKIISQLPN

SEQ ID NO: 67545 - protein, 69 aa, Homo sapiens
MFANLKYVSLGILVFQTTSLVLTMRYSRTLKEEGPRYLSSTAVVVAELLKIMACILLVYKDSMALRFSA

SEQ ID NO: 67546 - protein, 447 aa, Homo sapiens
  MOD_RES (1)..(1): Any amino acid
XLQAWSTFIRIMDPDVITGYNIQNFDLPYLISRAQTLKVQTFPFLGRVAGLCSNIRDSSFQSKQTGRRDTKVVSMVGRVQMDMLQVLLREYKLRSYTLNAVSFHFLGEQKEDVQHSIITDLQNGNDQTRRRLAVYCLKDAYLPLRLLERLMVLVNAVEMARVTGVPLSYLLSRGQQVKVVSQLLRQAMHEGLLMPVVKSEGGEDYTGATVIEPLKGVRPQDRAGAAWELLALTPGRGCSPPRYYDVPIATLDFSSLYPSIMMAHNLCYTTLLRPGTAQKLGLTEDQFIRTPTGDEFVKTSVRKGLLPQILENLLSARKRAKAELAKETDPLRRQVLDGRQLALKSVTGFGRQMIEKTKQLVESKYTVENGYSTSAKVVYGDTDSVMCRFGVSSVAEAMALGREAADWVSGHFPSPIRLEFEKVYFPYLLISKKRYAGLLFSSRPDAH

SEQ ID NO: 67547 - protein, 198 aa, Homo sapiens
MVYTQSEILQKEVYLFERIDSQNREIMKHLKAICFLRPTKENVDYIIQELRRPKYTIYFIYFSNVISKSDVKSLAEADEQEVVAEVQEFYGDYIAVNPHLFSLNILGCCQGRNWDPAQLSRTTQGLTALLLSLKKCPMIRYQLSSEAAKRLAECVKQVITKEYELFEFRRTEVPPLLLILDRCDDAITPLLNQSAGNQ

SEQ ID NO: 67548 - protein, 542 aa, Homo sapiens
MYCDGAVDLDAAAELPGSSAVRLASLRDLPAQLLELYQQGFSLAALHPFVQPTHEREKTPLEHIFRAILIKKTDRSQKTDLHNEGYILELDCCSSLDHPTDQKLIPEFIKKIQEAASQGLKFVGVIPQYHSSVNSAGSSAPVSTANSTEDARDAKNARGDHASLENEKPGTGDVCSAPAGRNQSPEPSSGPRGEVPLAKQPSSPSGEGDGGELSPQGVSKTLDGPESNPLEVHEEPLSGKMEIFTLFNKPKSHQKCRQYYPVTIPLHVSKNGQTVSGLDANWLEHMSDHFRKGGMLVNAVFYLGIVNDSLHGLTDGVFIFEAVSTEDSKTIQGYDAIVVEQWTVLEGVEVQTDYVPLLNSLAAYGWQLTCVLPTPVVKTTSEGSVSTKQIVFLQRPCLPQKIKKKESKFQWRFSREEMHNRQMRKSKGKLSARDKQQAEENEKNLEDQSSKAGDMGNCVSGQQQEGGVSEEMKGPVQEDKGEQLSPGGLLCGVGVEGEAVQNGPASHSRALVGICTGHSNPGEDARDGDAEEVRELGTVEEN

SEQ ID NO: 67549 - protein, 70 aa, Homo sapiens
MLLPGRARQPPTPQPVQHPGLRRQVEPPGQLLRLFYCTVLVCSKEISALTDFSEGAGRMPEPAGLPPPGQ

SEQ ID NO: 67550 - protein, 119 aa, Homo sapiens
MAQDSVDLSCDYQFWMQKLSVWDQASTLETQQDTCLHVAQFQEFLRKMYEALKEMDSNTVIERFPTIGQLLAKACWNPFILAYDESQKILIWCLCCLINKEPQNSGQSKLNSWIQVELY

SEQ ID NO: 67551 - protein, 246 aa, Homo sapiens
MSLEDPFFVVRGEVQKAVNTARGLYQRWCELLQESAAVGREELDWTTNELRNGLRSIEWDLEDLEETIGIVEANPGKFKLPAGDLQERKVFVERMREAVQEMKDHMVSPTAVAFLERNNREILAGKPAAQKSPSDLLDASAVSATSRYIEEQQATQQLIMDEQDQQLEMVSGSIQVLKHMSGRVGEELDEQGIMLDAFAQEMDHTQSRMDGVLRKLAKVSHMTSGESPQGRGQSWWGQVVGGTLSP

SEQ ID NO: 67552 - protein, 107 aa, Homo sapiens
MSRPLLITFTPATDPSDLWKDGQQQPQPEKPESTLDGAAARAFYEALIGDESSAPDSQRSQTEPARERKRKKRRIMKAPAAEAVAEGASGRHGQGRSLEAEDKMTHR

SEQ ID NO: 67553 - protein, 361 aa, Homo sapiens
MSSGAPQKSSPMASGAEETPGFLDTLLQDFPALLNPEDPLPWKAPGTVLSQEEVEGELAELAMGFLGSRKAPPPLAAALAHEAVSQLLQTDLSEFRKLPREEEEEEEDDDEEEKAPVTLLDAQSLAQSFFNRLWEVAGQWQKQVPLAARASQRQWLVSIHAIRNTRRKMEDRHVSLPSFNQLFGLSDPVNRAYFAVFDGHGGVDAARYAAVHVHTNAARQPELPTDPEGALREAFRRTDQMFLRKAKRERLQSGTTGVCALIAGATLHVAWLGDSQVILVQQGQVVKLMEPHRPERQDEKARIEALGGFVSHMDCWRVNGTLAVSRAIGESQRGRPKWEKVSRKPRPRVWPAAHQGFREAV

SEQ ID NO: 67554 - protein, 103 aa, Homo sapiens
MDRSGFGEISSPVIREAEVTRTARKQSAQKRVLLQASQDENFGNTTPRNQVIPRTPSSFRQPFTPTSRSLLRQPDISCILGTGGKSPRLTQSSGFFGNLSMHP

SEQ ID NO: 67555 - protein, 365 aa, Homo sapiens
MAVMAPRTLVLLLSGALALTQTWAGSHSMRYFYTSVSRPGRGEPRFIAVGYVDDTQFVRFDSDAASQRMEPRAPWIEQEGPEYWDRNTRNVKAHSQTDRANLGTLRGYYNQSEDGSHTIQRMYGCDVGPDGRFLRGYQQDAYDGKDYIALNEDLRSWTAADMAAQITQRKWETAHEAEQWRAYLEGRCVEWLRRYLENGKETLQRTDAPKTHMTHHAVSDHEATLRCWALSFYPAEITLTWQRDGEDQTQDTELVETRPAGDGTFQKWASVVVPSGQEQRYTCHVQHEGLPKPLTLRWEPSSQPTIPIVGIIAGLVLFGAVIAGAVVAAVMWRRKSSDRKGGSYSQAASSDSAQGSDMSLTACKV

SEQ ID NO: 67556 - protein, 60 aa, Homo sapiens
MASMQKRLQKELLALQNDPPPGMTLNEKSVQNSITQSCLLVKIFLFILMFIAMVISVYPF

SEQ ID NO: 67557 - protein, 1130 aa, Homo sapiens
MGSEDHGAQNPSCKIMTFRPTMEEFKDFNKYVAYIESQGAHRAGLAKIIPPKEWKPRQTYDDIDDVVIPAPIQQVVTGQSGLFTQYNIQKKAMTVGEYRRLANSEKYCTPRHQDFDDLERKYWKNLTFVSPIYGADISGSLYDDDVAQWNIGSLRTILDMVERECGTIIEGVNTPYLYFGMWKTTFAWHTEDMDLYSINYLHFGEPKSWYAIPPEHGKRLERLAIGFFPGSSQGCDAFLRHKMTLISPIILKKYGIPFSRITQEAGEFMITFPYGYHAGFNHGFNCAESTNFATLRWIDYGKVATQCTCRKDMVKISMDVFVRILQPERYELWKQGKDLTVLDHTRPTALTSPELSSWSASRASLKAKLLRRQISLKENRHWRKTEEERKPSLERKKEQTKRPGLSSHRKRSQPKKPKPEDPKFPGEGTAGAALLEEAGGSVKEEAGPEVDPEEEEEEPQPLPHGREAEGAEEDGRGKLRPTKAKSERKKKSFGLLPPQLPPPPAHFPSEEALWLPSPLEPPVLGPGPAAMEESPLPAPLNVVPPEVPSEELEAKPRPIIPMLYVVPRPGKAAFNQEHVSCQQAFEHFAQKGPTWKEPVSPMELTGPEDGAASSGAGRMETKARAGEGQAPSTFSKLKMEIKKSRRHPLGRPPTRSPLSVVKQEASSDEEASPFSGEEDVSDPDALRPLLSLQWKNRAASFQAERKFNAAAARTEPYCAICTLFYPYCQALQTEKEAPIASLGEGCPATLPSKSRQKTRPLIPEMCFTSGGENTEPLPANSYIGDDGTSPLIACGKCCLQVHASCYGIRPELVNEGWTCSRCAAHAWTAECCLCNLRGGALQMTTDRRWIHVICAIAVPEARFLNVIERHPVDISAIPEQRWKLKCVYCRKRMKKVSGACIQCSYEHCSTSFHVTCAHAAGVLMEPDDWPYVVSITCLKHKSGGHAVQLLRAVSLGQVVITKNRNGLYYRCRVIGAASQTCYEVNFDDGSYSDNLYPESITSRDCVQLGPPSEGELVELRWTDGNLYKAKFISSVTSHIYQVEFEDGSQLTVKRGDIFTLEEELPKRVRSRLSLSTGAPQEPAFSGEEAKAAKRPRVGTPLATEDSGRSQDYVAFVESLLQVQGRPGAPF

SEQ ID NO: 67558 - protein, 224 aa, Homo sapiens
MEKIPFVLGGNLQGGELVVAYPYDLVRSPWKTQEHTPTPDDHVFRWLAYSYASTHRLMTDARRRVCHTEDFQKEEGTVNGASWHTVAGSLNDFSYLHTNCFELSIYVGCDKYPHESQLPEEWENNRESLIVFMEQVHRGIKGLVRDSHGKGIPNAIISVEGINHDIRTGRVSLQKLSLACRRVRCAFALSSSSTMIVRPPQPYGTVPHSSPDPVTTKISPLRNF

SEQ ID NO: 67559 - protein, 555 aa, Homo sapiens
MFLLCLTGNPLREEDRLGNHASDICGGSELDAVKTDSSLPSPSSLWSASHPSSSKKMDGYILSLVQKKTHPVRTNKPRTSVNADPTKGLLRNGSVCVRAPGGVSQGNSVNLKNSKQACLPSGGIPSLNNGTFSPPKQWSKESKAEQAESKRVPLPEGCPSGAASDLQSKHLPKTAKPASQEHARCSAIGTGESPKESAQLSGASPKESPSRGPAPPQENKVVQPLKKMSQKNSLQGVPPATPPLLSTAFPVEERPALDFKSEGSSQSLEEAHLVKAQFIPGQQPSVRLHRGHRNMGVVKNSSLKHRGPALQGLENGLPTVREKTRAGSKKCRFPDDLDTNKKLKKASSKGRKSGGGPEAGVPGRPAGGGHRAGSRAHGHGREAVVAKPKHKRTDYRRWKSSAEISYEEALRRARRGRRENVGLYPAPVPLPYASPYAYVASDSEYSAECESLFHSTVVDTSEDEQSNYTTNCFGDSESSVSEGEFVGESTTTSDSEESGGLIWSQFVQTLPIQTVTAPDLHNHPAKTFVKIKASHNLKKKILRFRSGSLKLMTTV

SEQ ID NO: 67560 - protein, 113 aa, Homo sapiens
MRRLTVDDFEIGRPLGKGKFGNVYLARLKESHFIVALKVLFKSQIEKEGLEHQLRREIEIQAHLQHPNILRLYNYFHDARRVYLILEYAPRGELYKELQKSEKLDEQRTATVR

SEQ ID NO: 67561 - protein, 46 aa, Homo sapiens
MEAAAEPGNLAGVRHIILVLSGKGGVGKSTISTELALALRHAGKKR

SEQ ID NO: 67562 - protein, 102 aa, Homo sapiens
MAPGQTPSLCSWLLPLPSTWATTGHVCFSDILQTPDGGQLLLDWAKQPDSSQDPDPTTQPIVLLLPGITGSSQETYVLHLVNQALRDGYQPTGLFVPAILKI

SEQ ID NO: 67563 - protein, 426 aa, Homo sapiens
MSHTASSCQELVENCAVHVAGMAQEDSRRGQVPSSFYHGANQELDLSTKVYKRESGSPYSVLVDTKMSKPHLHETEEQPYFRETRAVSDVHAVKEDRENSDDTEEEEEEVSYKREQIIVECVSCNKSFKKLWSLHEHIKIVHGYAEKKFSCEICEKKFYTMAHVRKHMVAHTKDMPFTCETCGKSFKRSMSLKVHSLQHSGEKPFRCENCDERFQYKYQLRSHMSIHIGHKQFMCQWCGKDFNMKQYFDEHMKTHTGEKPFICEICGKSFTSRPNMKRHRRTHTGEKPYPCDVCGQRFRFSNMLKAHKEKCFRVTSPVNVPPAVQIPLTTSPATPVPSVVNTATTPTPPINMNPVSTLPPRPIPHPFSHLHIHPHPHHPHHLPIPPVPHLPPPPALFKSEPLNHRGQSEDNFLRHLAEKNSSAQHH

SEQ ID NO: 67564 - protein, 173 aa, Homo sapiens
MWAGLLLRAACVALLLPGAPARGYTGRKPPGHFAAERRRLGPHVCLSGFGSGCCPGWAPSMGGGHCTLRKCLSLCPKSSPPAVCVASPQSLVRGADGRPQFLVSHLHFSSQPSAPSAVGVASASLPMSAPARMESKGPPAQKPMDHVGSTAVTLPATMEAVRRWPECAPWASR

SEQ ID NO: 67565 - protein, 106 aa, Homo sapiens
MSANTFGNAGFSVLLPGARLEGRCGPTNARVRCHLGLKIPPGCELVVGGEPQCWAEGHCLLVDDSFLHTVAHNGSPEDGPRVVFIVDLWHPNVAGAERQALDFVFA

SEQ ID NO: 67566 - protein, 67 aa, Homo sapiens
MSRGSSAGFDRHITIFSPEGRLYQVAWTSVVNSTQALEACYIPDTASPRRYKCECYTLFYTEAHSLE

SEQ ID NO: 67567 - protein, 64 aa, Homo sapiens
MKVLEVHENLDRQLQDSCEEDLSEKEKAIVREMCNVVWRKLGDAASSKPSIRQHLSGNQFKGPL

SEQ ID NO: 67568 - protein, 625 aa, Homo sapiens
MGQGDESERIVINVGGTRHQTYRSTLRTLPGTRLAWLAEPDAHSHFDYDPRADEFFFDRHPGVFAHILNYYRTGKLHCPADVCGPLYEEELAFWGIDETDVEPCCWMTYRQHRDAEEALDSFGGAPLDNSADDADADGPGDSGDGEDELEMTKRLALSDSPDGRPGGFWRRWQPRIWALFEDPYSSRYARYVAFASLFFILVSITTFCLETHERFNPIVNKTEIENVRNGTQVRYYREAETEAFLTYIEGVCVVWFTFEFLMRVIFCPNKVEFIKNSLNIIDFVAILPFYLEVGLSGLSSKAAKDVLGFLRVVRFVRILRIFKLTRHFVGLRVLGHTLRASTNEFLLLIIFLALGVLIFATMIYYAERIGAQPNDPSASEHTHFKNIPIGFWWAVVTMTTLGYGDMYPQTWSGMLVGALCALAGVLTIAMPVPVIVNNFGMYYSLAMAKQKLPKKKKKHIPRPPQLGSPNYCKSVVNSPHHSTQSDTCPLAQEEILEINRADSKLNGEVAKAALANEDCPHIDQALTPDEGLPFTRSGTRERYGPCFLLSTGEYACPPGGGMRKGHSAEMDNSIWFFLRETEPSHVSTYGVPIEDSTFAIASWNLESLLSNRRIVYTSWTHWTKR

SEQ ID NO: 67569 - protein, 331 aa, Homo sapiens
MSLLVVSMACVGFFLLQGAWPHEGVHRKPSLLAHPGRLVKSEETVILQCWSDVMFEHFLLHREGMFNDTLRLIGEHHDGVSKANFSISRMTQDLAGTYRCYGSVTHSPYQVSAPSDPLDIVIIGLYEKPSLSAQPGPTVLAGENVTLSCSSRSSYDMYHLSREGEAHERRLPAGTKVNGTFQANFPLGPATHGGTYRCFGSFRDSPYEWSKSSDPLLVSVTGNPRHLHILIGTSVVIILFILLFFLLHCWCSNKKNAAVMDQESAGNRTANSEDSDEQDPQEVTYTQLNHCVFTQRKITRPSQRPKTPPTDIIVYTELPNAESRSKVVSCP

SEQ ID NO: 67570 - protein, 517 aa, Homo sapiens
MALTPPLLLLSAGTMTLGSPRKGLLMLLMALVTQGDPVKPSRGPLVTCTCESPHCKGPTCRGAWCTVVLVREEGRHPQEHRGCGNLHRELCRGRPTEFVNHYCCDSHLCNHNVSLVLEATQPPSEQPGTDGQLALILGPVLALLALVALGVLGLWHVRRRQEKQRGLHSELGESSLILKASEQGDSMLGDLLDSDCTTGSGSGLPFLVQRTVARQVALVECVGKGRYGEVWRGLWHGESVAVKIFSSRDEQSWFRETEIYNTVLLRHDNILGFIASDMTSRNSSTQLWLITHYHEHGSLYDFLQRQTLEPHLALRLAVSAACGLAHLHVEIFGTQGKPAIAHRDFKSRNVLVKSNLQCCIADLGLAVMHSQGSDYLDIGNNPRVGTKRYMAPEVLDEQIRTDCFESYKWTDIWAFGLVLWEIARRTIVNGIVEDYRPPFYDVVPNDPSFEDMKKVVCVDQQTPTIPNRLAADPVLSGLAQMMRECWYPNPSARLTALRIKKTLQKISNSPEKPKVIQ

SEQ ID NO: 67571 - protein, 121 aa, Homo sapiens
MLARRQRDPLQALRRRNQELKQQVDSLLSESQLKEALEPNKRQHIYQRCIQLKQAIDENKNALQKLSKADESAPVANYNQRKEEEHTLLDKLTQQLQGLAVTISRENITEYASFLPFFFLF

SEQ ID NO: 67572 - protein, 479 aa, Homo sapiens
MALPQGLLTFRDVAIEFSQEEWKCLDPAQRTLYRDVMLENYRNLVSLGISSKCTMKEFSSTAQGNTEVIHTGTLQRHERHHIGDFSFQEIEKDIHNFEFQWQEDERNGHEAPMTKIKKLMGSTEQYDHRHAGNKPIKYQLGSSFHSHLSELHIFQPKGKINNQVEKSINDASSVSTAQRISCRPKTHISNNYGDNFLNYSLLTQRQEVRMREKSFQCIESGKAFNYSSLLRKHQIIHLGEKQYKCDVCDKVFIRKRYLARHRRCHTGEKPYKCNECGKSFSQMSSLTYHHRLHTGEKPYKCEECDKAFRHNSALQRHRRIHTGEKPHKCNECGKTFSQKSYLACHRSIHTGKKPYECEECDKAFSFKSNLESHRITHTGEKPYKCNDCGKTFSHMSTLTCHRRLHTGEKPYKCEECDEAFRFKSSLERHRRIHNGEKLYKCNECGKTFSQELSLTCHCRLHSGEKPCKCGECDKAYSFK

SEQ ID NO: 67573 - protein, 297 aa, Homo sapiens
MDSKYQCVKLNDGHFMPVLGFGTYAPAEVPKSKALEAVKLAIEAGFHHIDSAHVYNNEEQVGLAIRSKIADGSVKREDIFYTSKLWSNSHRPELVRPALERSLKNLQLDYVDLYLIHFPVSVKAMEKCKDAGLAKSIGVSNFNHRLLEMILNKPGLKYKPVCNQVECHPYFNQRKLLDFCKSKDIVLVAYSALGSHREEPWVDPNSPVLLEDPVLCALAKKHKRTPALIALRYQLQRGVVVLAKSYNEQRIRQNVQVFEFQLTSEEMKAIDGLNRNVRYLTLDIFAGPPNYPFSDEY

SEQ ID NO: 67574 - protein, 279 aa, Homo sapiens
PDDIFKLDDLSVLDLSHNQLTECPRELENAKNMLVLNLSHNSENRLESLPPQMRRLVHLQTLVLNGNPLLHAQLRQLPAMTALQTLHLRSTQRTQSNLPTSLEGLSNLADVDLSCNDLTRVPECLYTLPSLRRLNLSSNQITELSLCIDQWVHVETLNLSRNQLTSLPSAICKLSKLKKLYLNSNKLDFDGLPSGIGKLTNLEEFMAANNNLELVPESLCRCPKLRKLVLNKNHLVTLPEAIHFLTEIEVLDVRENPNLVMPPKPADRAAEWYNIDFSL

SEQ ID NO: 67575 - protein, 261 aa, Homo sapiens
MNPLLILTFVAAALAAPFDDDDKIVGGYNCEENSVPYQVSLNSGYHFCGGSLINEQWVVSAGHCYKSAIKSKFSGRGCEYHRIQVRLGEHNIEVLEGNEQFINAAKIIRHPQYDRKTLNNDIMLIKLSSRAVINARVSTISLPTAPPATGTKCLISGWGNTASSGADYPDELQCLDAPVLSQAKCEASYPGKITSNMFCVGFLEGGKDSCQGDSGGPVVCNGQLQGVVSWGDGCAQKNKPGVYTKVYNYVKWIKNTIAANS

SEQ ID NO: 67576 - protein, 427 aa, Homo sapiens
MPTAESEAKVKTKVRFEELLKTHSDLMREKKKLKKKLVRSEENISPDTIRSNLHYMKETTSDDPDTIRSNLPHIKETTSDDVSAANTNNLKKSTRVTKNKLRNTQLATENPNGDASVEEDKQGKPNKKVIKTVPQLTTQDLKPETPENKVDSTHQKTHTKPQPGVDHQKSEKANEGREETDLEEDEELMQAYQCHVTEEMAKEIKRKIRKKLKEQLTYFPSDTLFHDDKLSSEKRKKKKEVPVFSKAETSTLTISGDTVEGEQKKESSVRSVSSDSHQDDEISSMEQSTEDSMQDDTKPKPKKTKKKTKAVADNNEDVDGDGVHEITSRDSPVYPKCLLDDDLVLGVYIHRTDRLKSDFMISHPMVKIHVVDEHTGQYVKKDDRNEVSSCYPGWSQTPELKQSTCLSLPKCWGYRLEPLCLAMSILL

SEQ ID NO: 67577 - protein, 95 aa, Homo sapiens
MAEAVLRVARRQLSQRGGSGAPILLRQMFEPVSCTFTYLLGDRESREAVLIDPVLETAPRDAQLIKELGLRLLYAGVGDQGQPWPHPRLCHLRPE

SEQ ID NO: 67578 - protein, 37 aa, Homo sapiens
MAASAAETRVFLEVRGQLQSALLILGDRVSPYCPCWS

SEQ ID NO: 67579 - protein, 173 aa, Homo sapiens
MKPVKHLLTTSNKSANVPALTTKKGLHNLPLSPELKEKHNAKLIHDKIEPMVLRSPPTGESILRYALPIPSSKTKNLLPEDEMIGKIIKHLKMVVSTLEETYGHCDQNGEEPFVKHEHEELSLSVGDDMNSFLTYCSQFAAQLEEALKEEQNILESLFKWFQWQVNQMEESCK

SEQ ID NO: 67580 - protein, 296 aa, Homo sapiens
MAASQAVEEMRSRVVLGEFGVRNVHTTDFPGNYSGYDDAWDQDRFEKNFRVDVVHMDENSLEFDMVGIDAAIANAFRRILLAEVPTMAVEKVLVYNNTSIVQDEILAHRLGLIPIHADPRLFEYRNQGDEEGTEIDTLQFRLQVRCTRNPHAAKDSSDPNELYVNHKVYTRHMTWIPLGNQADLFPEGTIRPVHDDILIAQLRPGQEIDLLMHCVKGIGKKVARVANPRLDTFSREIFRNEKLKKVVRLARVRDHYIFSVESTGVLPPDVLVSEAIKVLMGKCRRFLDELDAVQMD

SEQ ID NO: 67581 - protein, 87 aa, Homo sapiens
MSGMRRYEVALEAEEEIYWGCFYFFPWLRMWRRERSSAHPGEQKLEPLRGLMSCLSSGLGPTPQRSGRGFPRRSPTAAAQPASALKI

SEQ ID NO: 67582 - protein, 591 aa, Homo sapiens
MNKWVRCICDICGFNPTEEDPVKPPGSSLQAPADLPLAINTAPPSTQADSSSATLPPPYQLINVPPHLETLGIQEDPQDYLLLINCQSKKPEPTRTHADSAKSTSSETDCNDNVPSHKNPASSQSKHGMNGFFQQQMIYDSPPSRAPSASVDSSLYNLPRSYSHDVLPKVSPSSTEADGELYVFNTPSGTSSVETQMRHVSISYDIPPTPGNTYQIPRTFPEGTLGQTSKLDTIPDIPPPRPPKPHPAHDRSPVETCSIPRTASDTDSSYCIPTAGMSPSRSNTISTVDLNKLRKDASSQDCYDIPRAFPSDRSSSLEGFHNHFKVKNVLTVGSVSSEELDENYVPMNPNSPPRQHSSSFTEPIQEANYVPMTPGTFDFSSFGMQVPPPAHMGFRSSPKTPPRRPVPVADCEPPPVDRNLKPDRKVKPAPLEIKPLPEWEELQAPVRSPITRSFARDSSRFPMSPRPDSVHSTTSSSDSHDSEENYVPMNPNLSSEDPNLFGSNSLDGGSSPMIKPKGDKQVEYLDLDLDSGKSTPPRKQKSSGSGSSVADERVDYVVVDQQKTLALKSTREAWTDGRQSTESETPAKSVK

SEQ ID NO: 67583 - protein, 69 aa, Homo sapiens
MVHIKKGELTQEEKELLEVIGKGVPHFRSAESQRGAPRTSQKPYFPGVPEWTSQRSSLPSPVTWQVTSA

SEQ ID NO: 67584 - protein, 57 aa, Homo sapiens
MSGRSGKKKMSKLSRSARAGVIFPVGRLMRYLKKGTFKYRISVGAPVYMAAVIEYLA

SEQ ID NO: 67585 - protein, 79 aa, Homo sapiens
MPILKQLVSSSVHSKRRSRADLTAEMISAPLGDFRHTMHQLPLQLHLRHPGGAQPCLPGAGQGPGCCLKTARQGVLLHG

SEQ ID NO: 67586 - protein, 258 aa, Homo sapiens
MMVLQVSAAPRTVALTALLMVLLTSVVQGRATPENYLFQGRQECYAFNGTQRFLERYIYNREEFVRFDSDVGEFRAVTELGRPDEEYWNSQKDILEEERAVPDRMCRHNYELGGPMTLQRRVQPRVNVSPSKKGPLQHHNLLVCHVTDFYPGSIQVRWFLNGQEETAGVVSTNLIRNGDWTFQILVMLEMTPQQGDVYTCQVEHTSLDSPVTVEWKAQSDSARSKTLTGAGGFVLGLIICGVGIFMHRRSKKVQRGSA

SEQ ID NO: 67587 - protein, 105 aa, Homo sapiens
MGLELYLDLLSQPCRAVYIFAKKNDIPFELRIVDLIKGQHLSDAFAQVNPLKKVPALKDGDFTLTESPWVLAAKSSKADPSWPHGGSAWRQQWGRTSSRRPMRSF

SEQ ID NO: 67588 - protein, 757 aa, Homo sapiens
MGEPEAGSEFANGAAAAAGPMADTQYILPNDIGVSSLDCREAFRLLSPTERLYAYHLSRAAWYGGLAVLLQTSPEAPYIYALLSRLFRAQDPDQLRQHALAEGLTEEEYQAFLVYAAGVYSNMGNYKSFGDTKFVPNLPKEKLERVILGSEAAQQHPEEVRGLWQTCGELMFSLEPRLRHLGLGKEGITTYFSGNCTMEDAKLAQDFLDSQNLSAYNTRLFKEVDGEGKPYYEVRLASVLGSEPSLDSEVTSKLKSYEFRGSPFQVTRGDYAPILQKVVEQLEKAKAYAANSHQGQMLAQYIESFTQGSIEAHKRGSRFWIQDKGPIVESYIGFIESYRDPFGSRGEFEGFVAVVNKAMSAKFERLVASAEQLLKELPWPPTFEKDKFLTPDFTSLDVLTFAGSGIPAGINIPNYDDLRQTEGFKNVSLGNVLAVAYATQREKLTFLEEDDKDLYILWKGPSFDVQVGLHELLGHGSGKLFVQDEKGAFNFDQETVINPETGEQIQSWYRSGETWDSKFSTIASSYEECRAESVGLYLCLHPQVLEIFGFEGADAEDVIYVNWLNMVRAGLLALEFYTPEAFNWRQAHMQARFVILRVLLEAGEGLVTITPTTGSDGRPDARVRLDRSKIRSVGKPALERFLRRLQVLKSTGDVAGGRALYEGYATVTDAPPECFLTLRDTVLLRKESRKLIVQPNTRLEGSDVQLLEYEASAAGLIRSFSERFPEDGPELEEILTQLATADARFWKGPSEAPSGQA

SEQ ID NO: 67589 - protein, 362 aa, Homo sapiens
MEEEEYEQIPQENPPEELSQDPVLELSGGSALALGENVQPHLQGCGPRMVAQRWFQGRCWSFTICPCSLGVHPEAPGDDKMGYMGPYPSSLCFLWIFLGLREKEQKTPRRLRLILMGKTGSGKSATGNSILGRDVFESKLSTRPVTKTSQRRSREWAGKELEVIDTPNILSPQVSPEVADAICQAIVLSAPGPHAVLLVTQLGRFTDEDQQVVRRLQEVFGVGVLGHTILVFTRKEDLAGGSLEDYVRETNNQALAWLDVTLARRHCGFNNRAQGEEQEAQLRELMEKVEAIMWENEGDYYSNKAYQYTQQNFRLKELQERQVSQGQGSEDVPGEESWLEGLSQIQKESEEAHRCLLGKADL

SEQ ID NO: 67590 - protein, 107 aa, Homo sapiens
MSVDMNSQGSDSNEEDYDPNCEEEEEEEEDDPGDIEDYYVGVASDVEQQGADAFDPEEYQFTCLTYKESEGALNEHMTSLASVLKVSHSVAKLILVNFHWQVSEILD

SEQ ID NO: 67591 - protein, 487 aa, Homo sapiens
MDYERALRLLRLPQLPPGAQLVKSAWLSLCLQERRLVDVAGFSIFIPSRYLDHPQPSKAEQDASIPPGTHEALLQTALSPPPPPTRPVSPPQKAKEAPNTQAQPISDDEASDGEETQVSAADLEALISGHYPTSLEGDCEPSPAPAVLDKWVCAQPSSQKATNHNLHITEKLEVLAKAYSVQGDKWRALGYAKAINALKSFHKPVTSYQEACSIPGIGKRMAEKIIEILESGHLRKLDHISESVPVLELFSNIWGAGTKTAQMWYQQGFRSLEDIRSQASLTTQQAIGLKHYSDFLERMPREEATEIEQTVQKAAQAFNSGLLCVACGSYRRGKATCGDVDVLITHPDGRSHRGIFSRLLDSLRQEGFLTDDLVSQEENGQQQKYLGVCRLPGPGRRHRRLDIIVVPYSEFACALLYFTGSAHFNRSMRALAKTKGMSLSEHALSTAVVRNTHGCKVGPGRVLPTPTEKDVFRLLGLPYREPAERDW

SEQ ID NO: 67592 - protein, 439 aa, Homo sapiens
MLTPPLLLLLPLLSALVAAAIDAPKTCSPKQFACRDQITCISKGWRCDGERDCPDGSDEAPEICPQSKAQRCQPNEHNCLGTELCVPMSRLCNGVQDCMDGSDEGPHCRELQGNCSRLGCQHHCVPTLDGPTCYCNSSFQLQADGKTCKDFDECSVYGTCSQLCTNTDGSFICGCVEGYLLQPDNRSCKAKNEPVDRPPVLLIANSQNILATYLSGAQVSTITPTSTRQTTAMDFSYANETVCWVHVGDSAAQTQLKCARMPGLKGFVDEHTINISLSLHHVEQMAIDWLTGNFYFVDDIDDRIFVCNRNGDTCVTLLDLELYNPKGIALDPAMGKVFFTDYGQIPKVERCDMDGQNRTKLVDSKIVFPHGITLDLVSRLVYWADAYLDYIEVVDYEGKGRQTIIQGILVRELLSEVLWGNHDPGPSGEGGSLCRGTVL

SEQ ID NO: 67593 - protein, 89 aa, Homo sapiens
MASDASHALEAALEQMDGIIAGTKTGADLSDGTCEPGLASPASYMNPFPVLHLIEDLRLALEMLELPQERAALLSQIPGPTAAYIKEWF

SEQ ID NO: 67594 - protein, 503 aa, Homo sapiens
MTTDDTEVPAMTLAPGHAALETQTLSAETSSRASTPAGPIPEAETRGAKRISPARETRSFTKTSPNFMVLIATSVETSAASGSPEGAGMTTVQTITGSDPREAIFDTLCTDDSSEEAKTLTMDILTLAHTSTEAKGLSSESSASSDSPHPVITPSRASESSASSDGPHPVITPSRASESSASSDGPHPVITPSWSPGSDVTLLAEALVTVTNIEVINCSITEIETTTSSIPGASDTDLIPTEGVKASSTSDPPALPDSTEAKPHITEVTASAETLSTAGTTESAAPDATVGTPLPTNSATEREVTAPGATTLSGALVTVSRNPLEETSALSVETPSYVKVSGAAPVSIEAGSAVGKTTSFAGSSASSYSPSEAALKNFTPSETPTMDIATKGPFPTSRDPLPSVPPTTTNSSRGTNSTLAKITTSAKTTMKPPTATPTTARTRPTTDVSAGENGGFLLLRLSVASPEDLTDPRVAERLMQQLHRELHAHAPHFQVSLLRVRRG

SEQ ID NO: 67595 - protein, 128 aa, Homo sapiens
MEPEEEPGGAAVREVYEEAGVKGKLGRLLGIFENQDRKHRTYVYVLTVTEILEDWEDSVNIGRKREWFKVEDAIKVLQCHKPVHAEYLEKLKLGCSPANGNSTVPSLPDNNALFVTAAQTSGLPSSVR

SEQ ID NO: 67596 - protein, 19 aa, Homo sapiens
MEDLEETLFEEFENYSYDL

SEQ ID NO: 67597 - protein, 224 aa, Homo sapiens
  MOD_RES (1)..(1): Any amino acid
XRLQGAEVVQGDQDDQVIMELALNGAYATFIVTNYWESCSQEQEVKQGKLLADLARRLGLHYVVYSGLENIKKLTAGRLAAAHFDGKGEVEEYFRDIGVPMTSVRLPCYFENLLSHFLPQKAPDGKSYLLSLPTGDVPMDGMSVSDLGPVVLSLLKMPEKYVGQNIGLSTCRHTAEEYAALLTKHTRKVVHDAKVGLPPQVTQASLSGLSSSRREGVSRAAHTS

SEQ ID NO: 67598 - protein, 283 aa, Homo sapiens
MPHSSLHPSIPCPRGHGAQKAALVLLSACLVTLWGLGEPPEHTLRYLVLHLASLQLGLLLNGVCSLAEELRHIHSRYRGSYWRTVRACLGCPLRRGALLLLSIYFYYSLPNAVGPPFTWMLALLGLSQALNILLGLKGLAPAEISAVCEKGNFNVAHGLAWSYYIGYLRLILPELQARIRTYNQHYNNLLRGAVSQRLYILLPLDCGVPDNLSMADPNIRFLDKLPQQTGDHAGIKDRVYSNSIYELLENGQRNLQMTAASRCPRRFSGTCGRRKRKRLLWAA

SEQ ID NO: 67599 - protein, 1309 aa, Homo sapiens
MGTHHHAQLIFVFLVEMRFHHVDQAGLELLTSSNSPASASRSAEITVVSQHAQPGFLYQWLEADRHGKSQGAANTTSGENFDQSPLRRTFKSKVLAHYPQNIEWNPFDQDAVNMLCMPKGLSFRTQTDNKDPQFHSFIITREDGSRTYGFVLTFYEEVTSKQICTAMQTLYQMHNAEHYSSVYASSSCSMDSLASSLDEGDTTSLLKLQRYNSYDISRDTLYVSKSICLITPLPFMQACKKFLIQLYKAVTSQQPPPLPLESYIHNILYEVPLPPPGRSLKFYGVYEPVICQRPGPSELPLSDYPLREAFELLGLENLVQVFTCVLLEMQILLYSQDYQRLMTVAEGITTLLFPFQWQHVYVPILPASLLHFLDAPVPYLMGLQSKEGTDRSKLELPQEANLCFVDIDNHFIELPEEFPQFPNKVDFIQELSEVLVQFGIPPEGSLHCSESTSKLKNMVLKDLVNDKKNGNVCTNNISMYELLKGNETIARLQALAKRTGVAVEKMDLSASLGEKDKDLKLHCEEAELRDYQLNVQLREVFANRFTQMFADYEAFVIQTAQDMESWLTNREQMQNFDKASFLSDQPEPYLPFLSRFIETQMFATFIDNKIMSQWEEKDPLLRVFDTRIDKIRLYNVRAPTLRTSIYQKCSTLKEAAQSIEQRLMKMDHTAIHPHLLDMKIGQGKYEQGFFPKLQSDVLATGPTSNNRWVSRSATAQRRKERLRQHSEHVGLDNDLREKYMQEARSLGKNLRQPKLSDLSPAVIAQTNCKFVEGLLKECRMKTKRMLVEKMGHEAVELGHGEANITGLEENTLIASLCDLLERIWSHGLQVKQGKSALWSHLIQFQDREEKQEHLAESPVALGPERRKSDSGVMLPTLRVSLIQDMRHIQNMSEIKTDVGRARAWIRLSLEKKLLSQHLKQLLSNQPLTKKLYKRYAFLRCEEEREQFLYHLLSLNAVDYFCFTSVFTTIMIPYRSVIIPIKKLSNAIITSNPWICVSGELGDTGVMQIPKNLLEMTFECQNLGKLTTVQIGHDNSGLLAKWLVDCVMVRNEITGHTYRFPCGRWLGKGIDDGSLERILIGELMTSASDEDLVKQCRTPPQQKSPTTARRLSITSLTGKNNKPNAGQIQEGIGEAVNNIVKHFHKPEKERGSLTVLLCGENGLVAALEQVFHHGFKSARIFHKNVFIWDFIEKVVAYFETTDQILDNEDDVLIQKSSCKTFCHYVNAINTAPRNIGKDGKFQILVCLGTRDRLLPQWIPLLAECPAITRMYEESALLRDRMTVNSLIRILQTIQDFTIVLEGSLIKGVDV

SEQ ID NO: 67600 - protein, 273 aa, Homo sapiens
MKPGFSPRGGGFGGRGGFGDRGGRGGRGGFGGGRGRGGGFHSGGNRGRGRGGKRGNQSGKNVMVEPHRHEGVFICRGKEDALVTKNLVPGESVYGEKRVSISEGDDKIEYRAWNPFRSKLAAAILGGVDQIHIKPGAKVLYLGAASGTTVSHVSDIVGPDGLVYAVEFSHRSGRDLINLAKKRTNIIPVIEDARHPHKYRMLIAMVDVIFADVAQPDQTRIVALNAHTFLRNGGHFVISIKANCIDSTASAEAVFASEVKKMQQENMKPQEQL

SEQ ID NO: 67601 - protein, 41 aa, Homo sapiens
GASGSGSSGDSLDKSITLPPDEIFRNLENAKRFAIDIGHRT

SEQ ID NO: 67602 - protein, 63 aa, Homo sapiens
MAFRTICVLVGVFICSICVKGSSQPQARVYLTFDEPTLYNAVCYICGYKKKCGVNLVLSNHLL

SEQ ID NO: 67603 - protein, 1008 aa, Homo sapiens
MSWMFKRDPVWKYLQTVQYGVHGNFPRLSYPTFFPRFEFQDVIPPDDFLTSDEEVDSVLFGSLRGHVVGLRYYTGVVNNNEMVALQRDPNNPYDKNAIKVNNVNGNQVGHLKKELAGALAYIMDNKLAQIEGVVPFGANNAFTMPLHMTFWGKEENRKAVSDQLKKHGFKLGPAPKTLGFNLESGWGSGRAGPSYSMPVHAAVQMTTEQLKTEFDKLFEDLKEDDKTHEMEPAEAIETPLLPHQKQALAWMVSRENSKELPPFWEQRNDLYYNTITNFSEKDRPENVHGGILADDMGLGKTLTAIAVILTNFHDGRPLPIERVKKNLLKKEYNVNDDSMKLGGNNTSEKADGLSKDASRCSEQPSISDIKEKSKFRMSELSSSRPKRRKTAVQYIESSDSEEIETSELPQKMKGKLKNVQSETKGRAKGSSKVIEDVAFACALTSSVPTTKKKMLKKGACAVEGSKKTDVEERPRTTLIICPLSVLSNWIDQFGQHIKSDVHLNFYVYYGPDRIREPALLSKQDIVLTTYNILTHDYGTKGDSPLHSIRWLRVILDEGHAIRNPNAQQTKAVLDLESERRWVLTGTPIQNSLKDLWSLLSFLKLKPFIDREWWHRTIQRPVTMGDEGGLRRLQSLIKNITLRRTKTSKIKGKPVLELPERKVFIQHITLSDEERKIYQSVKNEGRATIGRYFNEGTVLAHYADVLGLLLRLRQICCHTYLLTNAVSSNGPSGNDTPEELRKKLIRKMKLILSSGSDEECAICLDSLTVPVITHCAHVFCKPCICQVIQNEQPHAKCPLCRNDIHEDNLLECPPEELARDSEKKSDMEWTSSSKINALMHALTDLRKKNPNIKSLVVSQFTTFLSLIEIPLKASGFVFTRLDGSMAQKKRVESIQCFQNTEAGSPTIMLLSLKAGGVGLNLSAASRVFLMDPAWNPAAEDQCFDRCHRLGQKQEVIITKFIVKDSVEENMLKIQNKKRELAAGAFGTKKPNADEMKQAKINEIRTLIDL

SEQ ID NO: 67604 - protein, 581 aa, Homo sapiens
MAEAASGAGGTSLEGERGKRPPPEGEPAAPASGVLDKLFGKRLLQAGRYLVSHKAWMKTVPTENCDVLMTFPDTTDDHTLLWLLNHIRVGIPELIVQVRHHRHTRAYAFFVTATYESLLRGADELGLRKAVKAEFGGGTRGFSCEEDFIYENVESELRFFTSQERQSIIRFWLQNLRAKQGEALHNVRFLEDQPIIPELAARGIIQQVFPVHEQRILNRLMKSWVQAVCENQPLDDICDYFGVKIAMYFAWLGFYTSAMVYPAVFGSVLYTFTEADQTSRDVSCVVFALFNVIWSTLFLEEWKRRGAELAYKWGTLDSPGEAVEEPRPQFRGVRRISPITRAEEFYYPPWKRLLFQLLVSLPLCLACLVCVFLLMLGCFQLQELVLSVKGLPRLARFLPKVMLALLVSVSAEGYKKLAIWLNDMENYRLESAYEKHLIIKVVLFQFVNSYLSLFYIGFYLKDMERLKELLLVLSLSQSLERQLQAVLVPLAALRFRLLLLSLRGLLLAARAKVRAGGEPVGPRRGGQRGCAGGLARRAEGACAEGIWGRGRPASRCRRLGAHAAQCTDRARGGVETRWACP

SEQ ID NO: 67605 - protein, 68 aa, Homo sapiens
MENEPDHENVEQSLCAKTSEEELNKSFNLEASLSKFSYIDMDKELEFKNDLGLTLLSRLEYSGANMAH

SEQ ID NO: 67606 - protein, 177 aa, Homo sapiens
  MOD_RES (1)..(1): Any amino acid
XDLNKVFPPEVAVFEPSEAEISHTQKATLVCLATGFFPDHVELSWWVNGKEVHSGVSTDPQPLKEQPALNDSRYCLSSRLRVSATFWQNPRNHFRCQVQFYGLSENDEWTQDRAKPVTQIVSAEAWGRADCGFTSVSYQQGVLSATILYEILLGKATLYAVLVSALVLMAMVKRKDF

SEQ ID NO: 67607 - protein, 45 aa, Homo sapiens
MRPPSPLPARWLCVLAGALAWALGPAAAARCGTTSPAGQPPLGAR

SEQ ID NO: 67608 - protein, 50 aa, Homo sapiens
MEPPGPVSCKIESNICPQVASLTLAMETNSRASPDKTRNRSSTHPETKHI

SEQ ID NO: 67609 - protein, 65 aa, Homo sapiens
PPATMRIWLLGGLLPFLLLLSGLQRPTEGSEVAIKIDFDFAPGSFDDQYQGCSKQLPARNASLIL

SEQ ID NO: 67610 - protein, 147 aa, Homo sapiens
MGRLLALVVGAALVSSACGGCVEVDSETEAVYGMTFKILCISCKRRSETNAETFTEWTFRQKGTEEFVKKIHIEVVDKANRDMASIVSEIMMYVLIVVLTIWLVAEMIYCYKKIAAATETAAQENASEYLAITSESKENCTGVQVAE

SEQ ID NO: 67611 - protein, 80 aa, Homo sapiens
AVVVPSGEEQRYTCHVQHEGLPKPLTLRWEPSSQSTIPIVGIVAGLAVLAVVVIGAVVATVMCRRKSSGGKGGSCSQAAC

SEQ ID NO: 67612 - protein, 101 aa, Homo sapiens
MAEDKTKPSELDQGKYDADDNVKIICLGDSAVGKSKLMERFLMDGFQPQQLSTYALTLYKHTATVDGRTILVDFWDTAGQERFQSMHASYYHKAHACIMQT

SEQ ID NO: 67613 - protein, 227 aa, Homo sapiens
MGHEQNQGAALLQMLPLLWLLPHSWAVPEAPTPMWPDDLQNHTFLHTVYCQDGSPSVGLSEAYDEDQLFFFDFSQNTRVPRLPEFADWAQEQGDAPAILFDKEFCEWMIQQIGPKLDGKIPVSRVNWQHHSVPVEGFGPTFVSAVDGLSFQAFSYLNFTPEPSDIFSCIVTHEIDRYTAIAYWVPRNALPSDLLENVLCGVAFGLGVLGIIVGIVLIIYFRKPCSGD

SEQ ID NO: 67614 - protein, 35 aa, Homo sapiens
MAFSGCQAPYLSPVCCGLSDGLQWKRHCLPLQPSV

SEQ ID NO: 67615 - protein, 135 aa, Homo sapiens
MASDEGKLFVGGLSFDTNEQSLEQVFSKYGQISEVVVVKDRETQRSRGFGFVTFENIDDAKDAMMAMNGKVRIRVLSRSPVSRMGHPPANPSRPLSPVCRWTADPSRPGRRRGPRLWGEPVRVQEWGLRRLQRLL

SEQ ID NO: 67616 - protein, 98 aa, Homo sapiens
MPLRDKYCQTDHHHHGCCEPVYILEPGDPPLLQQPLQTSKSGIQQIIECFRSGTKQLKHILLKDVDTIFECKLCRSLFRGLPNLITHKKFYCPPSLQM

SEQ ID NO: 67617 - protein, 129 aa, Homo sapiens
MDIAIHHPWIRRPFFPFHSPSRLFDQFFGEHLLESDLFPTSTSLSPFYLRPPSFLRAPSWFDTGLSEMRLEKDRFSVNLDVKHFSPEELKVKVLGDVIEVHGKHEERQDEHGFISREFHRKYRIPADVD

SEQ ID NO: 67618 - protein, 571 aa, Homo sapiens
MGGLEKKKYERGSATNYITRNKARKKLQLSLADFRRLCILKGIYPHEPKHKKKVNKGSTAARTFYLIKDIRFLLHEPIVNKFREYKVFVRKLRKAYGKSEWNTVERLKDNKPNYKLDHIIKERYPTFIDALRDLDDALSMCFLFSTFPRTGKCHVQTIQLCRRLTVEFMHYIIAARALRKVFLSIKGIYYQAEHPTDVDYRVMATFTEFYTTLLGFVNFRLYQLLNLHYPPKLEGQAQAEAKAGEGTYALDSESCMEKLAALSASLARVVVPATEEEAEVDEFPTDGEMSAQEEDRRKELEAQEKHKKLFEGLKFFLNREVPREALAFIIRSFGGEVSWDKSLCIGATYDVTDSRITHQIVDRPGQQTSVIGRCYVQPQWVFDSVNARLLLPVAEYFSGVQLPPHLSPFVTEKEGDYVPPEKLKLLALQRGEDPGNLNESEEEEEEDDNNEGDGDEEGENEEEEEDAEAGSEKEEEARLAALEEQRMEGKKPRVMAGTLKLEDKQRLAQEEESEAKRLAIMMMKKREKYLYQKIMFGKRRKIREANKLAEKRKAHDEAVRSEKKAKKARPE

SEQ ID NO: 67619 - protein, 34 aa, Homo sapiens
MAERKSSSSRTGSKELLWSSEHRSQPELSGGKSA

SEQ ID NO: 67620 - protein, 100 aa, Homo sapiens
  MOD_RES (1)..(1): Any amino acid
XEKHEWVTTENGIGTVGISNFAQEALGDVVYCSLPEVGTKLNKQGEVTEINEALAENPGLVNKSCYEDGWLIKMTLSNPSELDELMSEEAYEKYIKSIEE

SEQ ID NO: 67621 - protein, 384 aa, Homo sapiens
MAERPGSPGSREMRLLTFRDIAIEFSLEEWQCLDCAQQNLYRDVMLENYRNLVSLGIADSKPDLITCLEQNKEAWNIKRNEMVAKHPVTCSHFTQDLHPEQGIKHSLQKVIPRTYGKCGHENLQFKKCCKSVGECEVHKGGYNEVKQCLSNTQNKIFQTHKCVIVFGKFSNCNRHETRYTGKKHFKCKKYGKSFCMPSHLNQHQIIHTKEKSYKCEECGKSFKRSSNCTTHKRIHTGEKPYRCEECGKAFRWPSNLTRHKRIHTGEKPYTCEECGQAFRRSSTLTNHKRIHTGERPYKCEECGKAFSVSSTLNDHKRIHTGEKPYTCEECGRAFNCSSTLKTHKRIHTGEKPYKCEECDKAFKRHSSLAKHKIIHTGEKPYKSK

SEQ ID NO: 67622 - protein, 121 aa, Homo sapiens
IEMFMEKLQDEDEGTYTFQLQDGKATNHSTVVLVGDVFKKLQKEAEFQRQEWIRKQGPHFVEYLSWEVTGECNVLLKCKVANIKKETHIVWYKDEREISVDEKHDFKDGICTLLITEPLRN

SEQ ID NO: 67623 - protein, 1903 aa, Homo sapiens
MASGLGSPSPCSAGSEEEDMDALLNNSLPPPHPENEEDPEEDLSETETPKLKKKKKPKKPRDPKIPKSKRQKKELGDSSGEGPEFVEEEEEVALRSDSEGSDYTPGKKKKKKLGPKKEKKSKSKRKEEEEEEDDDDDSKEPKSSAQLLEDWGMEDIDHVFSEEDYRTLTNYKAFSQFVRPLIAAKNPKIAVSKMMMVLGAKWREFSTNNPFKGSSGASVAAAAAAAVAVVESMVTATEVAPPPPPVEVPIRKAKTKEGKGPNARRKPKGSPRVPDAKKPKPKKVAPLKIKLGGFGSKRKRSSSEDDDLDVESDFDDASINSYSVSDGSTSRSSRSRKKLRTTKKKKKGEEEVTAVDGYETDHQDYCEVCQQGGEIILCDTCPRAYHMVCLDPDMEKAPEGKWSCPHCEKEGIQWEAKEDNSEGEEILEEVGGDLEEEDDHHMEFCRVCKDGGELLCCDTCPSSYHIHCLNPPLPEIPNGEWLCPRCTCPALKGKVQKILIWKWGQPPSPTPVPRPPDADPNTPSPKPLEGRPERQFFVKWQGMSYWHCSWVSELQLELHCQVMFRNYQRKNDMDEPPSGDFGGDEEKSRKRKNKDPKFAEMEERFYRYGIKPEWMMIHRILNHSVDKKGHVHYLIKWRDLPYDQASWESEDVEIQDYDLFKQSYWNHRELMRGEEGRPGKKLKKVKLRKLERPPETPTVDPTVKYERQPEYLDATGGTLHPYQMEGLNWLRFSWAQGTDTILADEMGLGKTVQTAVFLYSLYKEGHSKGPFLVSAPLSTIINWEREFEMWAPDMYVVTYVGDKDSRAIIRENEFSFEDNAIRGGKKASRMKKEASVKFHVLLTSYELITIDMAILGSIDWACLIVDEAHRLKNNQSKFFRVLNGYSLQHKLLLTGTPLQNNLEELFHLLNFLTPERFHNLEGFLEEFADIAKEDQIKKLHDMLGPHMLRRLKADVFKNMPSKTELIVRVELSPMQKKYYKYILTRNFEALNARGGGNQVSLLNVVMDLKKCCNHPYLFPVAAMEAPKMPNGMYDGSALIRASGKLLLLQKMLKNLKEGGHRVLIFSQMTKMLDLLEDFLEHEGYKYERIDGGITGNMRQEAIDRFNAPGAQQFCFLLSTRAGGLGINLATADTVIIYDSDWNPHNDIQAFSRAHRIGQNKKVMIYRFVTRASVEERITQVAKKKMMLTHLVVRPGLGSKTGSMSKQELDDILKFGTEELFKDEATDGGGDNKEGEDSSVIHYDDKAIERLLDRNQDETEDTELQGMNEYLSSFKVAQYVVREEEMGEEEVEREIIKQEESVDPDYWEKLLRHHYEQQQEDLARNLGKGKRIRKQVNYNDGSQEDRDWQDDQSDNQSDYSVASEEGDEDFDERSEAPRRPSRKGLRNDKDKPLPPLLARVGGNIEVLGFNARQRKAFLNAIMRYGMPPQDAFTTQWLVRDLRGKSEKEFKAYVSLFMRHLCEPGADGAETFADGVPREGLSRQHVLTRIGVMSLIRKKVQEFEHVNGRWSMPELAEVEENKKMSQPGSPSPKTPTPSTPGDTQPNTPAPVPPADGIKIEENSLKEEESIEGEKEVKSTAPETAIECTQAPAPASEDEKVVVEPPEGEEKVEKAEVKERTEEPMETEPKGAADVEKVEEKSAIDLTPIVVEDKEEKKEEEEKKEVMLQNGETPKDLNDEKQKKNIKQRFMFNIADGGFTELHSLWQNEERAATVTKKTYEIWHRRHDYWLLAGIINHGYARWQDIQNDPRYAILNEPFKGEMNRGNFLEIKNKFLARRFKLLEQALVIEEQLRRAAYLNMSEDPSHPSMALNTRFAEVECLAESHQHLSKESMAGNKPANAVLHKVLKQLEELLSDMKADVTRLPATIARIPPVAVRLQMSERNILSRLANRAPEPTPQQVAQQQ

SEQ ID NO: 67624 - protein, 351 aa, Homo sapiens
MVPFIYLQAHFTLCSGWSSTYRDLRKGVYVPYTQGKWEGELGTDLVSIPHGPNVTVRANIAAITESDKFFINGSNWEGILGLAYAEIARPDDSLEPFFDSLVKQTHVPNLFSLQLCGAGFPLNQSEVLASVGGSMIIGGIDHSLYTGSLWYTPIRREWYYEVIIVRVEINGQDLKMDCKEYNYDKSIVDSGTTNLRLPKKVFEAAVKSIKAASSTEKFPDGFWLGEQLVCWQAGTTPWNIFPVISLYLMGEVTNQSFRITILPQQYLRPVEDVATSQDDCYKFAISQSSTGTVMGAVIMEGFYVVFDRARKRIGFAVSACHGESARAEGLGSVSPYFPCQTTVSIPGSLSV

SEQ ID NO: 67625 - protein, 267 aa, Homo sapiens
  MOD_RES (1)..(1): Any amino acid
XTESEEESSEMDDEDYERRRSECVSEMLDLEKQFSELKEKLFRERLSQLRLRLEEVGAERAPEYTEPLGGLQRSLKIRIQVAGIYKGFCLDVIRNKYECELQGAKQHLESEKLLLYDTLQGELQERIQRLEEDRQSLDLSSEWWDDKLHARGSSRSWDSLPPSKRKKAPLVSGPYIVYMLQEIDILEDWTAIKKDLDPAVHSQGDPQSSWHCTQDSRLPPADRRTHRPLRVCPARLLWCCWALPLHLALAWTPPLPSSRPAQLWPWS

SEQ ID NO: 67626 - protein, 535 aa, Homo sapiens
MIHVRRHETRRNSKSHVPEQKSRVDWRRTKRSSISQLLDSDEELDSEEFDSDEELDSDESFENDEELDSNKGPDCNKTPGSERELNLSKIQSEGNDSKCLINSGNGSTYEEETNKIKHRNIDLQDQEKHLSQEDNDLNKQTGQIIEDDQEKHLSQEDNDLNKQTGQIIEDDLEEEDIKRGKRKRLSSVMCDSDESDDSDILVRKVGVKRPRRVVEDEGSSVEMEQKTPEKTLAAQKREKLQKLKELSKQRSRQRRSSGRDFEDSEKESCPSSDEVDEEEEEDNYESDEDGDDYIIDDFVVQDEEGDEENKNQQGEKLTTSQLKLVKQNSLYSFSDHYTHFERVVKALLINALDESFLGTLYDGTRQKSYAKDMLTSLHYLDNRFVQPRLESLVSRSRWKEQYKERVENYSNVSIHLKNPENCSCQACGLHRYCKYSVHLSGELYNTRTMQIDNFMSHDKQVFTVGRICASRTRIYHKLKHFKFKLYQECCTIAMTEEVEDEQVKETVERIFRRSKENGWIKESIGLTSACLLPIL

SEQ ID NO: 67627 - protein, 68 aa, Homo sapiens
  MOD_RES (1)..(1): Any amino acid
XFYRDVLGMKVQAGADRGWRARLEPAPEPALAEGGENGCVVNLSRRVSDLRPCAVFSFRSVASCRWGS

SEQ ID NO: 67628 - protein, 787 aa, Homo sapiens
  MOD_RES (1)..(1): Any amino acid
XTVLALGALAGVGVGGPNICTTRGVSSCQQCLAVSPMCAWCSDEALPLGSPRCDLKENLLKDNCAPESIEFPVSEARVLEDRPLSDKGSGDSSQVTQVSPQRIALRLRPDDSKNFSIQVRQVEDYPVDIYYLMDLSYSMKDDLWSIQNLGTKLATQMRKLTSNLRIGFGAFVDKPVSPYMYISPPEALENPCYDMKTTCLPMFGYKHVLTLTDQVTRFNEEVKKQSVSRNRDAPEGGFDAIMQATVCDEKIGWRNDASHLLVFTTDAKTHIALDGRLAGIVQPNDGQCHVGSDNHYSASTTMDYPSLGLMTEKLSQKNINLIFAVTENVVNLYQNYSELIPGTTVGVLSMDSSNVLQLIVDAYGKIRSKVELEVRDLPEELSLSFNATCLNNEVIPGLKSCMGLKIGDTVSFSIEAKVRGCPQEKEKSFTIKPVGFKDSLIVQVTFDCDCACQAQAEPNSHRCNNGNGTFECGVCRCGPGWLGSQCECSEEDYRPSQQDECSPREGQPVCSQRGECLCGQCVCHSSDFGKITGKYCECDDFSCVRYKGEMCSGHGQCSCGDCLCDSDWTGYYCNCTTRTDTCMSSNGLLCSGRGKCECGSCVCIQPGSYGDTCEKCPTCPDACTFKKECVECKKFDRGALHDENTCNRYCRDEIESVKELKDTGKDAVNCTYKNEDDCVVRFQYYEDSSGKSILYVVEEPECPKGPDILVVLLSVMGAILLIGLAALLIWKLLITIHDRKEFAKFEEERARAKWDTEILLYYCSFILVHQSLESLRTEFTSKQKDGN

SEQ ID NO: 67629 - protein, 310 aa, Homo sapiens
MVDSTEYEVASQPEVETSPLGDGASPGPEQVKLKKEISLLNGVCLIVGNMIGSGIFVSPKGVLIYSASFGLSLVIWAVGGLFSVFGALCYAELGTTIKKSGASYAYILEAFGGFLAFIRLWTSLLIIEPTSQAIIAITFANYMVQPLFPSCFAPYAASRLLAAACICLLTFINCAYVKWGTLVQDIFTYAKVLALIAVIVAGIVRLGQGASTHFENSFEGSSFAVGDIALALYSALFSYSGWDTLNYVTEEIKNPERNLPLSIGISMPIVTIIYILTNVAYYTVLDMRDILASDAVAVAFLCGLKRRPSP

SEQ ID NO: 67630 - protein, 162 aa, Homo sapiens
MASLMPPYPLEGKGVRGRCGPPYSIRPLGVQQPGARFFAAAALPPRTTTRQASCGHTPGGFRQATPTRPLPFPCFGQWRSYEWHDLLELGSLQLGCAWKLGKTLLEGEAGRECWRLWGDGFRTSSNHPLSLESADHSSANWLGDVAGCHFPVGLCGTLLPGD

SEQ ID NO: 67631 - protein, 81 aa, Homo sapiens
MGRTVVVLGGGISGLAASYHLSRAPCPPKVVLVESSERLGGWIRSVRGPNGAIFELGPRGIRPAGALGARTLLLGMWRAGF

SEQ ID NO: 67632 - protein, 703 aa, Homo sapiens
MGKSESQMDITDINTPKPKKKQRWTPLEISLSVLVLLLTIIAVTMIALYATYDDGICKSSDCIKSAARLIQNMDATTEPCTDFFKYACGGWLKRNVIPETSSRYGNFDILRDELEVVLKDVLQEPKTEDIVAVQKAKALYRSCINESAIDSRGGEPLLKLLPDIYGWPVATENWEQKYGASWTAEKAIAQLNSKYGKKVLINLFVGTDDKNSVNHVIHIDQPRLGLPSRDYYECTGIYKEACTAYVDFMISVARLIRQEERLPIDENQLALEMNKVMELEKEIANATAKPEDRNDPMLLYNKMTLAQIQNNFSLEINGKALYGTTSETATWRRCANYVNGNMENAVGRLYVEAAFAGESKHVVEDLIAQIREVFIQTLDDLTWMDAETKKRAEEKALAIKERIGYPDDIVSNDNKLNNEYLELNYKEDEYFENIIQNLKFSQSKQLKKLREKVDKDDYKNYFCTLSSALSFFRAIRDRRETPGSSVRWISGAAVVNAFYSSGRNQIVFPAGILQPPFFSAQQSNSLNYGGIGMVIGHEITHGFDDNGRNFNKDGDLVDWWTQQSASNFKEQSQCMVYQYGNFSWDLAGGQHLNGINTLGENIADNGGLGQAYRAYQNYIKKNGEEKLLPGLDLNHKQLFFLNFAQVWCGTYRPEYAVNSIKTDVHSPGNFRIIGTLQNSAEFSEAFHCRKNSYMNPEKKCRVW

SEQ ID NO: 67633 - protein, 12 aa, Homo sapiens
MTTPSLTPFTPS

SEQ ID NO: 67634 - protein, 47 aa, Homo sapiens
  MOD_RES (1)..(1): Any amino acid
XPNISLDVLQPSFPEILLESHMVMIRKVGMDPLWEMEACLGEVKQVS

SEQ ID NO: 67635 - protein, 340 aa, Homo sapiens
MLLPLLRSSCFPSSSPGGGGGSGGGGGGGDPGAESRPAAQLQRGAHGPPGPLQRAEAEPGADPPRAAEAEGAPGPGARSRGAGGGGRRAEREPHACMDPGAALQRRAGGGGGLGAGSPALSGGQGRRRKQPPRPADFKLQVIIIGSRGVGKTSLMERFTDDTFCEACKSTVGVDFKIKTVELRGKKIRLQIWDTAGQERFNSITSAYYRSAKGIILVYDITKKETFDDLPKWMKMIDKYASEDAELLLVGNKLDCETDREITRQQGEKFAQQITGMRFCEASAKDNFNVDEIFLKLVDDILKKMPLDILRNELSNSILSLQPEPEIPPELPPPRPHVRCC

SEQ ID NO: 67636 - protein, 190 aa, Homo sapiens
MALNNFLFAQCACYFLAFLFSFVVVVPLSENGHDFRGRCLLFTEGMWLSANLTVQERERFTVQEWGPPAACRFSLLASLLSLLLAAAHAWRTLFFLCKGHEGSFFSAFLNLLVSAFVVFLVFIASTIVSVGFTMWCDTITEKGTVPHSCEELQDIDLELGVDNSAFYDQFAIAQGSLIDSHGVETPPGQS

SEQ ID NO: 67637 - protein, 568 aa, Homo sapiens
MKNKIQVVVLENEGLQQQLKSQRQEETLREQTLLDASGNMHNSWITTGEDSGVGETSKRPFSHDNADFGKAASAGEQLELEKLKLTYEEKCEIEESQLKFLRNDLAEYQRTCEDLKEQLKHKEFLLAANTCNRVGGLCLKCAQHEAVLSQTHTNVHMQTIERLVKERDDLMSALVSVRSSLADTQQREASAYEQVKQVLQISEEANFEKTKALIQCDQLRKELERQAERLEKELASQQEKRAIEKDMMKKEITKEREYMGSKMLILSQNIAQLEAQVEKVTKEKISAINQLEEIQSQLASREMDVTKVCGEMRYQLNKTNMEKDEAEKEHREFRAKTNRDLEIKDQEIEKLRIELDESKQHLEQEQQKAALAREECLRLTELLGESEHQLHLTRQEKDSIQQSFSKEAKAQALQAQQREQELTQKIQQMEAQHDKTENEQYLLLTSQNTFLTKLKEECCTLAKKLEQISQKTRSEIAQLSQEKRYTYDKLGKLQRRNEELEEQCVQHGRVHETMKQRLRQLDKHSQATAQQLVQLLSKQNQLLLERQSLSEEVDRLRTQLPSMPQSDC

SEQ ID NO: 67638 - protein, 98 aa, Homo sapiens
MAQGLVTFADVAIDFSQEEWACLNSAQRDLYWDVMLENYSNLVSLDLESAYENKSLPTEKNIHEIRASKRNSDRRSKSLGRNWICEGTLERPQRSRGR

SEQ ID NO: 67639 - protein, 154 aa, Homo sapiens
MSSAEIIGSTNLIILLEDEVFADFFNTFLSLPVFGQTPFYTVENSQWSLWPEIPCNLIAKYKGLLTWLEKCRLPFFCKTNLCFHYILCQEFISFIKSPEGEARVSLLKSNWWWCWRDSQEDDEIGSTRNLFPHLDNNCTGRICMICSVPGMMSF

SEQ ID NO: 67640 - protein, 112 aa, Homo sapiens
MEADLSGFNIDAPRWDQRTFLGRVKHFLNITDPRTVFVSERELDWAKVMVEKSRMGVVPPGTQVEQLLYAKKLYDSAFHPDTGEKMNVIGRMSFQLPGGMIITGFMLQFYSY

SEQ ID NO: 67641 - protein, 132 aa, Homo sapiens
  MOD_RES (1)..(1): Any amino acid
XREFCWDAYSKAAGSRASSPLPRQDRDSFCHQMSFCLTELHLWSLKNTLHIADRDIGIYQYYDKKDPPATEHGNLEKKQKLAESRDYPWTLKNRRPEKLRDSLKELEELMQNSRCVLSKWKNKYVCQVCWCL

SEQ ID NO: 67642 - protein, 252 aa, Homo sapiens
MIPPSSPREDGVDGLPKEAVGAEQPPSPASTSSQESKTKSLRSKSADNFFQRTNSEDMKLQAHMVAEISPSSSPLPAPGSLTSTPARAGLHPGGKAHAFQEYIFKKPTFCDVCNHMIVACGNKVDPVYETLRFGTSLAQRTKKGSSGSGSDSPHRTSTSDLVEVPEEANGPGGGYDLRKRSNSVFTYPENGTDDFRDPAKNINHQGSLSKDPLQMNTYVALYKFVPQENEDLEMRPGDIITLLEDSNEDWWK

SEQ ID NO: 67643 - protein, 378 aa, Homo sapiens
MADPKYADLPGIEELTSTSVEHIIVNPNAAYDKFKDKRVGTKGLDFSDRIGKTKRTGYESGEYEMLGEGLGVKETPQQKYQRLLHEVQELTTEVEKIKTTVKESATEEKLTPVLLAKQLAALKQQLVASHLEKLLGPDAAINLTDPDGALAKRLLLQLEATKNSKGGSGGKTTGTPPDSSLVTYELHSRPEQDKFSQAAKVAELEKRLTELETAVRCDQDAQNPLSAGLQGACLMETVELLQAKVSALDLAVLDQVEARLQSVLGKVNEIAKHKASVEDADTQSKVHQLYETIQRWSPIASTLPELVQRLVTIKQLHEQAMQFGQLLTHLDTTQQMIANSLKDNTTLLTQVQTTMRENLATVEGNFASIDERMKKLGK

SEQ ID NO: 67644 - protein, 427 aa, Homo sapiens
MAHCVTLVQLSISCDHLIDKDIGSKSDPLCVLLQDVGGGSWAELGRTERVRNCSSPEFSKTLQLEYRFETVQKLRFGIYDIDNKTPELRDDDFLGGAECSLGQIVSSQVLTLPLMLKPGKPAGRGTITVSAQELKDNRVVTMEVEARNLDKKDFLGKSDPFLEFFRQGDGKWHLVYRSEVIKNNLNPTWKRFSVPVQHFCGGNPSTPIQVQCSDYDSDGSHDLIGTFHTSLAQLQAVPAEFECIHPEKQQKKKSYKNSGTIRVKICRVETEYSFLDYVMGGCQINFTVGVDFTGSNGDPSSPDSLHYLSPTGVNEYLMALWSVGSVVQDYDSDKLFPAFGFGAQVPPDWQVSHEFALNFNPSNPYCAGIQGIVDAYRQALPQVRLYGPTNFAPIINHVARFAAQAAHQGTASDMNGLVPSNTSCCCC

SEQ ID NO: 67645 - protein, 265 aa, Homo sapiens
MRLLPRLLLLLLLVFPATVLFRGGPRGLLAVAQDLTEDEETVEDSIIEDEDDEAEVEEDEPTDLVEDKEEEDVSGEPEASPSADTTILFVKGEDFPANNIVKFLVGFTNKGTEDFIVESLDASFRYPQDYQFYIQNFTALPLNTVVPPQRQATFEYSFIPAEPMGGRPFGLVINLNYKDLNGNVFQDAVFNQTVTVIEREDGLDGETIFMYMFLAGLGLLVIVGLHQLLESRKSGSFIQDGVQWHNLAYCNLRLRGSSHPPTSAS

SEQ ID NO: 67646 - protein, 53 aa, Homo sapiens
MGNSDSQYTLQGSKNHSNTITGAKQIPCSLKIRGIHAKEEKSLHGWGHGSNGA

SEQ ID NO: 67647 - protein, 1001 aa, Homo sapiens
MKIPNIGNVMNKFEILGVVGEGAYGVVLKCRHKETHEIVAIKKFKDSEENEEVKETTLRELKMLRTLKQENIVELKEAFRRRGKLYLVFEYVEKNMLELLEEMPNGVPPEKVKSYIYQLIKAIHWCHKNDIVHRDIKPENLLISHNDVLKLCDFGFARNLSEGNNANYTEYVATRWYRSPELLLGAPYGKSVDMWSVGCILGELSDGQPLFPGESEIDQLFTIQKVLGPLPSEQMKLFYSNPRFHGLRFPAVNHPQSLERRYLGILNSVLLDLMKNLLKLDPADRYLTEQCLNHPTFQTQRLLDRSPSRSAKRKPYHVESSTLSNRNQAGKSTALQSHHRSNSKDIQNLSVGLPRADEGLPANESFLNGNLAGASLSPLHTKTYQASSQPGSTSKDLTNNNIPHLLSPKEAKSKTEFDFNIDPKPSEGPGTKYLKSNSRSQQNRHSFMESSQSKAGTLQPNEKQSRHSYIDTIPQSSRSPSYRTKAKSHGALSDSKSVSNLSEARAQIAEPSTSRYFPSSCLDLNSPTSPTPTRHSDTRTLLSPSGRNNRNEGTLDSRRTTTRHSKTMEELKLPEHMDSSHSHSLSAPHESFSYGLGYTSPFSSQQRPHRHSMYVTRDKVRAKGLDGSLSIGQGMAARANSLQLLSPQPGEQLPPEMTVARSSVKETSREGTSSFHTRQKSEGGVYHDPHSDDGTAPKENRHLYNDPVPRRVGSFYRVPSPRPDNSFHENNVSTRVSSLPSESSSGTNHSKRQPAFDPWKSPENISHSEQLKEKEKQGFFRSMKKKKKKSQTTDSTNGENPSIKKSLFPLFNSKNHLKHSSSLKKLPVVTPPMVPNSDSPDLLTLQKSIHSASTPSSRPKEWRPEKISDLQTQSQPLKSLRKLLHLSSASNHPASSDPRFQPLTAQQTKNSFSEIRIHPLSQASGGSSNIRQEPAPKGRPALQLPGQMDPGWHVSSVTRSATEGPSYSEQLGAKSGPNGHPYNRTNRSRMPNLNDLKETAL

SEQ ID NO: 67648 - protein, 272 aa, Homo sapiens
MLSLGAHSVTKTQILQGLGFNLTHTPESAIHQGFQHLVHSLTVPSKDLTLKMGSALFVKKELQLQANFLGNVKRLYEAEVFSTDFSNPSIAQARINSHVKKKTQGKVVDIIQGLDLLTAMVLVNHIFFKAKWEKPFHPEYTRKNFPFLVGEQVTVHVPMMHQKEQFAFGVDTELNCFVLQMDYKGDAVAFFVLPSKGKMRQLEQALSARTLRKWSHSLQKRWIEVFIPRFSISASYNLETILPKMGIQNVFDKNADFSGIAKRDSLQVSKVS

SEQ ID NO: 67649 - protein, 2792 aa, Homo sapiens
MTSIHFVVHPLPGTEDQLNDRLREVSEKLNKYNLNSHPPLNVLEQATIKQCVVGPNHAAFLLEDGRVCRIGFSVQPDRLELGKPDNNDGSKLNSNSGAGRTSRPGRTSDSPWFLSGSETLGRLAGNTLGSRWSSGVGGSGGGSSGRSSAGARDSRRQTRVIRTGRDRGSGLLGSQPQPVIPASVIPEELISQAQVVLQGKSRSVIIRELQRTNLDVNLAVNNLLSRDDEDGDDGDDTASESYLPGEDLMSLLDADIHSAHPSVIIDADAMFSEDISYFGYPSFRRSSLSRLGSSRERDSELLRERESVLRLRERRWLDGASFDNERGSTSKEGEPNLDKKNTPVQSPVSLGEDLQWWPDKDGTKFICIGALYSELLAVSSKGELYQWKWSESEPYRNAQNPSLHHPRATFLGLTNEKIVLLSANSIRATVATENNKVATWVDETLSSVASKLEHTAQTYSELQGERIVSLHCCALYTCAQLENSLYWWGVVPFSQRKKMLEKARAKNKKPKSSAGISSMPNITVGTQVCLRNNPLYHAGAVAFSISAGIPKVGVLMESVWNMNDSCRFQLRSPESLKNMEKASKTTEAKPESKQEPVKTEMGPPPSPASTCSDASSIASSASMPYKRRRSTPAPKEEEKVNEEQWSLREVVFVEDVKNVPVGKVLKVDGAYVAVKFPGTSSNTNCQNSSGPDADPSSLLQDCRLLRIDELQVVKTGGTPKVPDCFQRTPKKLCIPEKTEILAVNVDSKGVHAVLKTGNWVRYCIFDLATGKAEQENNFPTSSIAFLGQNERNVAIFTAGQESPIILRDGNGTIYPMAKDCMGGIRDPDWLDLPPISSLGMGVHSLINLPANSTIKKKAAVIIMAVEKQTLMQHILRCDYEACRQYLMNLEQAVVLEQNLQMLQTFISHRCDGNRNILHACVSVCFPTSNKETKEEEEAERSERNTFAERLSAVEAIANAISVVSSNGPGNRAGSSSSRSLRLREMMRRSLRAAGLGRHEAGASSSDHQDPVSPPIAPPSWVPDPPAMDPDGDIDFILAPAVGSLTTAATGTGQGPSTSTIPGPSTEPSVVESKDRKANAHFILKLLCDSVVLQPYLRELLSAKDARGMTPFMSAVSGRAYPAAITILETAQKIAKAEISSSEKEEDVFMGMVCPSGTNPDDSPLYVLCCNDTCSFTWTGAEHINQDIFECRTCGLLESLCCCTECARVCHKGHDCKLKRTSPTAYCDCWEKCKCKTLIAGQKSARLDLLYRLLTATNLVTLPNSRGEHLLLFLVQTVARQTVEHCQYRPPRIREDRNRKTASPEDSDMPDHDLEPPRFAQLALERVLQDWNALKSMIMFGSQENKDPLSASSRIGHLLPEEQVYLNQQSGTIRLDCFTHCLIVKCTADILLLDTLLGTLVKELQNKYTPGRREEAIAVTMRFLRSVARVFVILSVEMASSKKKNNFIPQPIGKCKRVFQALLPYAVEELCNVAESLIVPVRMGIARPTAPFTLASTSIDAMQGSEELFSVEPLPPRPSSDQSSSSSQSQSSYIIRNPQQRRISQSQPVRGRDEEQDDIVSADVEEVEVVEGVAGEEDHHDEQEEHGEENAEAEGQHDEHDEDGSDMELDLLAAAETESDSESNHSNQDNASGRRSVVTAATAGSEAGASSVPAFFSEDDSQSNDSSDSDSSSSQSDDIEQETFMLDEPLERTTNSSHANGAAQAPRSMQWAVRNTQHQRAASTAPSSTSTPAASSAGLIYIDPSNLRRSGTISTSAAAAAAALEASNASSYLTSASSLARAYSIVIRQISDLMGLIPKYNHLVYSQIPAAVKLTYQDAVNLQNYVEEKLIPTWNWMVSIMDSTEAQLRYGSALASAGDPGHPNHPLHASQNSARRERMTAREEASLRTLEGRRRATLLSARQGMMSARGDFLNYALSLMRSHNDEHSDVLPVLDVCSLKHVAYVFQALIYWIKAMNQQTTLDTPQLERKRTRELLELGIDNEDSEHENDDDTNQSATLNDKDDDSLPAETGQNHPFFRRSDSMTFLGCIPPNPFEVPLAEAIPLADQPHLLQPNARKEDLFGRPSQGLYSSSASSGKCLMEVTVDRNCLEVLPTKMSYAANLKNVMNMQNRQKKEGEEQPVLPEETESSKPGPSAHDLAAQLKSSLLAEIGLTESEGPPLTSFRPQCSFMGMVISHDMLLGRWRLSLELFGRVFMEDVGAEPGSILTELGGFEVKESKFRREMEKLRNQQSRDLSLEVDRDRDLLIQQTMRQLNNHFGRRCATTPMAVHRVKVTFKDEPGEGSGVARSFYTAIAQAFLSNEKLPNLECIQNANKGTHTSLMQRLRNRGERDREREREREMRRSSGLRAGSRRDRDRDFRRQLSIDTRPFRPASEGNPSDDPEPLPAHRQALGERLYPRVQAMQPAFASKITGMLLELSPAQLLLLLASEDSLRARVDEAMELIIAHGRENGADSILDLGLVDSSEKVQENRKRHGSSRSVVDMDLDDTDDGDDNAPLFYQPGKRGFYTPRPGKNTEARLNCFRNIGRILGLCLLQNELCPITLNRHVIKVLLGRKVNWHDFAFFDPVMYESLRQLILASQSSDADAVFSAMDLAFAIDLCKEEGGGQVELIPNGVNIPVTPQNVYEYVRKYAEHRMLVVAEQPLHAMRKGLLDVLPKNSLEDLTAEDFRLLVNGCGEVNVQMLISFTSFNDESGENAEKLLQFKRWFWSIVEKMSMTERQDLVYFWTSSPSLPASEEGFQPMPSITIRPPDDQHLPTANTCISRLYVPLYSSKQILKQKLLLAIKTKNFGFV

SEQ ID NO: 67650 - protein, 141 aa, Homo sapiens
MDPGKDKEGVPQPSGPPARKKFVIPLDEDEVPPGVAKPLFRSTQSLPTVDTSAQAAPQTYAEYAISQPLEGAGATCPTGSEPLAGETPNQALKPGAKSNSIIVSPRQRGNPVLKFVRNVPWEFGDVIPDYVLGQSTCALFL

SEQ ID NO: 67651 - protein, 269 aa, Homo sapiens
MLTAACSKFGGSSPLRDSTTLGKAGTKKPYSVGSDLSASKTMGDAYPAPFTSTNGLLSPAGSPPAPTSGYANDYPPFSHSFPGPTGTQDPGLLVPKGHSSSDCLPSVYTSLDMTHPYGSWYKAGIHAGISPGPGNTPTPWWDMHPGGNWLGGGQGQGDGLQGTLPTGPAQPPLNPQLPTYPSDFAPLNPAPYPAPHLLQPGPQHVLPQDVYKPKAVGNSGQLEGSGGAKPPRGASTGGSGGYGGSGAGRSSCDCPNCQELERLGAAAAG

SEQ ID NO: 67652 - protein, 14 aa, Homo sapiens
MAWPNVFQRGSLLS

SEQ ID NO: 67653 - protein, 19 aa, Homo sapiens
MTERFDCHHCNESLFGKKY

SEQ ID NO: 67654 - protein, 55 aa, Homo sapiens
MAQTPDGISCELRGTATMESLPAAHHLPPAEGGLHVQLPGGPGHGAAGDTPSGHL

SEQ ID NO: 67655 - protein, 222 aa, Homo sapiens
MEPTAPSLTEEDLTEVKKDALENLRVYLCEKIIAERHFDHLRAKKILSREDTEEISCRTSSRKRAGKLLDYLQENPKGLDTLVESIRREKTQNFLIQKITDEVLKLRNIKLEHLKDGATNNLSRSNSDESNFSEKLRASTVMYHPEGESSTTPFFSTNSSLNLPVLEVGRTENTIFSSTTLPRPGDPGAPPLPPDLQLEEEGTCANSSEMFLPLRSRTVSRQ

SEQ ID NO: 67656 - protein, 588 aa, Homo sapiens
MLHLHHSCLCFRSWLPAMLAVLLSLAPSASSDISASRPNILLLMADDLGIGDIGCYGNNTMRTPNIDRLAEDGVKLTQHISAASLCTPSRAAFLTGRYPVRSGMVSSIGYRVLQWTGASGGLPTNETTFAKILKEKGYATGLIGKWHLGLNCESASDHCHHPLHHGFDHFYGMPFSLMGDCARWELSEKRVNLEQKLNFLFQVLALVALTLVAGKLTHLIPVSWMPVIWSALSAVLLLASSYFVGALIVHADCFLMRNHTITEQPMCFQRTTPLILQEVASFLKRNKHGPFLLFVSFLHVHIPLITMENFLGKSLHGLYGDNVEEMDWMVGRILDTLDVEGLSNSTLIYFTSDHGGSLENQLGNTQYGGWNGIYKGGKGMGGWEGGIRVPGIFRWPGVLPAGRVIGEPTSLMDVFPTVVRLAGGEVPQDRVIDGQDLLPLLLGTAQHSDHEFLMHYCERFLHAARWHQRDRTMWKVHFVTPVFQPEGAGACYGRKVCPCFGEKVVHHDPPLLFDLSRDPSETHILTPASEPVFYQVMERVQQAVWEHQRTLSPVPLQLDRLGNIWRPWLQPCCGPFPLCWCLREDDPQ

SEQ ID NO: 67657 - protein, 407 aa, Homo sapiens
MMDLRNTPAKSLDKFIEDYLLPDTCFRMQINHAIDIICGFLKERCFRGSSYPVCVSKVVKGGSSGKGTTLRGRSDADLVVFLSPLTTFQDQLNRRGEFIQEIRRQLEACQRERAFSVKFEVQAPRWGNPRALSFVLSSLQLGEGVEFDVLPAFDALGQLTGGYKPNPQIYVKLIEECTDLQKEGEFSTCFTELQRDFLKQRPTKLKSLIRLVKHWYQNCKKKLGKLPPQYALELLTVYAWERGSMKTHFNTAQGFRTVLELVINYQQLCIYWTKYYDFKNPIIEKYLRRQLTKPRPVILDPADPTGNLGGGDPKGWRQLAQEAEAWLNYPCFKNWDGSPVSSWILLMRQRLREAESNSADDETDDPRRYQKYGYIGTHEYPHFSHRPSTLQAASTPQAEEDWTCTIL

SEQ ID NO: 67658 - protein, 49 aa, Homo sapiens
METRKKDGTWPSAQLHVMNNNMSEEDEDFKGQPGICGLTNLGNTCFMNS

SEQ ID NO: 67659 - protein, 806 aa, Homo sapiens
MEFSWGSGQESRRLLLLLLLLAAWEAGNGQLHYSVSEEAKHGTFVGRIAQDLGLELAELVPRLFRVASKGRGGLLEVNLQNGILFVNSRIDREELCRRSAECSIHLEVIVDRPLQVFHVDVEVRDINDNPPVFPATQKNLSIAESRPLDSRFPLEGASDADIGENALLTYRLSPNEYFSLEKPPDDELVKGLGLILRKSLDREEAPEIFLVLTATDGGKPELTGTVQLLITVLDANDNAPAFDRTIYKVRLLENVPNGTLVIKLNASDLDEGLNGDIVYSFSNDISPNVKSKFHIDPITGQIIVKGYIDFEESKSYEIIVEGIDKGQLPLSGHCRVIVEVEDNNDNVPDLEFKSLSLPIREDAPLGTVIALISVSDKDMGVNGLVTCSLTSHVPFKLVSTFKNYYSLVLDSALDRESVSAYELVVTARDGGSPSLWATASVSVEVADVNDNAPAFAQPEYTVFVKENNPPGCHIFTVSAWDADAQENALVSYSLVERRVGERALSSYVSVHAESGKVYALQPLDHEELELLQFQVTARDAGVPPLGSNVTLQVFVLDENDNAPALLAPRAGGTGGAVSELVPWSVGVGHVVAKVRAVDADSGYNAWLSYELQPGTGGARIPFRVGLYTGEISTTRALDETDAPRHRLLVLVKDHGEPALTATATVLVSLVESGQAPKASSRALVGAVGPDAALVDVNVYLIIAICAVSSLLVLTLLLYTALRCSALPTEGACAPGKPTLVCSSAVGSWSYSQQRRPRVCSGEGPPKTDLMAFSPSLPDSRDREDQLQTTEESFAKGEDRSWEFPPV

SEQ ID NO: 67660 - protein, 47 aa, Homo sapiens
MTKAQESLTLEDVAVDFTWEEWQFLSPAQKDLYRDVMLENYSNLVSV

SEQ ID NO: 67661 - protein, 153 aa, Homo sapiens
AIIRELGGIPIVANKINHSNQSIKEKALNALNNLSVNVENQIKIKVQVLKLLLNLSENPAMTEGLLRAQVDSSFLSLYDSHVAKEILLRVLTLFQNIKNCLKIEGHLAVQPTFTEGSLFFLLHGEECAQKIRALVDHHDAEVKEKVVTIIPKI

SEQ ID NO: 67662 - protein, 108 aa, Homo sapiens
MSMILSASVIRVRDGLPLSASTDYEQSTGMQECRKYFKMLSRKLAQLPDRCTLKTGHYNINFISSLGVSYMMLCTENYPNVLAFSFLDELQKEFITTYNMMKTNTAVR

SEQ ID NO: 67663 - protein, 256 aa, Homo sapiens
MDRYAQDKSVVNKMQQKYWETKQAFIKATGKKEDEHVVASDADLDAKLELFHSIQRTCLDLSKAIVLYQKRICFLSQEENELGKFLRSQGFQDKTRAGKMMQATGKALCFSSQQRLALRNPLCRFHQEVETFRHRAISDTWLTVNRMEQCRTEYRGALLWMKDVSQELDPDLYKQMEKFRKVQTQVRLAKKNFDKLKMDVCQKVDLLGASRCNLLSHMLATYQTTLLHFWEKTSHTMAAIHESFKGYQPYEFTTLK

SEQ ID NO: 67664 - protein, 3010 aa, Homo sapiens
MDQPQFSGAPRFLTRPKAFVVSVGKDATLSCQIVGNPTPQVSWEKDQQPVAAGARFRLAQDGDLYRLTILDLALGDSGQYVCRARNAIGEAFAAVGLQVDAEAACAEQAPHFLLRPTSIRVREGSEATFRCRVGGSPRPAVSWSKDGRRLGEPDGPRVRVEELGEASALRIRAARPRDGGTYEVRAENPLGAASAAAALVVDSDAADTASRPGTSTAALLAHLQRRREAMRAEGAPASPPSTGTRTCTVTEGKHARLSCYVTGEPKPETVWKKDGQLVTEGRRHVVYEDAQENFVLKILFCKQSDRGLYTCTASNLVGQTYSSVLVVVREPAVPFKKRLQDLEVREKESATFLCEVPQPSTEAAWFKEETRLWASAKYGIEEEGTERRLTVRNVSADDDAVYICETPEGSRTVAELAVQGNLLRKLPRKTAVRVGDTAMFCVELAVPVGPVHWLRNQEEVVAGGRVAISAEGTRHTLTISQCCLEDVGQVAFMAGDCQTSTQFCVSAPRKPPLQPPVDPVVKARMESSVILSWSPPPHGERPVTIDGYLVEKKKLGTYTWIRCHEAEWVATPELTVADVAEEGNFQFRVSALNSFGQSPYLEFPGTVHLAPKLAVRTPLKAVQAVEGGEVTFSVDLTVASAGEWFLDGQALKASSVYEIHCDRTRHTLTIREVPASLHGAQLKFVANGIESSIRMEVRAAPGLTANKPPAAAAREVLARLHEEAQLLAELSDQAAAVTWLKDGRTLSPGPKYEVQASAGRRVLLVRDVARDDAGLYECVSRGGRIAYQLSVQGLARFLHKDMAGSCVDAVAGGPAQFECETSEAHVHVHWYKDGMELGHSGERFLQEDVGTRHRLVAATVTRQDEGTYSCRVGEDSVDFRLRVSEPKVVFAKEQLARRKLQAEAGASATLSCEVAQAQTEVTWYKDGKKLSSSSKVCMEATGCTRRLVVQQAGQADAGEYSCEAGGQRLSFHLDVKEPKVVFAKDQVAHSEVQAEAGASATLSCEVAQAQTEVMWYKDGKKLSSSLKVHVEAKGCRRRLVVQQAGKTDAGDYSCEARGQRVSFRLHITEPKMMFAKEQSVHNEVQAEAGASAMLSCEVAQAQTEVTWYKDGKKLSSSSKVGMEVKGCTRRLVLPQAGKADAGEYSCEAGGQRVSFHLHITEPKGVFAKEQSVHNEVQAEAGTTAMLSCEVAQPQTEVTWYKDGKKLSSSSKVRMEVKGCTRRLVVQQVGKADAGEYSCEAGGQRVSFQLHITEPKAVFAKEQLVHNEVRTEAGASATLSCEVAQAQTEVTWYKDGKKLSSSSKVRIEAAGCMRQLVVQQAGQADAGEYTCEAGGQRLSFHLDVSEPKAVFAKEQLAHRKVQAEAGAIATLSCEVAQAQTEVTWYKDGKKLSSSSKVRMEAVGCTRRLVVQQACQADTGEYSCEAGGQRLSFSLDVAEPKVVFAKEQPVHREVQAQAGASTTLSCEVAQAQTEVMWYKDGKKLSFSSKVRMEAVGCTRRLVVQQAGQAVAGEYSCEAGSQRLSFHLHVAEPKAVFAKEQPASREVQAEAGTSATLSCEVAQAQTEVTWYKDGKKLSSSSKVRMEAVGCTRRLVVQEAGQADAGEYSCKAGDQRLSFHLHVAEPKVVFAKEQPAHREVQAEAGASATLSCEVAQAQTEVTWYKDGKKLSSSSKVRVEAVGCTRRLVVQQAGQAEAGEYSCEAGGQQLSFRLQVAELEPQISERPCRREPLVVKEHEDIILTATLATPSAATVTWLKDGVEIRRSKRHETASQGDTHTLTVHGAQVLDSAIYSCRVGAEGQDFPVQVEEVAAKFCRLLEPVCGELGGTVTLACELSPACAEVVWRCGNTQLRVGKRFQMVAEGPVRSLTVLGLRAEDAGEYVCESRDDHTSAQLTVSVPRVVKFMSGLSTVVAEEGGEATFQCVVSPSDVAVVWFRDGALLQPSEKFAISQSGASHSLTISDLVLEDAGQITVEAEGASSSAALRVREAPVLFKKKLEPQTVEERSSVTLEVELTRPWPELRWTRNATALAPGKNVEIHAEGARHRLVLHNVGFADRGFFGCETPDDKTQAKLTVEMRQVRLVRGLQAVEAREQGTATMEVQLSHADVDGSWTRDGLRFQQGPTCHLAVRGPMHTLTLSGLRPEDSGLMVFKAEGVHTSARLVVTELPVSFSRPLQDVVTTEKEKVTLECELSRPNVDVRWLKDGVELRAGKTMAIAAQGACRSLTIYRCEFADQGVYVCDAHDAQSSASVKVQGRTYTLIYRRVLAEDAGEIQFVAENAESRAQLRVKELPVTLVRPLRDKIAMEKHRGVLECQVSRASAQVRWFKGSQELQPGPKYELVSDGLYRKLIISDVHAEDEDTYTCDAGDVKTSAQFFVEEQSITIVRGLQDVTVMEPAPAWFECETSIPSVRPPKWLLGKTVLQAGGNVGLEQEGTVHRLMLRRTCSTMTGPVHFTVGKSRSSARLVVSDIPVVLTRPLEPKTGRELQSVVLSCDFRPAPKAVQWYKDDTPLSPSEKFKMSLEGQMAELRILRLMPADAGVYRCQAGSAHSSTEVTVEAREVTVTGPLQDAEATEEGWASFSCELSHEDEEVEWSLNGMPLYNDSFHEISHKGRRHTLVLKSIQRADAGIVRASSLKVSTSARLEVRVKPVVFLKALDDLSAEERGTLALQCEVSDPEAHVVWRKDGVQLGPSDKYDFLHTAGTRGLVVHDVSPEDAGLYTCHVGSEETRARVRVHDLHVGITKRLKTMEVLEGESCSFECVLSHESASDPAMWTVGGKTVGSSSRFQATRQGRKYILVVREAAPSDAGEVVFSVRGLTSKASLIVRERPAAIIKPLEDQWVAPGEDVELRCELSRAGTPVHWLKDRKAIRKSQKYDVVCEGTMAMLVIRGASLKDAGEYTCEVEASKSTASLHVEEKANCFTEELTNLQVEEKGTAVFTCKTEHPAATVTWRKGLLELRASGKHQPSQEGLTLRLTISALEKADSDTYTCDIGQAQSRAQLLVQGEAAKCARA

SEQ ID NO: 67665 - protein, 283 aa, Homo sapiens
MNPAAEAEFNILLATDSYKVTHYKQYPPNTSKVYSYFECREKKTENSKLRKVKYEETVFYGLQYILNKYLKGKVVTKEKIQEAKDVYKEHFQDDVFNEKGWNYILEKYDGHLPIEIKAVPEGFVIPRGNVLFTVENTDPECYWLTNWIETILVQSWYPITVATNSREQKKILAKYLLETSGNLDGLEYKLHDFGYRGVSSQETAGIGASAHLVNFKGTDTVAGLALIKKYYGTKDPVPGYSVPAAEHSRISILWIEKRKNQKVVFIGSYSSSLKYHNSLGERP

SEQ ID NO: 67666 - protein, 3551 aa, Homo sapiens
QPSNSAVVSRQRHDDTRVHADIQNDEKERSMSYSDESRLSNLLRRITREDDRDRRLATVKQLKEFIQQPENKLVLVKQLDNILAAVHDVLNESSKLLQELRQEGACCLGLLCASLSYEAEKIFKWIFSKFSSSAKDEVKLLYLCATYKALETVGEKKAFSSVMQLVMTSLQSILENVDTPELLCKCVKCILLVARCYPHIFSTNFRDTVDILVGWHIDHTQKPSLTQQVSGWLQSLEPFWVADLAFSTTLLGQFLEDMEAYAEDLSHVASGESVDEDVPPPSVSLPKLAALLRVFSTVVRSIGERFSPIRGPPITEAYVTDVLYRVMRCVTAANQVFFSEAVLTAANECVGVLLGSLDPSMTIHCDMVITYGLDQLENCQTCGTDYIISVLNLLTLIVEQINTKLPSSFVEKLFIPSSKLLFLRYHKEKEVVAVAHAVYQAVLSLKNIPVLETAYKLILGEMTCALNNLLHSLQLPEACSEIKHEAFKNHVFNVDNAKFVVIFDLSALTTIGNAKNSLIGMWALSPTVFALLSKNLMIVHSDLAVHFPAIQYAVLYTLYSHCTRHDHFISSSLSSSSPSLFDGAVISTVTTATKKHFSIILNLLGILLKKDNLNQDTRKLLMTWALEAAVLMKKSETYAPLFSLPSFHKFCKGLLANTLVEDVNICLQACSSLHALSSSLPDDLLQRCVDVCRVQLVHSGTRIRQAFGKLLKSIPLDVVLSNNNHTEIQEISLALRSHMSKAPSNTFHPQDFSDVISFILYGNSHRTGKDNWLERLFYSCQRLDKRDQSTIPRNLLKTDAVLWQWAIWEAAQFTVLSKLRTPLGRAQDTFQTIEGIIRSLAAHTLNPDQDVSQWTTADNDEGHGNNQLRLVLLLQYLENLEKLMYNAYEGCANALTSPPKVIRTFFYTNRQTCQDWLTRIRLSIMRVGLLAGQPAVTVRHGFDLLTEMKTTSLSQGNELEVTIMMVVEALCELHCPEAIQGIAVWSSSIVGKNLLWINSVAQQAEGRFEKASVEYQEHLCAMTGVDCCISSFDKSVLTLANAGRNSASPKHSLNGESRKTVLSKPTDSSPEVINYLGNKACECYISIADWAAVQEWQNAIHDLKKSTSSTSLNLKADFNYIKSLSSFESGKFVECTEQLELLPGENINLLAGGSKEKIDMKKLLPNMLSPDPRELQKSIEVQLLRSSVCLATALNPIEQDQKWQSITENVVKYLKQTSRIAIGPLRLSTLTVSQSLPVLSTLQLYCSSALENTVSNRLSTEDCLIPLFSEALRSCKQHDVRPWMQALRYTMYQNQLLEKIKEQTVPIRSHLMELGLTAAKFARKRGNVSLATRLLAQCSEVQLGKTTTAQDLVQHFKKLSTQGQVDEKWGPELDIEKTKLLYTAGQSTHAMEMLSSCAISFCKSVKAEYAVAKSILTLAKWIQAEWKEISGQLKQVYRAQHQQNFTGLSTLSKNILTLIELPSVNTMEEEYPRIESESTVHIGVGEPDFILGQLYHLSSVQAPEVAKSWAALASWAYRWGRKVVDNASQGEGVRLLPREKSEVQNLLPDTITEEEKERIYGILGQAVCRPAGIQDEDITLQITESEDNEEDDMVDVIWRQLISSCPWLSELDESATEGVIKVWRKVVDRIFSLYKLSCSAYFTFLKLNAGQIPLDEDDPRLHLSHRVEQSTDDMIVMATLRLLRLLVKHAGELRQYLEHGLETTPTAPWRGIIPQLFSRLNHPEVYVRQSICNLLCRVAQDSPHLILYPAIVGTISLSSESQASGNKFSTAIPTLLGNIQGEELLVSECEGGSPPASQDSNKDEPKSGLNEDQAMMQDCYSKIVDKLSSANPTMVLQVQMLVAELRRVTVLWDELWLGVLLQQHMYVLRRIQQLEDEVKRVQNNNTLRKEEKIAIMREKHTALMKPIVFALEHVRSITAAPAETPHEKWFQDNYGDAIENALEKLKTPLNPAKPGSSWIPFKEIMLSLQQRAQKRASYILRLEEISPWLAAMTNTEIALPGEVSARDTVTIHSVGGTITILPTKTKPKKLLFLGSDGKSYPYLFKGLEDLHLDERIMQFLSIVNTMFATINRQETPRFHARHYSVTPLGTRSGLIQWVDGATPLFGLYKRWQQREAALQAQKAQDSYQTPQNPGIVPRPSELYYSKIGPALKTVGLSLDVSRRDWPLHVMKAVLEELMEATPPNLLAKELWSSCTTPDEWWRVTQSYARSTAVMSMVGYIIGLGDRHLDNVLIDMTTGEVVHIDYNVCFEKGKSLRVPEKVPFRMTQNIETALGVTGVEGVFRLSCEQVLHIMRRGRETLLTLLEAFVYDPLVDWTAGGEAGFAGAVYGGGGQQAESKQSKREMEREITRSLFSSRVAEIKVNWFKNRDEMLVVLPKLDGSLDEYLSLQEQLTDVEKLQGKLLEEIEFLEGAEGVDHPSHTLQHRYSEHTQLQTQQRAVQEAIQVKLNEFEQWITHYQAAFNNLEATQLASLLQEISTQMDLGPPSYVPATAFLQNAGQAHLISQCEQLEGEVGALLQQRRSVLRGCLEQLHHYATVALQYPKAIFQKHRIEQWKTWMEELICNTTVERCQELYRKYEMQYAPQPPPTVCQFITATEMTLQRYAADINSRLIRQVERLKQEAVTVPVCEDQLKEIERCIKVFLHENGEEGSLSLASVIISALCTLTRRNLMMEGAASSAGEQLVDLTSRDGAWFLEELCSMSGNVTCLVQLLKQCHLVPQDLDIPNPMEASETVHLANGVYTSLQELNSNFRQIIFPEALRCLMKGEYTLESMLHELDGLIEQTTDGVPLQTLVESLQAYLRNAAMGLEEETHAHYIDVARLLHAQYGELIQPRNGSVDETPKMSAGQMLLVAFDGMFAQVETAFSLLVEKLNKMEIPIAWRKIDIIREARSTQVNFFDDDNHRQVLEEIFFLKRLQTIKEFFRLCGTFSKTLSGSSSLEDQNTVNGPVQIVNVKTLFRNSCFSEDQMAKPIKAFTADFVRQLLIGLPNQALGLTLCSFISALGVDIIAQVEAKDFGAESKVSVDDLCKKAVEHNIQIGKFSQLVMNRATVLASSYDTAWKKHDLVRRLETSISSCKTSLQRVQLHIAMFQWQHEDLLINRPQAMSVTPPPRSAILTSMKKKLHTLSQIETSIATVQEKLAALESSIEQRLKWAGGANPALAPVLQDFEATIAERRNLVLKESQRASQVTFLCSNIIHFESLRTRTAEALNLDAALFELIKRCQQMCSFASQFNSSVSELELRLLQRVDTGLEHPIGSSEWLLSAHKQLTQDMSTQRAIQTEKEQQIETVCETIQNLVDNIKTVLTGHNRQLGDVKHLLKAMAKDEEAALADGEDVPYENSVRQFLGEYKSWQDNIQTVLFTLVQAMGQVRSQEHVEMLQEITPTLKELKTQSQSIYNNLVSFASPLVTDATNECSSPTSSATYQPSFAAAVRSNTGQKTQPDVMSQNARKLIQKNLATSADTPPSTVPGTGKSVACSPKKAVRDPKTGKAVQERNSYAVSVWKRVKAKLEGRDVDPNRRMSVAEQVDYVIKEATNLDNLAQLYEGWTAWV

SEQ ID NO: 67667 - protein, 179 aa, Homo sapiens
MCTSGQIIGSLLVLSVLEIGLGVSSVAVGAVSFSLALREHKPQLGDSSPFLLCGICGILCAKKKSGLVMILFSACCICGLIGGILNFQFLRAVTKKTSSLYPLHLASMSLACIGIGGCTLSSWLTCRLASYEQRRMFSEREHSLHHSHEMAEKRLRAIEITDLPSCPVVPPTPELPTRK

SEQ ID NO: 67668 - protein, 481 aa, Homo sapiens
  MOD_RES (1)..(1): Any amino acid
XELGDPCAWTGQGRGTRRMSPATTGTFLLTAFLLSCADGINGTVNWKTRQANNFIISRKMAAGMKDVYSIFSKVHSDRNVYPSAGVLFVHVLEREYFKGEFPPYPKPGEISNDPITFNTNLMGYPDRPGWLRYIQRTPYSDGVLYGSPTAENVGKPTIIEITAYNRRTFETARHNLIINIMSAEDFPLPYQAEFFIKNMNVEEMLASEVLGDFLGAVKNVWQPERLNAINITSALDRGGRVPLPINDLKEGVYVMVGADVPFSSCLREVENPQNQLRCSQEMEPVITCDKKFRTQFYIDWCKISLVDKTKQVSTYQEVIRGEGILPDGGEYKPPSDSLKSRDYYTDFLITLAVPSAVALVLFLILAYIMCCRREGVIQLVHHSAIQKSTKELRDMSKNREIAWPLSTLPVFHPVTGEIIPPLHTDNYDSTNMPLMQTQQNLPHQTQIPQQQTTGDFRLTTFQRFEVNGIPEERKLTEAMNL

SEQ ID NO: 67669 - protein, 78 aa, Homo sapiens
MAAVVAATRWWQLLLVLSAAGMGASGAPQPPNILLLLMDDESLPPPRAAGSPRWAPVLPDGCLCPLENAERRSGVPKV

SEQ ID NO: 67670 - protein, 133 aa, Homo sapiens
MGASVSRGRAARVPAPEPEPEEALDLSQLPPELLLVVLSHVPPRTLLGRCRQVCRGWRALVDGQALWLLILARDHGATGRALLHLARSCQSPARNARPCPLGRFCARRPIGRNLIRNPCGQEGLRKWMVQHGG

SEQ ID NO: 67671 - protein, 152 aa, Homo sapiens
MAAFAVEPQGPALGSEPMMLGSPTSPKPGVNAQFLPGFLMGDLPAPVTPQPRSISGPSVGVMEMRSPLLAGGSPPQPVVPAHKDKSGAPPVRSIYDDISSPGLGSTPLTSRRQPNISVMQSPLVGVTSTPGTGFLKHLLPTYYYNLHSMGIS

SEQ ID NO: 67672 - protein, 84 aa, Homo sapiens
MNEKSCSFHSKEELRDGQGERLSAGYSPSYDKDKSVLAFRGIPKRIQPTIRRTGLAALRHYLFGPPKLHQRLREERDLVLTIAQ

SEQ ID NO: 67673 - protein, 250 aa, Homo sapiens
  MOD_RES (1)..(1): Any amino acid
XELYRDPAEDGVTALSVYLTPKTSDSGNWIEIAYGTSSGGVRVIVQHPETVGSGPQLFQTFTVHRSPVTKIMLSEKHLISVCADNNHVRTWSVTRFRGMISTQPGSTPLASFKILALESADGHGGCSAGNDIAGGLTEQELMEQLEHCELAPPAPSAPSWGCLPSPSPRISLTSLHSASSNTSLSGHRGSPSPPQAEARRRGGGSFVERCQELVRSGPDLRRPPTPAPWPSSGLGTPLTPPKMKLNETSF

SEQ ID NO: 67674 - protein, 289 aa, Homo sapiens
  MOD_RES (1)..(1): Any amino acid
XLTSPALLLRDRGLAGRRVSASTRDREPWPGSQALAWAAEPHGLAMSRLLPVAMSPSTAVARTPWKKRASAAGMSPPPSMSGMWRAAAAAAVGDLAALLEQIGCLKYLQVFEEQDVDLRIFLTLTESDLKEIGITLFGPKRKMTSAIARWHSSARPPGDALELAYADRLEAEMQELAIQLHKRCEEVEATRGQVCQEQELRAVVESCLLEQDRAREDLQARLRETWALARDAALVLDQLRACQAELSSRVRQDQPPGAATLGLAVPPADSKGWQASLQAMSLPELSGAL

SEQ ID NO: 67675 - protein, 521 aa, Homo sapiens
MSDNQSWNSSGSEEDPETESGPPVERCGVLSKWTNYIHGWQDRWVVLKNNALSYYKSEDETEYGCRGSICLSKAVITPHDFDECRFDISVNDSVWYLRAQDPDHRQQWIDAIEQHKTESGYGSESSLRRHGSMVSLVSGASGYSATSTSSFKKGHSLREKLAEMETFRDILCRQVDTLQKYFDACADAVSKDELQRDKVVEDDEDDFPTTRSDGDFLHSTNGNKEKLFPHVTPKGINGIDFKGEAITFKATTAGILATLSHCIELMVKREDSWQKRLDKETEKKRRTEEAYKNAMTELKKKSHFGGPDYEVEEMVQNHMTYSLQDVGGDANWQLVVEEGEMKVYRREVEENGIVLDPLKATHAVKGVTGHEVCNYFWNVDVRNDWETTIENFHVVETLADNAIIIYQTHKRVWPASQRDVLYLSVIRKIPALTENDPETWIVCNFSVDHDSAPLNNRCVRAKINVAMICQTLVSPPEGNQEISRDNILCKITYVANVNPGGWAPASVLRAVAKREYPKFLK

SEQ ID NO: 67676 - protein, 102 aa, Homo sapiens
MNQPCNSMEPRVMDDDMLKLAVGDQGPQEEAGQLAKQEGILFKDVLSLQLDFRNILRIDNLWQFENLRKLQLDNNIIEKIEGLENLAHLVWLDLSFNNIETI

SEQ ID NO: 67677 - protein, 506 aa, Homo sapiens
MLGICRGRRKFLAASLSLLCIPAITWIYLFSGSFEDGKPVSLSPLESQAHSPRYTASSQRERESLEVRMREVEEENRALRRQLSLAQGRAPSHRRGNHSKTYSMEEGTGDSENLRAGIVAGNSSECGQQPVVEKCETIHVAIVCAGYNASRDVVTLVKSVLFHRRNPLHFHLIADSIAEQILATLFQTWMVPAVRVDFYNADELKSEVSWIPNKHYSGIYGLMKLVLTKTLPANLERVIVLDTDITFATDIAELWAVFHKFKGQQVLGLVENQSDWYLGNLWKNHRPWPALGRGYNTGVILLLLDKLRKMKWEQMWRLTAERELMGMLSTSLADQDIFNAVIKQNPFLVYQLPCFWNVQLSDHTRSEQCYRDVSDLKVIHWNSPKKLRVKNKHVEFFRNLYLTFLEYDGNLLRRELFGCPSEADVNSENLQKQLSELDEDDLCYEFRRERFTVHRTHLYFLHYEYEPAADSTDVTLVAQLSMDSFDFSQTLSPIISCKTTVPNTCL

SEQ ID NO: 67678 - protein, 226 aa, Homo sapiens
SLSSTLSNTSKEPSVCEKEALPISESSFKLLGSSEDLSSDSESHLPEEPAPLSPQQAFRRRANTLSHFPIECQEPPQPARGSPGVSQRKLMRYHSVSTETPHERKDFESKANHLGDSGGTPVKTRRHSWRQQIFLRVATPQKACDSSSRYEEPHCGSPSLACTEDYSELGELPPRSPLEPVCEDGPFGPPPEEKKRTSRELRELWQKAILQQILLLRMEKENQKLQ

SEQ ID NO: 67679 - protein, 179 aa, Homo sapiens
MAAPAPGLISVFSSSQELGAALAQLVAQRAACCLAGARARFALGLSGGSLVSMLARELPAAVAPAGPASLARWTLGFCDERLVPFDHAESTYGLYRTHLLSRLPIPESQVITINPELPVEEAAEDYAKKLRQELPQGSLADPFEESPLRGHSPALGSLKATRPLLPRHSKGTPSRFSTC

SEQ ID NO: 67680 - protein, 154 aa, Homo sapiens
  MOD_RES (1)..(1): Any amino acid
XGICREGDQLVVGPTDDGCFLELRVCSIQRNRSACRVLRAGQAATLALGDFDRALLRKGMVMVSPEMNPTICSVFEAEIVLLFHATTFRRGFQVTVHVGNVRQTAVVEKIHAKVRGTWPSISPEVRKEGGLPQTGRELLDPTMGIKPHLGWVAA

SEQ ID NO: 67681 - protein, 245 aa, Homo sapiens
MKKKQNKKERKKMRAEDGENDAIKKQAESLRESQETTPTPNPPTTEEEKTESNQEVANPEHYIKHPLQNRWALWFFKNDKSKTWQANLRLISKFDTVEDFWALYNHIQLSSNLMPGCDYSLFKDGIEPMWEDEKNKRGGRWLITLNKQQRRSDLDRFWLETLLCLIGESFDDYSDDVCGAVVNVRAKGDKIAIWTTECENREAVTHIGRVYKERLGLPPKIVIGYQSHADTATKSGSTTKNRFVV

SEQ ID NO: 67682 - protein, 79 aa, Homo sapiens
MATPVVTKTAWKLQEIVAHASNVSSLVLGKASGRLLATGGDDCRVNLWSINKPNCIMSLTGHTSPVESVRLNTPEELIV

SEQ ID NO: 67683 - protein, 508 aa, Homo sapiens
MAGDLSAGFFMEELNTYRQKQGVVLKYQELPNSGPPHDRRFTFQVIIDGREFPEGEGRSKKEAKNAAAKLAVEILNKEKKAVSPLLLTTTNSSEGLSMGNYIGLINRIAQKKRLTVNYEQCASGVHGPEGFHYKCKMGQKEYSIGTGSTKQEAKQLAAKLAYLQILSEETSVKSDYLSSGSFATTCESQSNSLVTSTLASESSSEGDFSADTSEINSNSDSLNSSSLLMNGLRNNQRKAKRSLAPRFDLPDMKETKYTVDKRFGMDFKEIELIGSGGFGQVFKAKHRIDGKTYVIKRVKYNNEKAEREVKALAKLDHVNIVHYNGCWDGFDYDPETSDDSLESSDYDPENSKNSSRSKTKCLFIQMEFCDKGTLEQWIEKRRGEKLDKVLALELFEQITKGVDYIHSKKLIHRDLKISSQDYGKEVDLYALGLILAELLHVCDTAFETSKFFTDLRDGIISDIFDKKEKTLLQKLLSKKPEDRPNTSEILRTLTVWKKSPEKNERHTC

SEQ ID NO: 67684 - protein, 142 aa, Homo sapiens
  MOD_RES (1)..(1): Any amino acid
XSPKILEKELGISVAQRIQKLSFGEDNSPVILSGPPQSFSEEDSFKKCSSEVEAKNKIEELLASLLNRVCQDGRKPHTVRLIIRRYSSEKHYGRESRQCPIPSHVIQKLGTGLQSPDFCASSLMQRRLEDKLVKLEGVFTKH

SEQ ID NO: 67685 - protein, 36 aa, Homo sapiens
MRRFLSRKKIRHHIYVLNQVDHFRFNRAALINVGFL

SEQ ID NO: 67686 - protein, 286 aa, Homo sapiens
  MOD_RES (1)..(1): Any amino acid
XSMAVERGLHSKAKYKKVQLVRLVGMMLLIFARKDQCRYIRDIATETVGTGIMGKMGNKGGVAVRFVFHNTTFCIVNSHLAAHVEDFERRNQDYKDICARMSFVVPNQTLPQLNIMKHEVVIWLGDLNYRLCMPDANEVKSLINKKDLQRLLKFDQLNIQRTQKKAFVDFNEGEIKFIPTYKYDSKTDRWDSSGKCRVPAWCDRILWRGTNVNQLNYRSHMELKTSDHKPVSALFHIGVKVVDERRYRKVFEDSVRIMDRMENDFLPSLELSRREDPRNDQSSLEK

SEQ ID NO: 67687 - protein, 98 aa, Homo sapiens
MEHGSIITQARREDALVLTKQGLVSKSSPKKPRGRNIFKTLILDNSPASYIFHPENAVPVQSWFDDMADTELLNLIPIFEELSGAEDVYTSLGQLRAP

SEQ ID NO: 67688 - protein, 103 aa, Homo sapiens
MAAKKNRQSSDKQNGRVAKVKGHRSQKHKERIRLLRQKREAAARKKYNLLQDSSTSDSDLTCDSSTSSSDDDEEVSGSSKTITAEIPDGPPVVAHYDMSDTNS

SEQ ID NO: 67689 - protein, 88 aa, Homo sapiens
RGVPVIKWKKDGIHLALGMDERKQQLSNGSLLIQNILHSRHHKPDEGLYQCEASLGDSGSIISRTAKVAVAEGNVRLRKFGQHSHGSL

SEQ ID NO: 67690 - protein, 145 aa, Homo sapiens
MVKLNSNPSEKGTKPPSVEDGFQTVPLITPLEVNHLQLPAPEKVIVKTRTEYQPEQKNKGKFRVPKIAEFTVTILVSLALAFLACIVFLVVYKAFTYDHSCPEGFVYKHKRCIPASLDAYYSSQDPNSRSRFYTVISHYSVAKQS

SEQ ID NO: 67691 - protein, 125 aa, Homo sapiens
MDFRGLPGNYHKEENQEHQLGNNTLSSHLQIDKMTDNKTGEVLISENVVASIQPAEGSFEGDLKVPRMEEKEALVPIQKATDSFHTELHPRVAFWIIKLPRRRSHQDALEGGHWLSEKRHRLQAI

SEQ ID NO: 67692 - protein, 114 aa, Homo sapiens
MAGPLWRTAAFVQRHRTGLLVGSCAGLFGVPISYHLFPDPVVQWLYQYWPQGQPAPLPPQLQSLFQEVLQDIGVPSGHCYKPFTTFTFQPVSAGFPRLPAGAVVGIPASFLGDL

SEQ ID NO: 67693 - protein, 725 aa, Homo sapiens
MPINKSEKPESCDNVKVVVRCRPLNEREKSMCYKQAVSVDEMRGTITVHKTDSSNEPPKTFTFDTVFGPESKQLDVYNLTARPIIDSVLEGYNGTIFAYGQTGTGKTFTMEGVRAIPELRGIIPNSFAHIFGHIAKAEGDTRFLVRVSYLEIYNEEVRDLLGKDQTQRLEVKERPDVGVYIKDLSAYVVNNADDMDRIMTLGHKNRSVGATNMNEHSSRSHAIFTITIECSEKGIDGNMHVRMGKLHLVDLAGSERQAKTGATGQRLKEATKINLSLSTLGNVISALVDGKSTHVPYRNSKLTRLLQDSLGGNSKTMMCANIGPADYNYDETISTLRYANRAKNIKNKARINEDPKDALLRQFQKEIEELKKKLEEEEISGSDISGSEEDDDEEGEVGEDGEKRKKRRGNSSSSSSDSTCSVIEKPLDKFLPNQAGKKKVSPDKMIEMQAKIDEERKALETKLDMEEEERNKARAELEKREKDLLKAQQEHQSLLEKLSALEKKVIVGGVDLLAKAEEQEKLLEESNMELEERRKRAEQLRRELEEKEQERLDIEEKYTSLQEEAQGKTKKLKKVWTMLMAAKSEMADLQQEHQREIEGLLENIRQLSRELRLQMLIIDNFIPRDYQEMIENYVHWNEDIGEWQLKCVAYTGNNMRKQTPVPDKKEKDPFEVDLSHVYLAYTEESLRQSLMKLERPRTSKGKARPKTGRRKRSAKPETVIDSLLQ

SEQ ID NO: 67694 - protein, 202 aa, Homo sapiens
LNTSHSPSASSRSSHKSSHTAMSEPTSTPTKLMAEASTPALPRSATLPQELPVPGLSQAATMPAPLPSPSSCDLTQQLLPQTVLQSTPAPMAQFSAQFSMFQTIKDQLEQRTRILQANIRWQQEELHKIQEQLCLVQDSNVQVRPEPDRVSKSRRTPRQQQQRPDARPADGAGGAPPQLPCLPTIAPAACTGPAAATAALPA

SEQ ID NO: 67695 - protein, 63 aa, Homo sapiens
MPAGPVQAVPPPPPVPTEPKQPTEEEASSKEDSAPSKPVVGIIYPPPEVRNIVDKTASFVARS

SEQ ID NO: 67696 - protein, 489 aa, Homo sapiens
MVPWVRTMGQKLKQRLRLDVGREICRQYPLFCFLLLCLSAASLLLNRYIHILMIFWSFVAGVVTFYCSLGPDSLLPNIFFTIKYKPKQLGLQELFPQGHSCAVCGKVKCKRHRPSLLLENYQPWLDLKISSKVDASLSEVLELVLENFVYPWYRDVTDDESFVDELRITLRFFASVLIRRIHKVDIPSIITKKLLKAAMKHIEVIVKARQKVKNTEFLQQAALEEYGPELHVALRSRRDELHYLRKLTELLFPYILPPKATDCRSLTLLIREILSGSVFLPSLDFLADPDTVNHLLIIFIDDSPPEKATEPASPLVPFLQKFAEPRNKKPSVLKLELKQIREQQDLLFRFMNFLKQEGAVHVLQFCLTVEEFNDRILRPELSNDEMLSLHEELQKIYKTYCLDESIDKIRFDPFIVEEIQRIAEGPYIDVVKLQTMRCLFEAYEHVLSLLENVFTPMFCHSDEYFRQLLRGAESPTRNSKLNRLKKVLL

SEQ ID NO: 67697 - protein, 244 aa, Homo sapiens
MPVQPPSKDTEEMEAEGDSAAEMNGEEEESEEERSGSQTESEEESSEMDDEDYERRRSECVSEMLDLEKQFSELKEKLFRERLSQLRLRLEEVGAERAPEYTEPLGGLQRSLKIRIQVAGIYKGFCLDVIRNKYECELQGAKQHLESEKLLLYDTLQGELQERIQRLEEDRQSLDLSSEWWDDKLHARGSSRSWDSLPPSKRKKAPLVSGPYIVYMLQEIDILEDWTAIKKARAAVSPQKRKSD

SEQ ID NO: 67698 - protein, 152 aa, Homo sapiens
  MOD_RES (1)..(1): Any amino acid
XDTWASEVGPVLSKSSPRLITTWEKVPVGTNGGVTVVGLVSSLLGGTFVGIAYFLTQLIFVNDLDISAPQWPIIAFGGLAGLLGSIVDSYLGATMQYTGLDESTGMVVNSPTNKARHIAGKPILDNNAVNLFSSVLIALLLPTAAWGFWPRG

SEQ ID NO: 67699 - protein, 69 aa, Homo sapiens
  MOD_RES (1)..(1): Any amino acid
XVPERFALCQPLLLFSSLQHGYSLARCVVLTCPQTGVREISLEANWASLGPENALCLGCSLRCSATSGW

SEQ ID NO: 67700 - protein, 323 aa, Homo sapiens
MNHSDASVFRIQKNQTAGVTFILLGFSEFPDLQIPLFLVFLTIYTITVMGNLGMIMVIRINPKLHTPMYFFLSHLSFVDFCYSTTITPKLLENLVVEDRIISFTGCIMQFFFACIFVVTETFMLAAMAYDRFVAVCNPLLYTVAMSQRLCSLLVAASYSWSLVCSLTYTYFLLTLSFCRTNFINNFVCEHAAIVAVSCSDPYMSQKVILVSATFNEISSLVIILTSYAFIFITVMKMPSTGGRKKAFSTCASHLTAITIFHGTILFLYCVPNSKSSWLMVKVASVFYTVVIPMLNPLIYSLRNKDVKETVRKLVITKLLCHKM

SEQ ID NO: 67701 - protein, 78 aa, Homo sapiens
MDWGTLHTFIGGVNKHSTSIGKVWITVIFIFRVMILVVAAQEVWGDEQEDFVCNTLQPGCKNVCYDHFFPVSHIRLWA

SEQ ID NO: 67702 - protein, 36 aa, Homo sapiens
MIKRFLEDTTDDGELSKMTRSMWALQPSPTKSTESP

SEQ ID NO: 67703 - protein, 111 aa, Homo sapiens
MSDNEDNFDGDDFDDVEEDEGLDDLENAEEEGQENVEILPSGERPQANQKRITTPYMTKYERARVLGTRALQIAMCAPVMVELEGETDPLLIAMKELNYFQKAFEEAPVQG

SEQ ID NO: 67704 - protein, 263 aa, Homo sapiens
MPITRMRMRPWLEMQINSNQIPGLIWINKEEMIFQIPWKHAAKHGWDINKDACLFRSWAIHTGRYKAGEKEPDPKTWKANFRCAMNSLPDIEEVKDQSRNKGSSAVRVYRMLPPLTKNQRKERKSKSSRDAKSKAKRKSCGDSSPDTFSDGLSSSTLPDDHSSYTVPGYMQDLEVEQALTPALSPCAVSSTLPDWHIPVEVVPDSTSDLYNFQVSPMPSTSEGDIGLSLQRVFTDLKNMDATWLDSLLTPVRLPSIQAIPCAP

SEQ ID NO: 67705 - protein, 431 aa, Homo sapiens
MKKRKELNALIGLAGDSRRKKPKKGPSSHRLLRTEPPDSDSESSSEEEEEFGVVGNRSRFAKGDYLRCCKICYPLCGFVILAACVVACVGLVWMQVALKEDLDALKEKFRTMESNQKSSFQEIPKLNEELLSKQKQLEKIESGEMGLNKVWINITEMNKQISLLTSAVNHLKANVKSAADLISLPTTVEGLQKSVASIGNTLNSVHLAVEALQKTVDEHKKTMELLQSDMNQHFLKETPGSNQIIPSPSATSELDNKTHSENLKQMGDRSATLKRQSLDQVTNRTDTVKIQSIKKEDSSNSQVSKLREKLQLISALTNKPESNRPPETADEEQVESFTSKPSALPKFSQFLGDPVEKAAQLRPISLPGVSSTEDLQDLFRKTGQDVDGKLTYQEIWTSLGSAMPEPESLRAFDSDGDGRYSFLELRVALGI

SEQ ID NO: 67706 - protein, 214 aa, Homo sapiens
HGKVLLMQKYRRCGFPQLWAASAFKGATGPSQAVPPVEHHLRNHVQWLQVAGSGPTDSLQGIILTGWQRYDHYSVLCELLPAGVPSLAACLQLLLRGGFDEDVKAKVENLLGISSLEKTDPVSPYHRQRKLIHPVMVQHIQPAALSLLAQWSTLVQELEAALQLAFYPDAVEEWLEENVHPSLQRLQALLQDLSEVSAPPLPPTSPGRDVAQDP

SEQ ID NO: 67707 - protein, 102 aa, Homo sapiens
  MOD_RES (1)..(1): Any amino acid
XRNEYIHSGLYSSFTINSLQNPPDAFKAIKTEKLEEPPEDSPPVEEVRTVIRPKNPKAWKSQRPRWCSPAPTSAPSPSTAQPSPRDPSPQPSSPHRHQMDCF

SEQ ID NO: 67708 - protein, 80 aa, Homo sapiens
MRRDVRILLLGEGGEDVADPVPGGRGVPRGGPSPRGGDHHPRGRHPGEGAHPHRGLLRSRADGRGAAGGDPQGKRGVCGV

SEQ ID NO: 67709 - protein, 772 aa, Homo sapiens
MSSSSWLLLSLVAVTAAQSTIEEQAKTFLDKFNHEAEDLFYQSSLASWNYNTNITEENVQNMNNAGDKWSAFLKEQSTLAQMYPLQEIQNLTVKLQLQALQQNGSSVLSEDKSKRLNTILNTMSTIYSTGKVCNPDNPQECLLLEPGLNEIMANSLDYNERLWAWESWRSEVGKQLRPLYEEYVVLKNEMARANHYEDYGDYWRGDYEVNGVDGYDYSRGQLIEDVEHTFEEIKPLYEHLHAYVRAKLMNAYPSYISPIGCLPAHLLGDMWGRFWTNLYSLTVPFGQKPNIDVTDAMVDQAWDAQRIFKEAEKFFVSVGLPNMTQGFWENSMLTDPGNVQKAVCHPTAWDLGKGDFRILMCTKVTMDDFLTAHHEMGHIQYDMAYAAQPFLLRNGANEGFHEAVGEIMSLSAATPKHLKSIGLLSPDFQEDNETEINFLLKQALTIVGTLPFTYMLEKWRWMVFKGEIPKDQWMKKWWEMKREIVGVVEPVPHDETYCDPASLFHVSNDYSFIRYYTRTLYQFQFQEALCQAAKHEGPLHKCDISNSTEAGQKLFNMLRLGKSEPWTLALENVVGAKNMNVRPLLNYFEPLFTWLKDQNKNSFVGWSTDWSPYADQSIKVRISLKSALGDKAYEWNDNEMYLFRSSVAYAMRQYFLKVKNQMILFGEEDVRVANLKPRISFNFFVTAPKNVSDIIPRTEVEKAIRMSRSRINDAFRLNDNSLEFLGIQPTLGPPNQPPVSIWLIVFGVVMGVIVVGIVILIFTGIRDRKKGL

SEQ ID NO: 67710 - protein, 109 aa, Homo sapiens
MEPSAQQLQLAASLPANLSNFCQGSEMPTTSRPALDVKGGTSPAKEDANQEMSSVAYSNLAVKDRKAVAILHYPGVASNGTKASGAPTSSSGSPIGSPTTTPPTKPPSF

SEQ ID NO: 67711 - protein, 742 aa, Homo sapiens
MASVHESLYFNPMMTNGVVHANVFGIKDWVTPYKIAVLVLLNEMSRTGEGAVSLMERRRLNQLLLPLLQGPDITLSKLYKLIEESCPQLANSVQIRIKLMAEGELKDMEQFFDDLSDSFSGTEPEVHKTSVVGLFLRHMILAYSKLSFSQVFKLYTALQQYFQNGEKKTVEDADMELTSRDEGERKMEKEELDVSVREEEVSCSGPLSQKQAEFFLSQQASLLKNDETKALTPASLQKELNNLLKFNPDFAEAHYLSYLNNLRVQDVFSSTHSLLHYFDRLILTGAESKSNGEEGYGRSLRYAALNLAALHCRFGHYQQAELALQEAIRIAQESNDHVCLQHCLSWLYVLGQKRSDSYVLLEHSVKKAVHFGLPRAFAGKTANKLMDALKDSDLLHWKHSLSELIDISIAQKTAIWRLYGRSTMALQQAQMLLSMNSLEAVNAGVQQNNTESFAVALCHLAELHAEQGCFAAASEVLKHLKERFPPNSQHAQLWMLCDQKIQFDRAMNDGKYHLADSLVTGITALNSIEGVYRKAVVLQAQNQMSEAHKLLQKLLVHCQKLKNTEMVISVLLSVAELYWRSSSPTIALPMLLQALALSKEYRLQYLASETVLNLAFAQLILGIPEQALSLLHMAIEPILADGAILDKGRAMFLVAKCQVASAASYDQPKKAEALEAAIENLNEAKNYFAKVDCKERIRDVVYFQARLYHTLGKTQERNRCAMLFRQLHQELPSHGVPLINHL

SEQ ID NO: 67712 - protein, 228 aa, Homo sapiens
MPWSACPHPRCVPRRCVIPCQSFVVTDVDYFSFQPDRPLGTRLTVTLTQHVQPPEPRDLQISTDQDHFLLTWSVALGSPQSHWLSPGDLEFEVVYKRLQDSWEDAAILLSNTSQATLGPEHLMPSSTYVARVRTRLAPGSRLSGRPSKWSPEVCWDSQPGDEAQPQNLECFFDGAAVLSCSWEVRKEVASSVSFGLFYKPSPDAGEEECSPVLREGLGSLHTRHHCQI

SEQ ID NO: 67713 - protein, 132 aa, Homo sapiens
KCHPGAGAAMARQHARTLWYDRPRYVFMEFCVEDSTDVHVLIEDHRIVFSCKNADGVELYNEIEFYAKVNSKPVWLSVDFDNWRDWEGDEEMELAHVEHYAELLKKVSTKRPPPAMDDLDDDSDSADDATSN

SEQ ID NO: 67714 - protein, 199 aa, Homo sapiens
MGRRSSDTEEESRSKRKKKHRRRSSSSSSSDSRTYSRKKGGRKSRSKSRSWSRDLQPRSHSYDRRRRHRSSSSSSYGSRRKRSRSRSRGRGKSYRVQRSRSKSRTRRSRSRPRLRSHSRSSERSSHRRTRSRSRDRERRKGRDKEKREKEKDKGKDKELHNIKRGFHQKNCERKKKLTSNRKRKVLGRPNWNLETSKLD

SEQ ID NO: 67715 - protein, 70 aa, Homo sapiens
  MOD_RES (1)..(1): Any amino acid
XVDLVPGGDRQSPINIRWRDSVYDPGLKPLTISYDPATCLHVWNNGYSFLVEFEDSTDKSECAPFSTGSP

SEQ ID NO: 67716 - protein, 135 aa, Homo sapiens
  MOD_RES (1)..(1): Any amino acid
XIIYEQVMIAALDYGRDDLALFCLQELRRQFPGSHRVKRLTGMRFEAMERYDDAIQLYDRILQEDPTNTAARKRKIAIRKAQGKNVEAIRELNEYLEQFVGDQEAWHELAELYINEHDLQVEVRRKPNILLRLSK

SEQ ID NO: 67717 - protein, 117 aa, Homo sapiens
MEDEERQKKLEAGKAKLAQFRQRKAQSDGQSPSKKQKKKRKTSSSKHDVSAHHDLNIDQSQCNEMYINSSQRVESTVIPESTIMRTLHSGEITSHEQGFSVEVSPKTHGNYGSYNSR

SEQ ID NO: 67718 - protein, 90 aa, Homo sapiens
  MOD_RES (1)..(1): Any amino acid
XRGAPGERGRPGLPGAAGARGNDGARGSDGQPGPPGPPGTAGFPGSPGAKGPPGINGSPGGKGEMGPAGIPGAPGLMGARGPPGPAGANG

SEQ ID NO: 67719 - protein, 230 aa, Homo sapiens
MGSKRRRATSPSSSVSGDFDDGHHSVSTPGPSRKRRRLSNLPTVDPIAVCHELYNTIRDYKDEQGRLLCELFIRAPKRRNQPDYYEVVSQPIDLMKIQQKLKMEEYDDVNLLTADFQLLFNNAKSYYKPDSPEYKAACKLWDLYLRTRNEFVQKGEADDEDDDEDGQDNQGTVTEGSSPAYLKEILEQLLEAIVVATNPSGRLISELFQKLPSKVQYPDYYAIIKEPIDL

SEQ ID NO: 67720 - protein, 303 aa, Homo sapiens
MRGANAWAPLCLLLAAATQLSRQQSPERPVFTCGGILTGESGFIGSEGFPGVYPPNSKCTWKITVPEGKVVVLNFRFIDLESDNLCRYDFVDVYNGHANGQRIGRFCGTFRPGALVSSGNKMMVQMISDANTAGNGFMAMFSAAEPNERGDQYCGGLLDRPSGSFKTPNWPDRDYPAGVTCVWHIVAPKNQLIELKFEKFDVERDNYCRYDYVAVFNGGEVNDARRIGKYCGDSPPAISRHCYHNHHSRWEFARHSLDHQHLQRGKFGDSAGGQEHECQADCRLQAVPSPQKRSKLHYYGPSR

SEQ ID NO: 67721 - protein, 419 aa, Homo sapiens
MAAPEPLSPAGGAGEEAPEEDEDEAEAEDPERPNAGAGGGRSGGGGSSVSGGGGGGGAGAGGCGGPGGALTRRAVTLRVLLKDALLEPGAGVLSIYYLGKKFLGDLQPDGRIMWQETGQTFNSPSAWATHCKKLVNPAKKSGCGWASVKYKGQKLDKYKATWLRLHQLHTPATAADESPASEGEEEELLMEEEEEDVLAGVSAEDKSRRPLGKSPSEPAHPEATTPGKRVDSKIRVPVRYCMLGSRDLARNPHTLVEVTSFAAINKFQPFNVAVSSNVLFLLDFHSHLTRSEVVGYLGGRWDVNSQMLTVLRAFPCRSRLGDAETAAAIEEEIYQSLFLRGLSLVGWYHSHPHSPALPSLQDIDAQMDYQLRLQGSSNGFQPCLALLCSPYYSGNPGPESKISPFWVMPPPEVPIPVQS

SEQ ID NO: 67722 - protein, 198 aa, Homo sapiens
GVHRKPSLLAHPGPLVKSEETVILQCWSDVRFQHFLLHREGKFNDTLHLTGEHHDGVSKANFSIGPMMEDLAGTYRCYGSVTHSPQLSAPSDPLDIVITGLYEKPSLSAQPGPTVLAGESVTLSCSSRSSYDMYHLSREGEAHERRFSAGPKVNGTFQADFPLGPATHGGTYRCFGSFRDSPYEWSNSSDPLLVSVTG

SEQ ID NO: 67723 - protein, 254 aa, Homo sapiens
  MOD_RES (1)..(1): Any amino acid
XIFLDIFQNPYEEPPKLPRSRKQRQDLLNPSFKGLPSDFHTADFTASEEPPCIIAVLCELHDGLLVEAKGIKEHYFKPYISKLFDRKILKGECLLDLSSFTDNSKAVNKEYEEYVLTVGDFDERIFLGADAEEEIGTPRKFTRDTPLGKLTAQANVEYNLQQHFEKKRSFAPSTPLTGRRYLREKEAVITPVASATQSVSRLQSIVAGLKNAPSDQLINIFESCVRNPVENIMKILKGIGETFCQHYTQSTDEQ

SEQ ID NO: 67724 - protein, 71 aa, Homo sapiens
MAKQPSDVSSECDREGRQLQPAERPPQLRPGAPTSLQTEPQGNPEGNHGGEGDSCPHGSPQGPLAPPASPG

SEQ ID NO: 67725 - protein, 208 aa, Homo sapiens
SADMTIKLWDFQGFECIRTMHGHDHNVSSVAIMPNGDHIVSASRDKTIKMWEVQTGYCVKTFTGHREWVRMVRPNQDGTLIASCSNDQTVRVWVVATKECKAELREHEHVVECISWAPESSYSSISEATGSEVGHDNWVRGVLFHSGGKFILSCADDKTLRVWDYKNKRCMKTLNAHEHFVTSLDFHKTAPYVVTGSVDQTVKVWECR

SEQ ID NO: 67726 - protein, 1049 aa, Homo sapiens
MDSQELKTLINYYCQERYFHHVLLVASEGIKRYGSDPVFRFYHAYGTLMEGKTQEALREFEAIKNKQDVSLCSLLALIYAHKMSPNPDREAILESDARVKEQRKGAGEKALYHAGLFLWHIGRHDKAREYIDRMIKISDGSKQGHVLKAWLDITRGKEPYTKKALKYFEEGLQDGNDTFALLGKAQCLEMRQNYSGALETVNQIIVNFPSFLPAFVKKMKLQLALQDWDQTVETAQRLLLQDSQNVEALRMQALYYVCREGDIEKASTKLENLGNTLDAMEPQNAQLFYNITLAFSRTCGRSQLILQKIQTLLERAFSLNPQQSEFATELGYQMILQGRVKEALKWYKTAMTLDETSVSALVGFIQCQLIEGQLQDADQQLEFLNEIQQSIGKSAELIYLHAVLAMKKNKRQEEVINLLNDVLDTHFSQLEGLPLGIQYFEKLNPDFLLEIVMEYLSFCPMQPASPGQPLCPLLRRCISVLETVVRTVPGLLQTVFLIAKVKYLSGDIEAAFNNLQHCLEHNPSYADAHLLLAQVYLSQEKVKLCSQSLELCLSYDFKVRDYPLYHLIKAQSQKKMGEIADAIKTLHMAMSLPGMKRIGASTKSKDRKTEVDTSHRLSIFLELIDVHRLNGEQHEATKVLQDAIHEFSGTSEEVRVTIANADLALAQGDIERALSILQNVTAEQPYFIEAREKMADIYLKHRKDKMLYITCFREIAERMANPRSFLLLGDAYMNILEPEEAIVAYEQALNQNPKDGTLASKMGKALIKTHNYSMAITYYEAALKTGQKNYLCYDLAELLLKLKWYDKAEKVLQHALAHEPVNELSALMEDGRCQVLLAKVYSKMEKLGDAITALQQARELQARVLKRVQMEQPDAVPAQKHLAAEICAEIAKHSVAQRDYEKAIKFYREALVHCETDNKIMLELARLYLAQDDPDSCLRQCALLLQSDQDNEAATMMMADLMFRKQDYEQAVFHLQQLLERKPEDVENSRMSQDFSQWLRNVTPEQNWNQDFSIVKDCIFGTLENQMMPFDILIKLGKIVTGAKMPFII

SEQ ID NO: 67727 - protein, 118 aa, Homo sapiens
MAGQFRSYVWDPLLILSQIVLMQTVYYGSLGLWLALVDGLVRSSPSLDQMFDAEILGFSTPPGRLSMMSFILNALTCALGLLYFIRRGKQCLDFTVTVHFFHLLGCWFYSSRFPSALT

SEQ ID NO: 67728 - protein, 37 aa, Homo sapiens
MRPEQSSSTGTLQSSPPSSTSCAPKSWIPAFSVHPHT

SEQ ID NO: 67729 - protein, 574 aa, Homo sapiens
MWWALRPPGILPPGMVLKAFFPTCCVSTDSGLLVGRWVPEQSSAVVLAVLHFPFIPIQVKQLLAQVRQASQVGVAVLGTWCHCRQEPEESLGRFLESLGAVFPHEPWLRLCRERGGTFWSCEATHRQAPTAPGAPGEDQVMLIFYDQRQVLLSQLHLPTVLPDRQAGATTASTGGLAAVFDTVARSEVLFRSDRFDEGPVRLSHWQSEGVEASILAELARRASGPICLLLASLLSLVSAVSACRVFKLWPLSFLGSKLSTCEQLRHRLEHLTLIFSTRKAENPAQLMRKANTVASVLLDVALGLMLLSWLHGRSRIGHLADALVPVADHVAEELQHLLQWLMGAPAGLKMNRALDQVLGRFFLYHIHLWISYIHLMSPFVEHILWHVGLSACLGLTVALSLLSDIIALLTFHIYCFYVYGARLYCLKIHGLSSLWRLFRGKKWNVLRQRVDSCSYDLDQLFIGTLLFTILLFLLPTTALYYLVFTLLRLLVVAVQGLIHLLVDLINSLPLYSLGLRLCRPYRLAGSEPWRPEATGLCSSALGFSGLGSLNCRPGAKRGKVRGTRSQQGGHHPLA

SEQ ID NO: 67730 - protein, 320 aa, Homo sapiens
MKTGNQSFGTDFLLVGLFQYGWINSLLFVVIATLFTVALTGNIMLIHLIRLNTRLHTPMYFLLSQLSIVDLMYISTTVPKMAVSFLSQSKTIRFLGCEIQTYVFLALGGTEALLLGFMSYDRYVAICHPLHYPMLMSKKICCLMVACAWASGSINAFIHTLYVFQLPFCRSRLINHFFCEVPALLSLVCQDTSQYEYTVLLSGLIILLLPFLAILASYARVLIVVFQMSSGKGQAKAVSTCSSHLIVASLFYATTLFTYTRPHSLRSPSRDKAVAVFYTIVTPLLNPFIYSLRNKEVTGAVRRLLGYWICCRKYDFRSLY

SEQ ID NO: 67731 - protein, 418 aa, Homo sapiens
MKTERPKPNTFIIRCLQWTTVIERTFHVDTPEEREEWTEAIQAVADRLQRQEEERMNCSPTSQIDNIGEEEMDASTTHHKRKTMNDFDYLKLLGKGTFGKVILVREKASGKYYAMKILKKEVIIAKDEVAHTLTESRVLKNTRHPFLTSLKYSFQTKDRLCFVMEYVNGGELFFHLSRERVFSEDRTRFYGAEIVSALDYLHSGKIVYRDLKLENLMLDKDGHIKITDFGLCKEGITDAATMKTFCGTPEYLAPEVLEDNDYGRAVDWWGLGVVMYEMMCGRLPFYNQDHEKLFELILMEDIKFPRTLSSDAKSLLSGLLIKDPNKRLGGGPDDAKEIMRHSFFSGVNWQDVYDKKLVPPFKPQVTSETDTRYFDEEFTAQTITITPPEKYDEDGMDCMDNERRPHFPQFSYSASGRE

SEQ ID NO: 67732 - protein, 105 aa, Homo sapiens
MQDMDEMNDYNESPDDGEVNEVHLSVLPTCGLYHSHPKQLCPESIKLSHSFMPHVYMWLALPFPPPSPSAWPTQNFQIQFKCCSFSMKSQAETTTLSFRFMKGLC

SEQ ID NO: 67733 - protein, 642 aa, Homo sapiens
MVNEARGNSSLNPCLEGSASSGSESSKDSSRCSTPGLDPERHERLREKMRRRLESGDKWFSLEFFPPRTAEGAVNLISRFDRMAAGGPLYIDVTWHPAGDPGSDKETSSMMIASTAVNYCGLETILHMTCCRQRLEEITGHLHKAKQLGLKNIMALRGDPIGDQWEEEEGGFNYAVDLVKHIRSEFGDYFDICVAGYPKGHPEAGSFEADLKHLKEKVSAGADFIITQLFFEADTFFRFVKACTDMGITCPIVPGIFPIQGYHSLRQLVKLSKLEVPQEIKDVIEPIKDNDAAIRNYGIELAVSLCQELLASGLVPGLHFYTLNREMATTEVLKRLGMWTEDPRRPLPWALSAHPKRREEDVRPIFWASRPKSYIYRTQEWDEFPNGRWGNSSSPAFGELKDYYLFYLKSKSPKEELLKMWGEELTSEESVFEVFVLYLSGEPNRNGHKVTCLPWNDEPLAAETSLLKEELLRVNRQGILTINSQPNINGKPSSDPIVGWGPSGGYVFQKAYLEFFTSRETAEALLQVLKKYELRVNYHLVNVKGENITNAPELQPNAVTWGIFPGREIIQPTVVDPVSFMFWKAHPECERNGGSMTLRPDALRWSHSCPAFLLHSAASLGNSTLLRVSPTPASTPPPDNGS

SEQ ID NO: 67734 - protein, 43 aa, Homo sapiens
  MOD_RES (1)..(1): Any amino acid
XSEFRDEVEEIILILVKIKALNQAESFIGEHHLDHLKSLIKED

SEQ ID NO: 67735 - protein, 221 aa, Homo sapiens
MERRRLLGGMALLLLQALPSPLSARAEPPQDKEACVGTNNQSYICDTGHCCGQSQCCNYYYELWWFWLVWTIIIILSCCCVCHHRRAKHRLQAQQRQHEINLIAYREAHNYSALPFYFSWSAVAQSQLTAASTSQAQVIFPLHPPQAGDESTAFCVCEGRRGFLFDLKFLLTLFCLFLAFFSSFEMEFCSCRPGWSAVAQSWLTAISASRVQVILLSQPLK

SEQ ID NO: 67736 - protein, 75 aa, Homo sapiens
MSVLSPEIKCETSKFTRSSFGSCLIFESSWKKAVLETQKIKKEYTTAFGLEELKECIKMPYLPGLQSCQKSAKED

SEQ ID NO: 67737 - protein, 968 aa, Homo sapiens
MVAMDLGSPSLPKKSLPVPGALEQVASRLSSKVAAEVPHGSKQELQDLKAQSLTTCEVCGACFETRKGLSSHARSHLRQLGVAESESSGAPIDLLYELVKQKGLPDAHLGLPPGLAKKSSSLKEVVAGAPRPGLLSLAKPLDAPAVNKAIKSPPGFSAKGLGHPPSSPLLKKTPLALAGSPTPKNPEDKSPQLSLSPRPASPKAQWPQSEDEGPLNLTLDSDGGRELDCQLCGAWFETRKGLSSHARAHLRHLGVSDPDAKGSPIDVLHGLIRRDGVQIRLPPRRGALAHPGRPPPTSAALSLLPPPPPAKKAKLKAAGMASPWGKQDLSAAAAAGIFWASDVEPSPLNLSSGPEPARDIRCEFCGEFFENRKGLSSHARSHLRQMGVTEWYVNGSPIDTLREILKRRTQSRPGGPPNPPGPSPKALAKMMGGAGPGSSLEARSPSDLHISPLAKKLPPPPGSPLGHSPTASPPPTARKMFPGLAAPSLPKKLKPEQIRVEIKREMLPGALHGELHPSEGPWGAPREDMTPLNLSSRAEPVRDIRCEFCGEFFENRKGLSSHARSHLRQMGVTEWSVNGSPIDTLREILKKKSKPCLIKKEPPAGDLAPALAEDGPPTVAPGPVQSPLPLSPLAGRPGKPGAGPAQVPRELSLTPITGAKPSATGYLGSVAAKRPLQEDRLLPAEVKAKTYIQTELPFKAKTLHEKTSHSSTEACCELCGLYFENRKALASHARAHLRQFGVTEWCVNGSPIETLSEWIKHRPQKVGAYRSYIQGGRPFTKKFRSAGHGRDSDKRPSLGLAPGGLAVVGRSAGGEPGPEAGRAADGGERPLAASPPGTVKAEEHQRQNINKFERRQARPPDASAARGGEDTNDLQQKLEEVRQPPPRVRPVPSLVPRPPQTSLVKFVGNIYTLKCRFCEVEFQGPLSIQEEWVRHLQRHILEMNFSKADPPPEESQAPQAQTAAAEAP

SEQ ID NO: 67738 - protein, 289 aa, Homo sapiens
MVNDRWKTMGGAAQLEDRPRDKPQRPSCGYVLCTVLLALAVLLAVAVTGAVLFLNHAHAPGTAPPPVVSTGAASANSALVTVERADSSHLSILIDPRCPDLTDSFARLESAQASVLQALTEHQAQPRLVGDQEQELLDTLADQLPRLLARASELQTECMGLRKGHGTLGQGLSALQSEQGRLIQLLSESQGHMAHLVNSVSDILDALQRDRGLGRPRNKADLQRAPARGTRPRGCATGSRPRDCLDVLLSGQQDDGVYSVFPTHYPAGFQVYCDMRTDGGGWTVFQRRE

SEQ ID NO: 67739 - protein, 86 aa, Homo sapiens
MDQEEGLKALDNIVTQFNAYEDFLDSQITTVDLYYLEDETLARQLVELGYRGTGERVKREDFEARKAAIEIARLAERAQQKCQTLS

SEQ ID NO: 67740 - protein, 603 aa, Homo sapiens
MGVIPEGPLWVSGSDDNLSGTSGMEVDDRVSALEQRLQLQEDELAVLKAALADALRRLRACEEQGAALRARGTPKGRAPPRLGTTASVCQLLKGLPTRTPLNGSGPPRRVGGYATSPSSPKKEATSGRSSVRRYLSPERLASVRREDPRSRTTSSSSNCSAKKEGKTKEVIFSVEDGSVKMFLRGRPVPMMIPDELAPTYSLDTRSELPSCRLKLEWVYGYRGRDCRANLYLLPTGEIVYFVASVAVLYSVEEQRQRHYLGHNDDIKCLAIHPDMVTIATGQVAGTTKEGKPLPPHVRIWDSVSLSTLHVLGLGVFDRAVCCVGFSKSNGGNLLCAVDESNDHMLSVWDWAKETKVVDVKCSNEAVLVATFHPTDPTVLITCGKSHIYFWTLEGGSLSKRQGLFEKHEKPKYVLCVTFLEGGDVVTGDSGGNLYVWGKGGNRITQAVLGAHDGGVFGLCALRDGTLVSGGGRDRRVVLWGSDYSKLQEVEVPEDFGPVRTVAEGHGDTLYVGTTRNSILQGSVHTGFSLLVQGHVEELWGLATHPSRAQFVTCGQDKLVHLWSSDSHQPLWSRIIEVESRSVTQAGGQWHDLGSLQPPPPGFK

SEQ ID NO: 67741 - protein, 391 aa, Homo sapiens
MAEDVSSAAPSPRGCADGRDADPTEEQMAETERNDEEQFECQELLECQVQVGAPEEEEEEEEDAGLVAEAEAVAAGWMLDFLCLSLCRAFRDGRSEDFRRTRNSAEAIIHGLSSLTACQLRTIYICQFLTRIAAGKTLDAQFENDERITPLESALMIWGSIEKEHDKLHEEIQNLIKIQAIAVCMENGNFKEAEEVFERIFGDPNSHMPFKSKLLMIISQKDTFHSFFQHFSYNHMMEKIKSYVNYVLSEKSSTFLMKAAAKVVESKRTRTITSQDKPSGNDVEMETEANLDTRKSVSDKQSAVTESSEGTVSLLRSHKNLFLSKLQHGTQQQDLNKKERRVGTPQSTKKKKESRRATESRIPVSKSQPVTPEKHRARKRQGSSVKRVFFT

SEQ ID NO: 67742 - protein, 90 aa, Homo sapiens
MAVVKTPSRGLKNAKEPFNNASPHLLKNLVEEPKKRKEVPNHLLESKVYAKLVNNKVIQARPGIIHFGGYQVEKQHQQILVLAGSPVLGV

SEQ ID NO: 67743 - protein, 425 aa, Homo sapiens
MSAFDMSHGFFPREPICPFEEKTKIGTMVEDHRSNSYQDSVTFDDVAVEFTPEEWALLDTTQKYLYRDVMLENYMNLASVDFFFCLTSEWEIQPRTKRSSLQQGFLKNQIFTGIQMTRSYSGWKLCENCGEVFSEQFCLKTHMRAQNGGNTFEGNCYGKDSISVHKEASIGQELSKFNPCGKVFTLTPGLAVHLEILNGRQPYKCKECGKGFKYFASLDNHMGIHIGEKLCEFQECERAITTSSHLKQCVAVHTGKKSEKTKNCGKSFTNFSQLSAHAKTHKGEKSFECKECGRSFRNSSSFNVHIQIHTGIKPHKCTECGKAFTRSTHLTQHVRTHTGIKPYECKECGQAFTQYTGLAIHIRNHTGEKPYQCKECGKAFNRSSTLTQHRRIHTGEKPYECVECGKTFITSSHRSKHLKTHSGER

SEQ ID NO: 67744 - protein, 186 aa, Homo sapiens
MTMETVESQHDGSITASLTESKSAHVQTQTGQNSIPALAQVAAIAETDESAESEGVIDSHKRREILSRRPSYRKILNELSSDVPGVPKIEEERSEEEGTPPSIATMAVPTSIYQTSTGQYTATGDMPTYQIRAPTAALPQGVVMAASPGSLHSPQQLAEEATRKRELRLMKNREAAKECRRRKKEY

SEQ ID NO: 67745 - protein, 306 aa, Homo sapiens
MAAPIPQGFSCLSRFLGWWSRQPVLVTQSAAIVPVRTKKRFTPPIYQPKFKTEKEFMQHARKAGLVIPPEKSDRSIHLACTAGIFDAYVPPEGDARISSLSKEGLIERTERMKKTMASQVSIRRIKDYDANFKIKDFPEKAKDIFIEAHLCLNNSDHDRLHTLVTEHCFPDMTWDIKYKTVRWSFVESLEPSHVVQVRCSSMMNQGNVYGQITVRMHTRQTLAIYDRFGRLMYGQEDVPKDVLEYVVFEKQLTNPYGSWRMHTKIVPPWAPPKQPILKTVMIPGPQLKPEEEYEEAQGEAQKPQLA

SEQ ID NO: 67746 - protein, 83 aa, Homo sapiens
MEPFVVLVLCLSFMLLFSLWRQSCRRRKLPPGPTPLPIIGNMLQIDVKDICKSFTNVSLPYVPPANCKGSQKSMVLCSPCILA

SEQ ID NO: 67747 - protein, 158 aa, Homo sapiens
MNSSPAGTPSPQPSRANGNINLGPSANPNAQPTDFDFLKVIGKGNYGKVLLAKRKSDGAFYAVKVLQKKSILKKKEQSHIMAERSVLLKNVRHPFLVGLRYSFQTPEKLYFVLDYVNGGELFFHLQRERRFLEPRARFYAAEVASAIGYLHSLNIIYR

SEQ ID NO: 67748 - protein, 147 aa, Homo sapiens
MESMFSSPAEAALQRETGVPGLLTPLPDLDGVYELERVAGFVRDLGCERVALQFPDQLLGDAVAVAARLEETTGSKMFILGDTAYGRGFGYSPAPTVPGPASLQPSFSPTSGFPESRAYAPRAFWAPLPPCPREASRRVWCLLCRGL

SEQ ID NO: 67749 - protein, 107 aa, Homo sapiens
MEPGGEPTGAKESSTLMESLAAVKAAFLAQAPSGSRSAEVQAAQSTEPAAEAGAPEGEGHRGGPPRALGSLGLCENQEARERPGGSPRGPVTSEKTGGQSGLESDVP

SEQ ID NO: 67750 - protein, 303 aa, Homo sapiens
MAAALRVAAVGARLSVLASGLRAAVRSLCSQATSVNERIENKRRTALLGGGQRRIDAQHKRGKLTARERISLLLDPGSFVESDMFVEHRCADFGMAADKNKFPGDSVVTGRGRINGRLVYVFSQDFTVFGGSLSGAHAQKICKIMDQAITVGAPVIGLNDSGGARIQEGVESLAGYADIFLRNVTASGVIPQISLIMGPCAGGAVYSPALTDFTFMVKDTSYLFITGPDVVKSVTNEDVTQEELGGAKTHTTMSGVAHRAFENDVDALCNLRDFFNYLPLSSQDPAPVRECHDPSPTFCLWLH

SEQ ID NO: 67751 - protein, 169 aa, Homo sapiens
FQYDHEAFLGREVAKEFDQLTPEESQARLGRIVDRMDRAGDGDGWVSLAELRAWIAHTQQRHIRDSVSAAWDTYDTDRDGRVGWEELRNATYGHYAPGEEFHDVEDAETYKKMLARDERRFRVADQDGDSMATREELTAFLHPEEFPHMRDIVIALFFSRIYLLTFLLL

SEQ ID NO: 67752 - protein, 1036 aa, Homo sapiens
MNFSVITCPNGGTNQGLLPYLMALDQYQLEEFKLCLEPQQLMDFWSAPQGHFPRIPWANLRAADPLNLSFLLDEHFPKGQAWKVVLGIFQTMNLTSLCEKVRAEMKENVQTQELQDPTQEDLEMLEAAAGNMQTQGCQDPNQEELDELEEETGNVQAQGCQDPNQEEPEMLEEADHRRKYRENMKAELLETWDNISWPKDHVYIRNTSKDEHEELQRLLDPNRTRAQAQTIVLVGRAGVGKTTLAMQAMLHWANGVLFQQRFSYVFYLSCHKIRYMKETTFAELISLDWPDFDAPIEEFMSQPEKLLFIIDGFEEIIISESRSESLDDGSPCTDWYQELPVTKILHSLLKKELVPLATLLITIKTWFVRDLKASLVNPCFVQITGFTGDDLRVYFMRHFDDSSEVEKILQQLRKNETLFHSCSAPMVCWTVCSCLKQPKVRYYDLQSITQTTTSLYAYFFSNLFSTAEVDLADDSWPGQWRALCSLAIEGLWSMNFTFNKEDTEIEGLEVPFIDSLYEFNILQKINDCGGCTTFTHLSFQEFFAAMSFVLEEPREFPPHSTKPQEMKMLLQHVLLDKEAYWTPVVLFFFGLLNKNIARELEDTLHCKISPRVMEELLKWGEELGKAESASLQFHILRLFHCLHESQEEDFTKKMLGRIFEVDLNILEDEELQASSFCLKHCKRLNKLRLSVSSHILERDLEILETSKFDSRMHAWNSICSTLVTNENLHELDLSNSKLHASSVKGLCLALKNPRCKVQKLTCKSVTPEWVLQDLIIALQGNSKLTHLNFSSNKLGMTVPLILKALRHSACNLKYLCLEKCNLSAASCQDLALFLTSIQHVTRLCLGFNRLQDDGIKLLCAALTHPKCALERLELWFCQLAAPACKHLSDALLQNRSLTHLNLSKNSLRDEGVKFLCEALGRPDGNLQSLNLSGCSFTREGCGELANALSHNHNVKILDLGENDLQDDGVKLLCEALKPHRALHTLGLAKCNLTTACCQHLFSVLSSSKSLVNLNLLGNELDTDGVKMLCFKKTCTM

SEQ ID NO: 67753 - protein, 121 aa, Homo sapiens
MNRFGTRLVGATATSSPPPKARSNENLDKIDMSLDDIIKLNRKEGKKQNFPRLNRRLLQQSGAQQFRMRVRWGIQQNSDTKTLESSIVKHMKRFVLVIPALWEVRARGLLKPRTSGPAWAT

SEQ ID NO: 67754 - protein, 145 aa, Homo sapiens
MEQTVLVPPGPDSFNFFTRESLAAIERRIAEEKAKNPKPDKKDDDENGPKPNSDLEAGKNLPFIYGDIPPEMVSEPLEDLDPYYINKKMEFCSHHPGWSAVARSWLTATSASWVQAILLFSCLSLPSNWDYRDPPPGPANFFVCF

SEQ ID NO: 67755 - protein, 204 aa, Homo sapiens [sequence omitted]

SEQ ID NO: 67756 - protein, 190 aa, Homo sapiens
NKRLTKGGKKGAKKKVVDPFSKKDWYDVKAPAMFNIRNIGKTLVTRTQGTKIASDGLKGRVFEVSLADLQNDEVAFRKFKLITEDVQGKNCLTNFHGMDLTRDKMCSMVKKWQTMIEAHVDVKTTDGYLLRLFCVGFTKKRNNQIRKTSYAQHQQVRQIRKKMMEIMTREDSRQHWKRHRKGLPIYLSSP

SEQ ID NO: 67757 - protein, 382 aa, Homo sapiens
MVSQALRLLCLLLGLQGCLAADGDQCASSPCQNGGSCKDQLQSYICFCLPAFEGRNCETHKDDQLICVNENGGCEQYCSDHTGTKRSCRCHEGYSLLADGVSCTPTVEYPCGKIPILEKRNASKPQGRIVGGKVCPKGECPWQVLLLVNGAQLCGGTLINTIWVVSAAHCFDKIKNWRNLIAVLGEHDLSEHDGDEQSRRVAQVIIPSTYVPGTTNHDIALLRLHQPVVLTDHVVPLCLPERTFSERTLAFVRFSLVSGWGQLLDRGATALELMVLNVPRLMTQDCLQQSRKVGDSPNITEYMFCAGYSDGSKDSCKGDSGGPHATHYRGTWYLTGIVSWGQGCATVGHFGVYTRVSQYIEWLQKLMRSEPRPGVLLRAPFP

SEQ ID NO: 67758 - protein, 312 aa, Homo sapiens
MAGYLRVVRSLCRASGSRPAWAPAALTAPTSQEQPRRHYADKRIKVAKPVVEMDGDEMTRIIWQFIKEKYKATDFVADRAGTFKMVFTPKDGSGVKEWEVYNFPAGGVGMGMYNTDESISGFAHSCFQYAIQKKWPLYMSTKNTILKAYDGRFKDIFQEIFDKHYKTDFDKNKIWYEHRLIDDMVAQVLKSSGGFVWACKNYDGDVQSDILAQGFGSLGLMTSVLVCPDGKTIEAEAAHGTVTRHYREHQKGRPTSTNPIASIFAWTRGLEHRGKLDGNQDLISVKLNEHFLNTTDFLDTIKSNLDRALGRQ

SEQ ID NO: 67759 - protein, 307 aa, Homo sapiens
MHLSNRGGRHVAVKIVKNVDRYCEAARSEIQVLEHLNTTDPNSTFRCVQMLEWFEHHGHICIVFELLGLSTYDFIKENGFLPFRLDHIRKMAYQICKSVNFLHSNKLTHTDLKPENILFVQSDYTEAYNPKIKRDERTLINPDIKVVDFGSATYDDEHHSTLVSTRHYRAPEVILALGWSQPCDVWSIGCILIEYYLGFTVFPTHDSKEHLAMMERILGPLPKHMIQKTRKRKYFHHDRLDWDEHSSAGRYVSRRCKPLKEFMLSQDVEHERLFDLIQKMLEYDPAKRITLREALKHPFFDLLKKSI

SEQ ID NO: 67760 - protein, 921 aa, Homo sapiens
MAVQPKETLQLESAAEVGFVRFFQGMPEKPTTTVRLFDRGDFYTAHGEDALLAAREVFKTQGVIKYMGPAGAKNLQSVVLSKMNFESFVKDLLLVRQYRVEVYKNRAGNKASKENDWYLAYKASPGNLSQFEDILFGNNDMSASIGVVGVKMSAVDGQRQVGVGYVDSIQRKLGLCEFPDNDQFSNLEALLIQIGPKECVLPGGETAGDMGKLRQIIQRGGILITERKKADFSTKDIYQDLNRLLKGKKGEQMNSAVLPEMENQVAVSSLSAVIKFLELLSDDSNFGQFELTTFDFSQYMKLDIAAVRALNLFQGSVEDTTGSQSLAALLNKCKTPQGQRLVNQWIKQPLMDKNRIEERLNLVEAFVEDAELRQTLQEDLLRRFPDLNRLAKKFQRQAANLQDCYRLYQGINQLPNVIQALEKHEGKHQKLLLAVFVTPLTDLRSDFSKFQEMIETTLDMDQVENHEFLVKPSFDPNLSELREIMNDLEKKMQSTLISAARDLGLDPGKQIKLDSSAQFGYYFRVTCKEEKVLRNNKNFSTVDIQKNGVKFTNSKLTSLNEEYTKNKTEYEEAQDAIVKEIVNISSGYVEPMQTLNDVLAQLDAVVSFAHVSNGAPVPYVRPAILEKGQGRIILKASRHACVEVQDEIAFIPNDVYFEKDKQMFHIITGPNMGGKSTYIRQTGVIVLMAQIGCFVPCESAEVSIVDCILARVGAGDSQLKGVSTFMAEMLETASILRSATKDSLIIIDELGRGTSTYDGFGLAWAISEYIATKIGAFCMFATHFHELTALANQIPTVNNLHVTALTTEETLTMLYQVKKGVCDQSFGIHVAELANFPKHVIECAKQKALELEEFQYIGESQGYDIMEPAAKKCYLERENLRVTEPKDQCLILLTWKRKLRGGKRSACSRPERQNQGSGELS

SEQ ID NO: 67761 - protein, 147 aa, Homo sapiens
MTFEDVAVYFSQEEWGLLDTAQRALYRHVMLENFTLVTSLGLSTSRPRVVIQLERGEEPWVPSGKDMTLARNTYGRLNSGSWSLTEDRDVSGEWPRAFPDTPPGMTTSVFPVADACHSVKSLQRQPGASPSQERKPTGVSVIYWERL

SEQ ID NO: 67762 - protein, 114 aa, Homo sapiens
  MOD_RES (1)..(1): Any amino acid
XAAYYSHYYQQPPGPVPGPAPAPAAPPAQGEPPQPPPTGQSDYTKAWEEYYKKIGQQPQQPGAPPQQDYTKAWEEYYKKQAPSSLPPALAQLPRPRPSPLPGLVCCLFICSRGD

SEQ ID NO: 67763 - protein, 83 aa, Homo sapiens
MTINPIYEHVGYTTLNREPAYKKHMPVLKETHDERDSTGQDGVSEKRVHTFRGPHWCEYCANFMWGLIAQGVKCADCGLNVHK

SEQ ID NO: 67764 - protein, 73 aa, Homo sapiens
DGKIMYISETASVHLGLSQVELTGNSIYEYIHPSDHDEMTAVLTAHQPLHHHLLQGIPSRGKKKNRLKARRHS

SEQ ID NO: 67765 - protein, 176 aa, Homo sapiens
MNSQGPPGRGPPSRTKSFNMMSPTGDNSELLAEIKAGKSLKPTPQSKGLTTVFSGIGQPAFQPDSPLPSVSPALSPVRSPTPPAAGFQPLLNGSLVPVPPTTPAPGVQLDVEALIPTHDEQGRPIPEWKRQVMVRKMQLKMQEEEEQRRKEEEEEARLASMPAWRRDLLRKKLEEE

SEQ ID NO: 67766 - protein, 40 aa, Homo sapiens
MARRHCFSYWLLVCWLVVTVAEVETGFHHVSQDGLDLLTS

SEQ ID NO: 67767 - protein, 165 aa, Homo sapiens
MRRAWILLTLGLVACVSAESVRADEDVESPELTTSRPLPKILLTSAAPKVETTTLNIQNKIPAQTKSPEETDKEKVHLSDSERKMDPAEEDTNVYTEKHSDSLFKRTEVLAAVIAGGVIGFLFAIFLILLLVYRMRKKDEGSYDLGERKPSSAAYQKAPTKEFYA

SEQ ID NO: 67768 - protein, 365 aa, Homo sapiens
MFPPSGSTGLIPPSHFQARPLSTLPRMAPTWLSDIPLVQPPGHQDVSERRLDTQRPQVTMWERDVSSDRQEPGRRGRSWGLEGSQALSQQAEVIVRQLQELRRLEEEVRLLRETSLQQKMRLEAQAMELEALARAEKAGRAEAEGLRAALAGAEVVRKNLEEGSQRELEEVQRLHQEQLSSLTQAHEEALSSLTSKAEGLEKSLSSLETRRAGEAKELAEAQREAELLRKQLSKTQEDLEAQVTLVENLRKYVGEQVPSEVHSQTWELERQKLLETMQHLQEDRDSLHATAELLQVRVQSLTHILALQEEELTRKVQPSDSLEPEFTRKCQSLLNRWREKVFALMVQLKAQELEHSDSVKQLKGQ

SEQ ID NO: 67769 - protein, 139 aa, Homo sapiens
MDDDANGDVDVEESDEFLREDLNYHDPTVKHSTFHGEDKLISVEDLWKAWKSSEVYNWTVDEVVQWLITYVELPQYEETFRKLQLSGHAMPRLAVTNTTMTGTVLKMTDRSHRQKLQLKALDTVLFGPPLLTRHNHLKD

SEQ ID NO: 67770 - protein, 90 aa, Homo sapiens
MIDSGEKKPGRRAEEAVTFKDVAVIFTEEELGLLDPAQRKLYRDVMLENFRNLLSVGHQPFHGDTFHFLREEKFWVMGTTSQREGNLGPL

SEQ ID NO: 67771 - protein, 56 aa, Homo sapiens
MATSVGHRCLGLLHGVAPWRSRCQKNPHCPCPNHVPAASPAHSVGDRRRVCRVPAV

SEQ ID NO: 67772 - protein, 283 aa, Homo sapiens
MLLFFTLGLLIHFVFFASIFDIYFTSPLVHGMTPQFTPLPPPARRLVLFVADGLRADALYELDENGNSRAPFIRNIIMHEGSWGISHTRVPTESRPGHVALIAGFYEDVSAVAKGWKENPVEFDSLFNESKYTWSWGSPDILPMFAKGASGDHVYTYSYDAKREDFGAQDATKLDTWVFDNVKDFFHHARNNQSLFSKINEEKIVFFLHLLGIDTNGHAHRPSSRDYKHNIKKVDDGVKEIVSMFNHFYGNDGKTTFIFTSDHGMTDWGSHGAGHPSETLTPL

SEQ ID NO: 67773 - protein, 41 aa, Homo sapiens
MAEMNPAQGHVVFEDVAIYFSQEEWGHLDEAQRLLYRDVML

SEQ ID NO: 67774 - protein, 174 aa, Homo sapiens
MDTMMLNVRNLFEQLVRRVEILSEGNEVQFIQLAKDFEDFRKKWQRTDHELGKYKDLLMKAETERSALDVKLKHARNQVDVEIKRRQRAEADCEKLERQIQLIREMLMCDTSGSIQLSEEQKSALAFLNRGQPSSSNAGNKRLSTIDESGSILSDISFDKTDESLDWDSSLVKT

SEQ ID NO: 67775 - protein, 1237 aa, Homo sapiens
MARAKLPRSPSEGKAGPGGAPAGAAAPEEPHGLSPLLPARGGGSVGSDVGQRLPVEDFSLDSSLSQVQVEFYVNENTFKERLKLFFIKNQRSSLRIRLFNFSLKLLTCLLYIVRVLLDDPALGIGCWGCPKQNYSFNDSSSEINWAPILWVERKMTLWAIQVIVAIISFLETMLLIYLSYKGNIWEQIFRVSFVLEMINTLPFIITIFWPPLRNLFIPVFLNCWLAKHALENMINDFHRAILRTQSAMFNQVLILFCTLLCLVFTGTCGIQHLERAGENLSLLTSFYFCIVTFSTVGYGDVTPKIWPSQLLVVIMICVALVVLPLQFEELVYLWMERQKSGGNYSRHRAQTEKHVVLCVSSLKIDLLMDFLNEFYAHPRLQDYYVVILCPTEMDVQVRRVLQIPLWSQRVIYLQGSALKDQDLMRAKMDNGEACFILSSRNEVDRTAADHQTILRAWAVKDFAPNCPLYVQILKPENKFHVKFADHVVCEEECKYAMLALNCICPATSTLITLLVHTSRGQEGQESPEQWQRMYGRCSGNEVYHIRMGDSKFFREYEGKSFTYAAFHAHKKYGVCLIGLKREDNKSILLNPGPRHILAASDTCFYINITKEENSAFIFKQEEKRKKRAFSGQGLHEGPARLPVHSIIASMGTVAMDLQGTEHRPTQSGGGGGGSKLALPTENGSGSRRPSIAPVLELADSSALLPCDLLSDQSEDEVTPSDDEGLSVVEYVKGYPPNSPYIGSSPTLCHLLPVKAPFCCLRLDKGCKHNSYEDAKAYGFKNKLIIVSAETAGNGLYNFIVPLRAYYRSRKELNPIVLLLDNKPDHHFLEAICCFPMVYYMEGSVDNLDSLLQCGIIYADNLVVVDKESTMSAEEDYMADAKTIVNVQTMFRLFPSLSITTELTHPSNMRFMQFRAKDSYSLALSKLEKRERENGSNLAFMFRLPFAAGRVFSISMLDTLLYQSFVKDYMITITRLLLGLDTTPGSGYLCAMKITEGDLWIRTYGRLFQKLCSSSAEIPIGIYRTESHVFSTSEPHDLRAQSQISVNVEDCEDTREVKGPWGSRAGTGGSSQGRHTGGGDPAEHPLLRRKSLQWARRLSRKAPKQAGRAAAAEWISQQRLSLYRRSERQELSELVKNRMKHLGLPTTGYEDVANLTASDVMNRVNLGYLQDEMNDHQNTLSYVLINPPPDTRLEPSDIVYLIRSDPLAHVASSSQSRKSSCSHKLSSCNPETRDETQL

SEQ ID NO: 67776 - protein, 149 aa, Homo sapiens
MAQKKYLQAKLTQFLREDRIQLWKPPYTDENKKVGLALKDLAKQYSDRLECCENEVEKVIEEIRCKAIERGTGNDNYRTTGIATIEVFLPPRLKKDRKNLLETRLHITGRELRSKAVRGGFRKWHATHMRRRPCGSAPAMGFSRETTEE

SEQ ID NO: 67777 - protein, 89 aa, Homo sapiens
MEVGLPAITLFLTSASSPVVATTMDQEPVGGVERGEAVAASGAAAAAAFGESAGQNLTLLPRLKFMARSRLAATSTSRVQAILLPQPPV

SEQ ID NO: 67778 - protein, 57 aa, Homo sapiens
SQVKGAIDEDVAEGRGEESSGLLPQIMLSRQQLHLPLALLIRGNDNSVKTADDVQGL

SEQ ID NO: 67779 - protein, 168 aa, Homo sapiens
MEETIKDPPTSAVLLDHCHFSQVIFNSVEKFYIPGGDVTCHYTFTQHFIPRRKDWIGIFRVGWKTTPYYLPKDDEYYQFCYVDEDGVVRGASIPFQFRPENEEDILVVTTQGEVEEIEQHNKELCKENQELKDSCISLQKQNSDMQAELQKKQEELETLQSINKKLEL

SEQ ID NO: 67780 - protein, 229 aa, Homo sapiens
MISVKRNTWRALSLVIGDCRKKGNFEYCQDRTEKHSTMPDSPVDVKTQSRLTPPTMPPPPTTQGAPRTSSFTPTTLTNGTSHSPTALNGAPSPPNGFSNGPSSSSSSSLANQQLPPACGARQLSKLKRFLTTLQQFGNDISPEIGERVRTLVLGLVNSTLTIEEFHSKLQEATNFPLRPFVIPFLKANLPLLQRELLHCARLAKQNPAQYLAQHEQLLLDASTTSPVDS

SEQ ID NO: 67781 - protein, 77 aa, Homo sapiens
MGSSGLGKAATLDELLCTCIEMFDDNGELDNSYLPRIVLLMHRWYLSSTELAEKLLCMYRNATGESCNEFRLKICYF

SEQ ID NO: 67782 - protein, 295 aa, Homo sapiens
MATKCGNCGPGYSTPLEAMKGTEAPDYLATVDVDPKSPQYCQVIHRLPMPNLKDELHHSGWNTCSSCFGDSTKSRTKLVLPSLISSRIYVVDVGSEPRAPKLHKVIEPKDIHAKCELAFLHTSHCLASGEVMISSLGDVKGNGKGGFVLLDGETFEVKGTWERPGGAAPLGYDFWYQPRHNVMISTEWAAPNVLRDGFNPADVEAGLYGSHLYVWDWQRHEIVQTLSLKDGLIPLEIRFLHNPDAAQGFVGCALSSTIQRFYKNEGGTWSVEKVIQVPPKKVKGWLLPEMPGLIT

SEQ ID NO: 67783 - protein, 88 aa, Homo sapiens
MGSSEPLPIADGDRRRKKKRRGRATDSLPGKFEDMYKLTSELLGEGAYAKVQGAVSLQNGKEYAVKIIEKQAGHSRSRVFREVETLYQ

SEQ ID NO: 67784 - protein, 684 aa, Homo sapiens
MACLGFLLPVGFLLLISTVAGGKYGVAHVVSENWSKDYCILFSSDYITLPRDLHHAPLLPLYDGTKAPWCPGEDSPHQAQLRSPSQRPLRQTTAMVMRGNCSFHTKGWLAQGQGAHGLLIVSRVSDQQCSDTTLAPQDPRQPLADLTIPVAMLHYADMLDILSHTRGEAVVRVAMYAPPEPIIDYNMLVIFILAVGTVAAGGYWAGLTEANRLQRRRARRGGGSGGHHQLQEAAAAEGAQKEDNEDIPVDFTPAMTGVVVTLSCSLMLLLYFFYDHFVYVTIGIFGLGAGIGLYSCLSPLVCHLSLRQYQRPPHSLWASLPLPLLLLASLCATVIIFWVAYRNEDRWAWLLQDTLGISYCLFVLHRVRLPTLKNCSSFLLALLAFDVFFVFVTPFFTKTGESIMAQVALGPAESSSHERLPMVLKVPRLRVSALTLCSQPFSILGFGDIVVPGFLVAYCCRFDVQVCSRQIYFVACTVAYAVGLLVTFMAMVLMQMGQPALLYLVSSTLLTSLAVAACRQELSLFWTGQGRAKMCGLGCAPSAGSRQKQEGAADAHTASTLERGTSRGAGDLDSNPGEDTTEIVTISENEATNPEDRSDSSEGWSDAHLDPNELPFIPPGASEELMPLMPMAMLIPLMPLMPPPSELGHVHAQAQAHETGLPWAGLHKRKGLKVRKSMSTQAPL

SEQ ID NO: 67785 - protein, 126 aa, Homo sapiens
RVHARIIGARGKAIRKIMDEFKVDIRFPQSGAPDPNCVTVTGLPENVEEAIDHILNLEEEYLADVVDSEALQVYMKPPAHEEAKAPSRGFVVRDAPWTASSSEKVRCGLLPSWVPGRVGGQAGLVS

SEQ ID NO: 67786 - protein, 631 aa, Homo sapiens
MHHQQRMAALGTDKELSDLLDFSAMFSPPVSSGKNGPTSLASGHFTGSNVEDRSSSGSWGNGGHPSPSRNYGDGTPYDHMTSRDLGSHDNLSPPFVNSRIQSKTERGSYSSYGRESNLQGCHQQSLLGGDMDMGNPGTLSPTKPGSQYYQYSSNNPRRRPLHSSAMEVQTKKVRKVPPGLPSSVYAPSASTADYNRDSPGYPSSKPATSTFPSSFFMQDGHHSSDPWSSSSGMNQPGYAGMLGNSSHIPQSSSYCSLHPHERLSYPSHSSADINSSLPPMSTFHRSGTNHYSTSSCTPPANGTDSIMANRGSGAAGSSQTGDALGKALASIYSPDHTNNSFSSNPSTPVGSPPSLSAGTAVWSRNGGQASSSPNYEGPLHSLQSRIEDRLERLDDAIHVLRNHAVGPSTAMPGGHGDMHGIIGPSHNGAMGGLGSGYGTGLLSANRHSLMVGTHREDGVALRGSHSLLPNQVPVPQLPVQSATSPDLNPPQDPYREALAETQESNWAQKCNNDDEDLTPEQKAEREKERRMANNARERLRVRDINEAFKELGRMVQLHLKSDKPQTKLLILHQAVAVILSLEQQVRERNLNPKAACLKRREEEKVSSEPPPLSLAGPHPGMGDASNHMGQM

SEQ ID NO: 67787 - protein, 87 aa, Homo sapiens
MTAEEGVQLSQQNAKDFFRVLNLNKKCDTSKHKVLVVSVCPQSLPYFAAKFNLSVTDASRRLCGFLKSLGVHYVFDTTIAADFSILE

SEQ ID NO: 67788 - protein, 53 aa, Homo sapiens
MFEIKKICCIGAGYVGGPTCSVIAHMCPEIRVTVVDVNESRINAWNSPTLPIY

SEQ ID NO: 67789 - protein, 85 aa, Homo sapiens
  MOD_RES (1)..(1): Any amino acid
XSGGDVTRIGLIVHKTRKQDFQVLAGSAGFLMASYALGAVGGVCALANVLGAQVCQLERLCCTGQWEDAQKLQHRLIEPNAAKIL

SEQ ID NO: 67790 - protein, 1146 aa, Homo sapiens
MCTRIAFCLMEKISWLCRPRRVCLCAASRPWVSSSACTPSPTRALCAPCFFLRVSESRTHRMTGMPQMGRMRSPRCPRALAPPAFLPTGPSSPLPAPETPTAPAAESAPNGLSTVSHDYLKGSYGLDLEAVRGGASHLPHLTRTLATSCRRLHSEVDKVLSGLEILSKVFDQQSSPMVTRLLQQQNLPQTGEQELESLVLKLSVLKDFLSGIQKKALKALQDMSSTAPPAPQPSTRKAKTIPVQAFEVKLDVTLGDLTKIGKSQKFTLSVDVEGGRLVLLRRQRDSQEDWTTFTHDRIRQLIKSQRVQNKLGVVFEKEKDRTQRKDFIFVSARKREAFCQLLQLMKNKHSKQDEPDMISVFIGTWNMGSVPPPKNVTSWFTSKGLGKTLDEVTVTIPHDIYVFGTQENSVGDREWLDLLRGGLKELTDLDYRPIAMQSLWNIKVAVLVKPEHENRISHVSTSSVKTGIANTLGNKGAVGVSFMFNGTSFGFVNCHLTSGNEKTARRNQNYLDILRLLSLGDRQLNAFDISLRFTHLFWFGDLNYRLDMDIQEILNYISRKEFEPLLRVDQLNLEREKHKVFLRFSEEEISFPPTYRYERGSRDTYAWHKQKPTGVRTNVPSWCDRILWKSYPETHIICNSYGCTDDIVTSDHSPVFGTFEVGVTSQFISKKGLSKTSDQAYIEFESIEAIVKTASRTKFFIEFYSTCLEEYKKSFENDAQSSDNINFLKVQWSSRQLPTLKPILADIEYLQDQHLLLTVKSMDGYESYGECVVALKSMIGSTAQQFLTFLSHRGEETGNIRGSMKVRVPTERLGTRERLYEWISIDKDEAGAKSKAPSVSRGSQEPRSGSRKPAFTEASCPLSRLFEEPEKPPPTGRPPAPPRAAPREEPLTPRLKPEGAPEPEGVAAPPPKNSFNNPAYYVLEGVPHQLLPPEPPSPARAPVPSATKNKVAITVPAPQLGHHRHPRVGEGSSSDEESGGTLPPPDFPPPPLPDSAIFLPPSLDPLPGPVVRGRGGAEARGPPPPKAHPRPPLPPGPSPASTFLGEVASGDDRSCSVLQMAKTLSEVDYAPAGPARSALLPGPLELQPPGTALGLWPAPQLPSTPHPGEHPGRPGRGGSVPAGRAGQRAGRGRHECLAAGHRLGAL

SEQ ID NO: 67791 - protein, 64 aa, Homo sapiens
MAEAVFHAPKRKRRVYETYESPLPIPFGQDHGPLKEFKIFRAEMINNNVIVRNAEDIEQLYGKI

SEQ ID NO: 67792 - protein, 136 aa, Homo sapiens
MKRGRLPSSSEDSDDNGSLSTTWSQNSRSQHRRSSCSRHEDRKPSEVFRTDLITAMKLHDSYQLNPDEYYVLADPWRQEWEKGVQVPVSPGTIPQPVARVVSEEKSLMFIRPKKYIVSSGSEPPELGYVDIRTLAD

SEQ ID NO: 67793 - protein, 67 aa, Homo sapiens
MDPQNQHGSGSSLVVIQQPSLDSRQRLDYEREIQPTAILSLDQIKAIRGSNEYTEGPSVVKRPAPRT

SEQ ID NO: 67794 - protein, 46 aa, Homo sapiens
MPGGRRGPSRQQLSRSALPSLQTLVGGGCGNGTGLRNRSCSSLPNS

SEQ ID NO: 67795 - protein, 158 aa, Homo sapiens
MSDNEDNFDGDDFDDVEEDEGLDDLENAEEEGQENVEILPSGERPQANQKRITTPYMTKYERARVLGTRALQIAMCAPVMVELEGETDPLLIAMKELNARSASEPPGEEPPWMDRGTRDEHLPSCPGCPAVASNTRCCPPAACLPGISLSRRRRLREE

SEQ ID NO: 67796 - protein, 1089 aa, Homo sapiens
MDLYSTPAAALDRFVARRLQPRKEFVEKARRALGALAAALRERGGRLGAAAPRVLKTVKGGSSGRGTALKGGCDSELVIFLDCFKSYVDQRARRAEILSEMRASLESWWQNPVPGLRLTFPEQSVPGALQFRLTSVDLEDWMDVSLVPAFNVLGQAGSGVKPKPQVYSTLLNSGCQGGEHAACFTELRRNFVNIRPAKLKNLILLVKHWYHQVCLQGLWKETLPPVYALELLTIFAWEQGCKKDAFSLAEGLRTVLGLIQQHQHLCVFWTVNYGFEDPAVGQFLQRQLKRPRPVILDPADPTWDLGNGAAWHWDLLAQEAASCYDHPCFLRGMGDPVQSWKGPGLPRAGCSGLGHPIQLDPNQKTPENSKSLNAVYPRAGSKPPSCPAPGPTGAASIVPSVPGMALDLSQIPTKELDRFIQDHLKPSPQFQEQVKKAIDIILRCLHENCVHKASRVSKGGSFGRGTDLRDGCDVELIIFLNCFTDYKDQGPRRAEILDEMRAQLESWWQDQVPSLSLQFPEQNVPEALQFQLVSTALKSWTDVSLLPAFDAVGQLSSGTKPNPQVYSRLLTSGCQEGEHKACFAELRRNFMNIRPVKLKNLILLVKHWYRQVAAQNKGKGPAPASLPPAYALELLTIFAWEQGCRQDCFNMAQGFRTVLGLVQQHQQLCVYWTVNYSTEDPAMRMHLLGQLRKPRPLVLDPADPTWNVGHGSWELLAQEAAALGMQACFLSRDGTSVQPWDVMPALLYQTPAGDLDKFISEFLQPNRQFLAQVNKAVDTICSFLKENCFRNSPIKVIKVVKGGSSAKGTALRGRSDADLVVFLSCFSQFTEQGNKRAEIISEIRAQLEACQQERQFEVKFEVSKWENPRVLSFSLTSQTMLDQSVDFDVLPAFDALGQLVSGSRPSSQVYVDLIHSYSNAGEYSTCFTELQRDFIISRPTKLKSLIRLVKHWYQQCTKISKGRGSLPPQHGLELLTVYAWEQGGKDSQFNMAEGFRTVLELVTQYRQLCIYWTINYNAKDKTVGDFLKQQLQKPRFRPIILDPADPTGNLGHNARWDLLAKEAAACTSALCCMGRNGIPIQPWPVKAAV

SEQ ID NO: 67797 - protein, 66 aa, Homo sapiens
IQEIHHKVRPYQVELVRRDYVANGGWETFLSYEDPDQDILIGLLRLRKCSEETFRFELGGGSRKNS

SEQ ID NO: 67798 - protein, 447 aa, Homo sapiens
MVLADLGRKITSALRSLSNATIINEEVLNAMLKEVCTALLEADVNIKLVKQLRENVKSAIDLEEMASGLNKRKMIQHAVFKELVKLVDPGVKAWTPTKGKQNVIMFVGLQGSGKTTTCSKLAYYYQRKGWKTCLICADTFRAGAFDQLKQNATKARIPFYGSYTEMDPVIIASEGVEKFKNENFEIIIVDTSGRHKQEDSLFEEMLQVANAIQPDNIVYVMDASIGQACEAQAKAFKDKVDVASVIVTKLDGHAKGGGALSAVAATKSPIIFIGTGEHIDDFEPFKTQPFISKLLGMGDIEGLIDKVNELKLDDNEALIEKLKHGQFTLRDMYEQFQNIMKMGPFSQILGMIPGFGTDFMSKGNEQESMARLKKLMTIMDSMNDQGGDMSKNVSQSQMAKLNQQMAKMMDPRVLHHMGGMAGLQSMMRQFQQGAAGNMKGMMGFNNM

SEQ ID NO: 67799 - protein, 183 aa, Homo sapiens
MAVYVGMLRLGRLCAGSSGVLGARAALSRSWQEARLQGVRFLSSREVDRMVSTPIGGLSYVQGCTKKHLNSKTVGQCLETTAQRVPEREALVVLHEDVRLTFAQLKEEVDKAASGLLSIGLCKGVCEPSLPGYGTGVCPQEGGLQGPCVPQAIQDPAILQRPEADLSRSGECPARGLEESEAP

SEQ ID NO: 67800 - protein, 101 aa, Homo sapiens
MGENEDEKQAQAGQVFENFVQASTCKGTLQAFNILTRHLDLDPLDHRNFYSKLKSKVTTWKAKALWYKLDKRGSHKEYKRGKSCTNTKCLIVGGGPCGLRT

SEQ ID NO: 67801 - protein, 104 aa, Homo sapiens
MLKKQSAGLVLWGAILFVAWNALLLLFFWTRPAPGRPPSVSALDGDPASLTREVIRLAQDAEVELERQRGLLQQIGDALSSQRGRVPTAAPPAQPRVPVTPAPA

SEQ ID NO: 67802 - protein, 231 aa, Homo sapiens
MVMAYFVENFWGEKNSGFDVLYHNMKHGQISTKELADFVRERTFAPVWDVFKTSTEKLANCHLDLVRKLQELIKEVQKYGEEQVKSHKKTKEEVAGTLEAVQTIQSITQALQKSKENYNAKCVEQERLKKEGATQREIEKAAVKSKKATDTYKLYVEKYALAKADFEQKMTETAQKFQDIEETHLIHIKEIIGSLSNAIKEIHLQIGQVHEEFINNMANTTVESLIQKFAE

SEQ ID NO: 67803 - protein, 1774 aa, Homo sapiens
MKKIHRHRLSPATEKGAASSGEGDKDPPPPAHEDIAVKGTATAAGTGPGTGAAAAAAAAVPPPHPAAAAAAAAAAAAAAAAAVPPPHPNIRALQTQAPQQIPRGPVQQPLEDRIFTPAVSAVYSTVTQVARQPGTPTPSPYSAHEINKGHPNLAATPPGHASSPGLSQTPYPSGQNAGPTTLVYPQTPQTMNSQPQTRSPFFQRPQIQPPRATIPNSSPSIRPGAQTPTAVYQANQHIMMVNHLPMPYPVPQGPQYCIPQYRHSGPPYVGPPQQYPVQPPGPGPFYPGPGPGDFPNAYGTPFYPSQPVYQSAPIIVPTQQQPPPAKREKKTIRIRDPNQGGKDITEEIMSGGGSRNPTPPIGRPTSTPTPPQLPSQVPEHSPVVYGTVESAHLAASTPVTAASDQKQEEKPKPDPVLKSPSPVLRLVLSGEKKEQEGQTSETTAIVSIAELPLPPSPTTVSSVARSTIAAPTSSALSSQPIFTTAIDDRCELSSPREDTIPIPSLTSCTETSDPLPTNENDDDICKKPCSVAPNDIPLVSSTNLINEINGVSEKLSATESIVEIVKQEVLPLTLELEILENPPEEMKLECIPAPITPSTVPSFPPTPPTPPASPPHTPVIVPAAATTVSSPSAAITVQRVLEEDESIRTCLSEDAKEIQNKIEVEADGQTEEILDSQNLNSRRSPVPAQIAITVPKTWKKPKDRTRTTEEMLEAELELKAEEELSIDKVLESEQDKMSQGFHPERDPSDLKKVKAVEENGEEAEPVRNGAESVSEGEGIDANSGSTDSSGDGVTFPFKPESWKPTDTEGKKQYDREFLLDFQFMPACIQKPEGLPPISDVVLDKINQPKLPMRTLDPRILPRGPDFTPAFADFGRQTPGGRGVPLLNVGSRRSQPGQRREPRKIITVSVKEDVHLKKAENAWKPSQKRDSQADDPENIKTQELFRKVRSILNKLTPQMFNQLMKQVSGLTVDTEERLKGVIDLVFEKAIDEPSFSVAYANMCRCLVTLKVPMADKPGNTVNFRKLLLNRCQKEFEKDKADDDVFEKKQKELEAASAPEERTRLHDELEEAKDKARRRSIGNIKFIGELFKLKMLTEAIMHDCVVKLLKNHDEESLECLCRLLTTIGKDLDFEKAKPRMDQYFNQMEKIVKERKTSSRIRFMLQDVIDLRLCNWVSRRADQGPKTIEQIHKEAKIEEQEEQRKVQQLMTKEKRRPGVQRVDEGGWNTVQGAKNSRVLDPSKFLKITKPTIDEKIQLVPKAQLGSWGKGSSGGAKASETDALRSSASSLNRFSALQPPAPSGSTPSTPVEFDSRRTLTSRGSMGREKNDKPLPSATARPNTFMRGGSSKDLLDNQSQEEQRREMLETVKQLTGGVDVERNSTEAERNKTRESAKPEISAMSAHDKAALSEEELERKSKSIIDEFLHINDFKEAMQCVEELNAQGLLHVFVRVGVESTLERSQITRDHMGQLLYQLVQSEKLSKQDFFKGFSETLELADDMAIDIPHIWLYLAELVTPMLKEGGISMRELTIEFSKPLLPVGRAGVLLSEILHLLCKQMSHKKVGALWREADLSWKDFLPEGEDVHNFLLEQKLDFIESDSPCSSEALSKKELSAEELYKRLEKLIIEDKANDEQIFDWVEANLDEIQMSSPTFLRALMTAVCKAAIIADSSTFRVDTAVIKQRVPILLKYLDSDTEKELQALYALQASIVKLDQPANLLRMFFDCLYDEEVISEDAFYKWESSKDPAEQNGKGVALKSVTAFFTWLREAEEESEDN

SEQ ID NO: 67804 - protein, 259 aa, Homo sapiens
MRETSGFTLKKGRSAPLVFHPPDALIAVPFDDDDKIVGGYTCEENSLPYQVSLNSGSHFCGGSLISEQWVVSAAHCYKTRIQVRLGEHNIKVLEGNEQFINAAKIIRHPKYNRDTLDNDIMLIKLSSPAVINARVSTISLPTTPPAAGTECLISGWGNTLSFGADYPDELKCLDAPVLTQAECKASYPGKITNSMFCVGFLEGGKDSCQRDSGGPVVCNGQLQGVVSWGHGCAWKNRPGVYTKVYNYVDWIKDTIAANS

SEQ ID NO: 67805 - protein, 153 aa, Homo sapiens
EPNAHRKDGTRLGLGSLRQAFSRASQRALTQVSKEDTGLFRRSSCSLFRSFRQALNDGPATGHSQATPEVPSGVMNGVSQQASTGAASEELKPEAVLTSWAPRGWRCPPSRCLRSWRRTCGPDWRATTPASWRPRSQAASTASCSWSRVTGRP

SEQ ID NO: 67806 - protein, 342 aa, Homo sapiens
MTAVNVALIRDTKWLTLEVCREFQRGTCSRADADCKFAHPPRVCHVENGRVVACFDSLKGRCTRENCKYLHPPPHLKTQLEINGRNNLIQQKTAAAMFAQQMQLMLQNAQMSSLGSFPMTPSIPANPPMAFNPYIPHPGMGLVPAELVPNTPVLIPGNPPLAMPGAVGPKLMRSDKLEVCREFQRGNCTRGENDCRYAHPTDASMIEASDNTVTICMDYIKGRCSREKCKYFHPPAHLQARLKAAHHQMNHSAASAMALQPGTLQLIPKRSALEKPNGATPVFNPTVFHCQQALTNLQLPQPAFIPAVPMMHGATPTTVSAATTPATSVPFAAPTTGNQLKF

SEQ ID NO: 67807 - protein, 155 aa, Homo sapiens
GLDYQSCPTSEDCENNPVDSFWKRASIQYSKDSSGVIHVMLNGSEPTGAYPIKGFFADYEIPNLQKEKITRIEIWVMHEIGGPNVESCGEGSMKVLEKRLKDMGFQYSCINDYRPVKLLQCVDHSTHPDCALKSPKRLCGTLGVRPRAEPYNRRF

SEQ ID NO: 67808 - protein, 124 aa, Homo sapiens
  MOD_RES (1)..(1): Any amino acid
XLCVFSFYTLGVMSGAAEEVATGAEVVDLLVAMCRAALESPRKSIIFEPYPSVVDPTDPKTLAFNPKKKNYERLQKALDSVMSIREMTQGSYLEIKKQMDKLDPLAHPLLQWNGKRTAQDALQG

SEQ ID NO: 67809 - protein, 466 aa, Homo sapiens
METGQRTHASGTYSFLDRTQHSDIKADCNTCVEIEDRKVSRQQMNCEREQLRGNQEAAAAPDTMAQPYASAQFAPPQNGIPAEYTAPHPHPAPEYTGQTTVPEHTLNLYPPAQTHSEQSPADTSAQTVSGTATQTDDAAPTDGQPQTQPSENTENKSQPKRLHVSNIPFRFRDPDLRQMFGQFGKILDVEIIFNERGSKGFGFVTFENSADADRAREKLHGTVVEGRKIEVNNATARVMTNKKTVNPYTNGWKLNPVVGAVYSPEFYAGTVLLCQANQEGSSMYSAPSSLVYTSAMPGFPYPAATAAAAYRGAHLRGRGRTVYNTFRAAAPPPPIPAYGGVVYQDGFYGADIYGGYAAYRYAQPTPATAAAYSDRNQFVFVAADEISCNTSAVTDEFMLPTPTTTHLLQPPPTALVPCPKVPAPAQTSEELSCTLPGLCCQAAENLTASPPLLQFMFKVIVAQERK

SEQ ID NO: 67810 - protein, 414 aa, Homo sapiens
TLKDPHYPDHDLGIILLSVILTPKEGESRDVELSENEVVGSYFSVKSLFWRFQTQSLRLSDLHRKSHLWRGIVSITLIEGRDLKAMDSNGLSDPYVKFRLGHQKYKSKIMPKTLNPQWREQFDFHLYEERGGVIDITAWDKDAGKRDDFIGRCQVDLSALSREQTHKLELQLEEGEGHLVLLVTLTASATVSISDLSVNSLEDQKEREEILKRYSPLRIFHNLKDVGFLQVKVIRAEGLMAADVTGKSDPFCVVELNNDRLLTHTVYKNLNPEWNKVFTFNIKDIHSVLEVTVYDEDRDRSADFLGKVAIPLLSIQNGEQKAYVLKNKQLTGPTKGVIYLEIDVIFNAVKASLRTLIPKEQKYIEEENRLSKQLLLRNFIRMKRCVMVLVNAAYYVNSCFDWDSPPRSLAAFVV

SEQ ID NO: 67811 - protein, 43 aa, Homo sapiens
MITCRVCQSLINVEGKMHQHVVKCGVCNEATPIKNAPPGKKYV

SEQ ID NO: 67812 - protein, 35 aa, Homo sapiens
MAATAAEAVASGSGEPREEAGALGPAWDESQSLWC

SEQ ID NO: 67813 - protein, 167 aa, Homo sapiens
SKPSHSVDAHTAEVNCLSFNPYSEFILATGSADKTVALWDLRNLKLKLHSFESHKDEIFQVQWSPHNETILASSGTDRRLNVWDLSKIGEEQSPEDAEDGPPELLFIHGGHTAKISDFSWNPNEPWVICSVSEDNIMQVWQMGRQRTFIMMKTLKEAWIQKDKGVSP

SEQ ID NO: 67814 - protein, 172 aa, Homo sapiens
PSSKRRRVEGPAKPNREDVSSSQEESLQLNSIPPTPTLTSTAVKSRQPLWGLKEMEEEDGSELDFAQGSQPVAGTERSRFLGPQYFQTPHNPSGPGLGNQLMRLSLMEEDEEEELEIQDESNEERQDTDMQASSYSSTSERGLDLLDSTELDIEITESLPLLGKSPHPYNSR

SEQ ID NO: 67815 - protein, 325 aa, Homo sapiens
MLVFAEHRYYGESLPFGDNSFKDSRHLNFLTSEQALADFAELIKHLKRTIPGAENQPVIAIGGSYGGMLAAWFRMKYPHMVVGALAASAPIWQFEDLVPCGVFMKIVTTDFRKSGPHCSESIHRSWDAINRLSNTGSGLQWLTGALHLCSPLTSQDIQHLKDWISETWVNLAMVDYPYASNFLQPLPAWPIKVVCQYLKNPNVSDSLLLQNIFQALNVYYNYSGQVKCLNISETATSSLGTLGWSYQACTEVVMPFCTNGVDDMFEPHSWNLKELSDDCFQQWGVRPRPSWITTMYGGKNISSHTNIVFRRSFTMLPRLVLNSWA

SEQ ID NO: 67816 - protein, 127 aa, Homo sapiens
  MOD_RES (1)..(1): Any amino acid
XSSKKPAGLVLGLLLLKGLQEGRLSHVVLDQKGDQHRESPRGHWTLQALKNMGEILKAAGCDFTNVVKTTVLLADINDFNTVNEIYKQYFKSNFPARAAYQVAALPKGSRIEIEAVAIQGPLTTASL

SEQ ID NO: 67817 - protein, 69 aa, Homo sapiens
SSHSPHPLFASQQRDPSTFYPWLIHRYRYLGHRFQGKSMVSEPKNKVQKAEAGGRRLRFATKEKRDAPY

SEQ ID NO: 67818 - protein, 115 aa, Homo sapiens
MAGQDPALSTSHPFYDVARHGILQVAGDDRFGRRVVTFSCCRMPPSHELDHQRLLEYLKYTLDQYVENDYTIVYFHYGLNSRNKPSLGWLQSAYKEFDRKYKKNLKALYVVHPTS

SEQ ID NO: 67819 - protein, 127 aa, Homo sapiens
MVISVLAAAVSLLYFSVVIIRNKYGRLTRDKKFQRYLARVTDIEATDTNNPNVNYGIVVDCGSSGSRVFVYCWPRHNGNPHDLLDIRQMRDKNRKPVVMKIKPGISEFATSPEKVSDYISPLLNFAA

SEQ ID NO: 67820 - protein, 138 aa, Homo sapiens
MGAYKYIQELWRKKQSDVMRFLLRVRCWQYRQLSALHRAPRPTRPDKARRLGYKAKQGYVIYRIRVRRGGRKRPVPKGATYGKPVHHGVNQLKFARSLQSVAEERAGRHCGALRVLNSYWVGEDSTYKFFEVILIDPF

SEQ ID NO: 67821 - protein, 165 aa, Homo sapiens
  MOD_RES (1)..(1): Any amino acid
XGGVDAGLRVGGRCVHKQTGRHATLLGVVKEGSTSAKVQWDEAEITISDTPLYNLEPCEPLPFDVARFRGLTASVLLDLTYLTGVHEDMGKQSTKRHEKKHRHESEEKGDVEQKPESESALDMRTGLTSDDVKSQSTTSSKSENEIASFSLDPTLPSVESQHQIT

SEQ ID NO: 67822 - protein, 73 aa, Homo sapiens
MSEVSCKKRDDYLEWPEYFMAVAFLSAQRSKDPNSQVGACIVNSENKIVGIGYNGMPNGCSDDVLPWRRTAEN

SEQ ID NO: 67823 - protein, 99 aa, Homo sapiens
  MOD_RES (1)..(1): Any amino acid
XFRAKEYESLMETKNSGSDSPYKAKLQRLAKDLLKQVQVQDSGSWANNKVSALDRTLGEITRILEKEVYTVWKAMHISTRQDIHKCSMAALFIITTYGK

SEQ ID NO: 67824 - protein, 44 aa, Homo sapiens
MQPGATTCTEDRIQHALERCLHGLSLSRRSTSWSAGLCLNCWSL

SEQ ID NO: 67825 - protein, 89 aa, Homo sapiens
  MOD_RES (1)..(1): Any amino acid
XCKECGKMFSHGSQLTQHQRIHTGEKPYQCKECGKAFNRGSLLTRHQRIHTGEKPYECKECGKTFSRGSELTQHERIHTAGAPLLSWGL

SEQ ID NO: 67826 - protein, 106 aa, Homo sapiens
MKRRVKSGTHLMCSLEVHTVTRKPMSWHDNLEEPADARFLNLIHHAAQGPRKKYPETQTENQEVGWDLEPLINPERHDRRLNHFRVCSDITLYKAKTWGLGDDHHK

SEQ ID NO: 67827 - protein, 93 aa, Homo sapiens
MRGERRPLWEEESNAKGGVWKMKVPKDSTSTVWKELLLATIGEQFTDCAAADDEVIGVSVSVRDREDVVQVWNVNASLVGEATVLEKIYELLP

SEQ ID NO: 67828 - protein, 202 aa, Homo sapiens
MENEPDHENVEQSLCAKTSEEELNKSFNLEASLSKFSYIDMDKELEFKNDLIDDKEFDIPQVDTPPTLESILNETDDEDESFILEDPTLLNIDTIDSHSYDTSSVASSDSGDRTNLKRKKKLPDSFSLHGSVMRHSLLKGISAQIVSAADKVDAGLPTAIAVSSLIAVGTSHGLALIFDQNQALRLCLGSTSVGGQYGAISA

SEQ ID NO: 67829 - protein, 424 aa, Homo sapiens
MINNHRNQALYFSEHKYFQQTQVVYQGDIFWVFLCVFCLRKECVLMQGCFSAGVIPDEAKALSLLAPANAVAGLLPGGGLLPTPNPLTQIGAVPLAALGAPTLDPALAALGLPGANLNSQSLAADQLLKLMSTVDPKLNHVAAGLVSPSLKSDTSSKEIEEAMKRVREAQSLISAAIEPDKKEEKRRHSRSRSRSRRRRTPSSSRHRRSRSRSRRRSHSKSRSRRRSKSPRRRRSHSRERGRRSRSTSKTRDKKKEDKEKKRSKTPPKSYSTARRSRSASRERRRRRSRSGTRSPKKPRSPKRKLSRSPSPRRHKKEKKKDKDKERSRDERERSTSKKKKSKDKEKDRERKSESDKDVKQVTRDYDEEEQGYDSEKEKKEEKKPIETGSPKTKECSVEKGTGDSLRESKVNGDDHHEEDMDMSD

SEQ ID NO: 67830 - protein, 75 aa, Homo sapiens
MATSHRVAKLVASSLQTPVNPITGARVAQYEREDPLKALAAAEAILEDEEEEKVAQPAGASRWGFTMLARLVSDS

SEQ ID NO: 67831 - protein, 1256 aa, Homo sapiens
MASCSFTRDQATRRLRGAAAAAAAALAAVVTTPLLSSGTPTALIGTGSSCPGAMWLSTATGSRSDSESEEEDLPVGEEVCKRGYLRKQKHGHRRYFVLKLETADAPARLEYYENARKFRHSVRAAAAAAAAAASGAAIPPLIPPRRVITLYQCFSVSQRADARYRHLIALFTQDEYFAMVAENESEQESWYLLLSRLILESKRRRCGTLGAQPDGEPAALAAAAAAEPPFYKDVWQVIVKPRGLGHRKELSGVFRLCLTDEEVVFVRLNTEVASVVVQLLSIRRCGHSEQYFFLEVGRSTVIGPGELWMQVDDCVVAQNMHELFLEKMRALCADEYRARCRSYSISIGAHLLTLLSARRHLGLVPLEPGGWLRRSRFEQFCHLRAIGDGEDEMLFTRRFVTPSEPVAHSRRGRLHLPRGRRSRRAVSVPASFFRRLAPSPARPRHPAEAPNNGARLSSEVSGSGSGNFGEEGNPQGKEDQEGSGGDYMPMNNWGSGNGRGSGGGQGSNGQGSSSHSSGGNQCSGEGQGSRGGQGSNGQGSGGNQCSRDGQGTAGGHGSGGGQRPGGGHGSGGGQGPGDGHGSGGGKNSGGGKGSGSGKGSDGDGERGKSLKKRSYFGKLTQSKQQQMPPPPPPPPPPPPAGGTGGKGKSGGRFRLYFCVDRGATKECKEAKEVKDAEIPEGAARGPHRARAFDEDEDDPYVPMRPGVATPLVSSSDYMPMAPQNVSASKKRHSRSPFEDSRGYMMMFPRVSPPPAPSPPKAPDTNKEDDSKDNDSESDYMFMAPGAGAIPKNPRNPQGGSSSKSWSSYFSLPNPFRSSPLGQNDNSEYVPMLPGKFLGRGLDKEVSYNWDPKDAASKPSGEGSFSKPGDGGSPSKPSDHEPPKNKAKRPNRLSFITKGYKIKPKPQKPTHEQREADSSSDYVNMDFTKRESNTPAPSTQGLPDSWGIIAEPRQSAFSNYVNVEFGVPFPNPANDLSDLLRAIPRANPLSLDSARWPLPPLPLSATGSNAIEEEGDYIEVIFNSAMTPAMALADSAIRYDAETGRIYVVDPFSECCMDISLSPSRCSEPPPVARLLQEEEQERRRPQSRSQSFFAAARAAVSAFPTDSLERDLSPSSAPAVASAAEPTLALSQVVAAASALAAAPGIGAAAAAAGFDSASARWFQPVANAADAEAVRGAQDVAGGSNPGAHNPSANLARGDNQAGGAAAAAAAPEPPPRSRRVPRPPEREDSDNDDDTHVRMDFARRDNQFDSPKRE

SEQ ID NO: 67832 - protein, 67 aa, Homo sapiens
MMKMRTPQYSTSNTGKTCFPAWWHPVESWSAATWGVKDWTWKPSCVGGVETKTNVMYKTPAPSCVSG

SEQ ID NO: 67833 - protein, 488 aa, Homo sapiens
  MOD_RES (1)..(1): Any amino acid
XAIEEADFFAIDGEFSGISDGPSVSALTNGFDTPEERYQKLKKHSMDFLLFQFGLCTFKYDYTDSKYITKSFNFYVFPKPFNRSSPDVKFVCQSSSIDFLASQGFDFNKVFRNGIPYLNQEEERQLREQYDEKRSQANGAGALSYVSPNTSKCPVTIPEDQKKFIDQVVEKIEDLLQSEENKNLDLEPCTGFQRKLIYQTLSWKYPKGIHVETLETEKERYIVISKVDEEERKRREQQKHAKEQEELNDAVGFSRVIHAIANSGKLVIGHNMLLDVMHTVHQFYCPLPADLSEFKEMTTCVFPRLLDTKLMASTQPFKDIINNTSLAELEKRLKETPFNPPKVESAEGFPSYDTASEQLHEAGYDAYITGLCFISMANYLGSFLSPPKIHVSARSKLIEPFFNKLFLMRVMDIPYLNLEGPDLQPKRDHVLHVTFPKEWKTSDLYQLFSAFGNIQISWIDDTSAFVSLSQPEQVKIVSCRFTLRMRST

SEQ ID NO: 67834 - protein, 89 aa, Homo sapiens
MAAATGAVAASAASGQAEGKKITDLRVIDLKSELKRRNLDITGVKTVLISRLKQAIEEEGGDPDNIELTVSTDTPNKKPTKGKDYKLKH

SEQ ID NO: 67835 - protein, 22 aa, Homo sapiens
VVSCLDVRCETLLPWLVNPAPS

SEQ ID NO: 67836 - protein, 104 aa, Homo sapiens
MANMQGLVERLERAVSRLESLSAESHRPPGNCGEVNGVIAGVAPSVEAFDKLMDSMVAEFLKNSRILAGDVETHAEMVHSAFQAQRAFLLMASQYQQPHEANKF

SEQ ID NO: 67837 - protein, 44 aa, Homo sapiens
MGDKKSPTRSTLFEVIVSASRTKEPLKFPISGSSSGCPSGRFSC

SEQ ID NO: 67838 - protein, 300 aa, Homo sapiens
MMGRRRAFAVDGRDGAGEGLARGCIVPGVTSTYRRIPDAAHGCSSWERGDKFRGVGREALFLKLASRDSGVEMAVGDSPLAALPGLSQDSLDFESSGSSEPPAQVGRLLASQKLGEVLERSRRLPTAPTSLSGQHRSLRLASKPEREVPLGAGQQESMEADTDLEAGLEEEAVGGLGPGAWACLPGQGLRYLEHLCLVLEQMARLQQLYLQLRIQRPPGDPGEEESTRAPLPSPLHTPGNRGQGPWELLSQTEHTGAKAASPPKVEVPSANPPRLPETPVEPTYHLPSSQGHKDRVQGPP

SEQ ID NO: 67839 - protein, 260 aa, Homo sapiens
MEREKEQFRKLFIGGLSFETTEESLRNYYEQWGKLTDCVVMRDPASKRSRGFGFVTFSSMAEVDAAMAARPHSIDGRVVEPKRAVAREESGKPGAHVTVKKLFVGGIKEDTEEHHLRDYFEEYGKIDTIEIITDRQSGKKRGFGFVTFDDHDPVDKIVLQKYHTINGHNAEVRKALSRQEMQEVQSSRSGRGGNFGFGDSRGGGGNFGPGPGSNFRGGSDGYGSGRGFGDGYNGYGGGPGGNYGPGGSGGSGGYGGRSRY

SEQ ID NO: 67840 - protein, 101 aa, Homo sapiens
MSKVNLEVIKPWITKRVTEILGFEDDVVIEFIFNQLEVKNPDSKMMQINLTGFLNGKNAREFMGELWPLLLSAQENIAGIPSAFLELKKEEIKQRQIEQEK

SEQ ID NO: 67841 - protein, 158 aa, Homo sapiens
MLRTESCRPRSPAGQVAAASPLLLLLLLLAWCAGACRGAPILPQGLQPEQQLQLWNEASNALEELCFMIMGMLPKPQEQDEKDNTKRFLFHYSKTQKLGKSNVVSSVVHPLLQLVPHLHERRMKRFRVDEEFQSPFASQSRGYFLFRPRNGRRSAGFI

SEQ ID NO: 67842 - protein, 149 aa, Homo sapiens
GPPGEPGRPGSPGAPGEQGPPGTPGFPGNAGVPGTPGERGLTGIKGEKGNPGVGTQGPRGPPGPAGPSGESRPGSPGPPGSPGPRGPPGHLGVPGPQGPSGQPGYCDPSSCSAYGVRGWMGIFLLDHPTLPSSPDHLPSLLFPGDGLLT

SEQ ID NO: 67843 - protein, 133 aa, Homo sapiens
MEEEIAALVIDNGSGMCKAGFAGDDAPRAVFPSIVGRPRHQGVMVGMGQKDSYVGDEAQSKRGILTLKYPIEHGIVTNWDDMEKIWHHTFYNELRVAPEEHPVLLTEAPLNPKAVLSLYASGRTTGIVMDSGD

SEQ ID NO: 67844 - protein, 313 aa, Homo sapiens
MADSSEGPRAGPGEVAELPGDESGTPGGEAFPLSSLANLFEGEDGSLSPSPADASRPAGPGDGRPNLRMKFQGAFRKGVPNPIDLLESTLYESSVVPGPKKAPMDSLFDYGTYRHHSSDNKRWRKKIIEKQPQSPKAPAPQPPPILKVFNRPILFDIVSRGSTADLDGLLPFLLTHKKRLTDEEFREPSTGKTCLPKALLNLSNGRNDTIPVLLDIAERTGNMREFINSPFRDIYYRGPWMTVPCPQVRQPCTSPLSVAANTTWNFSWPRELMSTPRPVGASSSPRMRGATSTLGSCPCRWLPAPTSPTLSTT

SEQ ID NO: 67845 - protein, 119 aa, Homo sapiens
LHQAKEDLTRLLRDYQELMNVKLALDVEIATYRKLLESEESRMSGECPSAVSICEYLLPTSCSTPGQAPELCSVYATCTCPKACSPPFEPLETGSEGPSSGLLYPFPIALLLDFVLIPH

SEQ ID NO: 67846 - protein, 103 aa, Homo sapiens
MGIWQRLLLFGGVSLRAGGGATAPLGGSRAMVCGRQLSGAGSETLKQRRTQIMSRGLPKQKPIEGVKQVIVVASGKGGVGKSTTAVETGFHRVNQDGLHLLIS

SEQ ID NO: 67847 - protein, 122 aa, Homo sapiens
MARKALKLASWTSMALAASGIYFYSNKYLDPNDFGAVRVGRAVATTAVISYDYLTSLKSVPYGSEEYLQLRSKSLAVSPRLECIGVISAHCNLYLLGSSDSPASASQVAGTTGAPSLCQASL

SEQ ID NO: 67848 - protein, 44 aa, Homo sapiens
MVPAAGRRPPRVMRLLGWCCRGKWSLMVRGAACSPSPGGGCVPG

SEQ ID NO: 67849 - protein, 140 aa, Homo sapiens
MMAKNKEPRPPSYTISIVGLSGTEKDKGNCGVGKSCLCNRFVRSKADEYYPEHTSVLSTIDFGGRVVNNDHFLYWGDIIQNSEDGVECKIHVIEQTEFIDDQTFLPHRSTNLQPYIKRAAASKLQSAEKLMYICTDQLGL

SEQ ID NO: 67850 - protein, 741 aa, Homo sapiens
  MOD_RES (1)..(1): Any amino acid
XDSLALQPKLTRHKELASENINLRTRKYSSSSLSHMGAYSRSLPRLYRATENQLTPLSLPPRNSLGNSKRTKLGEKDLPHSVIDNDNYLNFSSLSSGALPYKTSASEGNPYVSSTLSVPASPRVARKMLLASTSSCASDDFDQASYVGTNPSHSLLAGESDRVFATRRNFSCGSVEFDEADLESLRQASGTPQPALRERKSSISSISGRDDLMDYHRRQREERLREQEMERLERQRLETILSLCAEYTKPDSRLSTGTTVEDVQKINKELEKLQLSDEESVFEEALMSPDTRYRCHRKDSLPDADLASCGSLSQSSASFFTPRSTRNDELLSDLTRTPPPPSSTFPKASSESSYLSILPKTPEGISEEQRSQELAAMEETRIVILNNLEELKQKIKDINDQMDESFRELDMECALLDGEQKSETTELMKEKEILDHLNRKIAELEKNIVGEKTKEKVKLDAEREKLERLQELYSEQKTQLDNCPESMREQLQQQLKRDADLLDVESKHFEDLEFQQLEHESRLDEEKENLTQQLLREVAEYQRNIVSRKEKISALKKQANHIVQQAQREQDHFVKEKNNLIMMLQREKENLCNLEKKYSSLSGGKGFPVNPNTLKEGYISVNEINEPCGNSTNLSPSTQFPADADAVATEPATAVLASQPQSKEQRSPVYSGFVFPSALSPHPITQHTSAPWPEFMATSVDPLPLNDTPPPLPAKKHRRQQQQQEQQHFRSLEERKKQHKE

SEQ ID NO: 67851 - protein, 123 aa, Homo sapiens
  MOD_RES (1)..(1): Any amino acid
XEVLVVRTLGFIETVYSKWEIKRCQCCGSSGTHLACSSLRSWEQNWECLECRGIIYNSGEFQKAKKHVLPNSNNVGITDCLLEESSPKLPRQSPGSQSKDLLRQGSKFRRNVSTLLIELGFQI

SEQ ID NO: 67852 - protein, 188 aa, Homo sapiens; identical to SEQ ID NO: 3343

SEQ ID NO: 67853 - protein, 434 aa, Homo sapiens
MHVYSLAEAPAGRMIQSDKGADPPDKKDMKLSTATNPQNGLSQILRLVLQELSLFYGRDVNGVCLLYDLLHSPWLQALLKIYDCLQEFKEKKLVPATPHAQVLSYEVVELLRETPTSPEIQELRQMLQAPHFKALLSAHDTIAQKDFEPLLPPLPDNIPESEEAMRIVCLVKNQQPLGATIKRHEMTGDILVARIIHGGLAERSGLLYAGDKLVEVNGVSVEGLDPEQVIHILAMSRGTIMFKVVPVSDPPVNSQQMVYVRAMTEYWPQEDPDIPCMDAGLPFQKGDILQIVDQNDALWWQARKISDPATCAGLVPSNHLLKRKQREFWWSQPYQPHTCLKSTLFLGYMCRTCSNFYGRRWSFALVAQAGVQWHYLDSLQPLPPGFKRFSCLSLPRSWDYIEDDMKIDEKCVEAAPAAPLTVIMAQLPNTMCFM

SEQ ID NO: 67854 - protein, 153 aa, Homo sapiens
MQSTANYLWHTDDLLGQGATASVYKARNKKSGELVAVKVFNTTSYLRPREVQVREFEVLRKLNHQNIVKLFAVEETGGSRQKVLVMEYCSSGSLLSVLESPENAFGLPEDEFLVVLRCVGEPLPVPASTLRPAAGLGQMLTGLRCLTPANHSI

SEQ ID NO: 67855 - protein, 90 aa, Homo sapiens
  MOD_RES (1)..(1): Any amino acid
XQKAKEQNQRLDEEILALRNRVRSLDSEKKVLGEMVERLKGEVCESQENKQLGNHSPGKTVGGEQREQEKPQDFLMVFGSQVMVIATSIN

SEQ ID NO: 67856 - protein, 117 aa, Homo sapiens
  MOD_RES (1)..(1): Any amino acid
XDITQLNNIPPTQESYYDPNLPPVTKSLVTNCKPVTDKIHKAYKDKNKYRFEIMGEEEIAFKMIRTNVSHVVGQLDDIRKNPRISLCCPSWNAVMQTWLTVASTSWAQAILPPQPPD

SEQ ID NO: 67857 - protein, 213 aa, Homo sapiens
DLGNGANLIKGSSNKPLNDNQWHNVMISRDTSNLHTVKIDTKITTQITAGARNLDLKSDLYIGGVAKETYKSLPKLVHAKEGFQGCLASVDLNGRLPDLISDALFCNGQIERGCEVALMKADLQGPSTTCQEDSCSNQGVCLQQWDGFSCDCSMTSFSGPLCNDPGTTYIFSKGGGQITYKWPPNDRPSTRADRLAIGFSTVQKEAVLVRVDS

SEQ ID NO: 67858 - protein, 81 aa, Homo sapiens
MFSKRLEKIPQVPLLFPFIFIILTNYSKMEGAVESQPSFFKTSQDIVTCTWVENCYSSFSRRPLEVCVILLKCITNSEWLP

SEQ ID NO: 67859 - protein, 141 aa, Homo sapiens
MAAEVLPSARWQYCGAPDGSQRAVLVQFSNGKLQSPGNMRFTLYENKDSTNPRKRNQRILAAETDRLSYVGNNFGTGALKCNTLCRHFVGILNKTSGQMEVYDAELFNMQPLFSGLSPRKQNYFLERAKDLFSNPVSATTW

SEQ ID NO: 67860 - protein, 186 aa, Homo sapiens
  MOD_RES (1)..(1): Any amino acid
XPTSSNDDSKSNLNTSGKTTSSTDGPKFPGDKSSTTQNNNQQKKGIQVLPDGRVTNIPQGMVTDQFGMIGLLTFIRAAETDPGMVHLALGSDLTTLGLNLNSPENLYPKFASPWASSPCRPQDIDFHVPSEYLTNIHIRDKLAAIKLGRYGEDLLFYLYYMNGGDVLQLLAAVELYVQSILITFVL

SEQ ID NO: 67861 - protein, 176 aa, Homo sapiens
MKYLLNFIGQGPATYGPFCAERLRRTYANGVRAEPPTWLELQAVKSKKHIPIQVILATGESLTVPVDSASTSREMCMHIAHKQGLSDHLGFSLQVAVYDKFWSLGSGRDHMMDAIARCEQMAQERGESQRQSPWRIYFRKEFFTPWHDSREDPVSTELIYRQVLRGVWSGEYSFEK

SEQ ID NO: 67862 - protein, 153 aa, Homo sapiens
  MOD_RES (1)..(1): Any amino acid
XECRGHKRARKRTSMETALALEKLFPKQCQVLGIVTPGIVVTPMGSGSNRPQEIEIGESGFALLFPQIEGIKIQPFHFIKDPKNLTLERHQLTEVGLLDNPELRVVLVFGYNCCKVGASNYLQQVVSTFSDMNIILAGGQVDNLSSLTSEKSK

SEQ ID NO: 67863 - protein, 237 aa, Homo sapiens
MLLSQNAFIFRSLNLVLMVYISLVFGISYDSPDYTDESCTFKISLRNFRSILSWELKNHSIVPTHYTLLYTIMSKPEDLKVVKNCANTTRSFCDLTDEWRSTHEAYVTVLEGFSGNTTLFSCSHNFWLAIDMSFEPPEFEIVGFTNHINVMVKFPSIVEEELQFDLSLVIEEQSEGIVKKHKPEIKGNMSGNFTYIIDKLIPNTNYCVSVYLEHSDEQAVIKSPLKCTLLPPGQESG

SEQ ID NO: 67864 - protein, 779 aa, Homo sapiens
MSDSGSQLGSMGSLTMKSQLQITVISAKLKENKKNWFGPSPYVEVTVDGQSKKTEKCNNTNSPKWKQPLTVIVTPVSKLHFRVWSHQTLKSDVLLGTAALDIYETLKSNNMKLEEVVVTLQLGGDKEPTETIGDLSICLDGLQLESEVVTNGETTCSESASQNDDGSRSKDETRVSTNGSDDPEDAGAGENRRVSGNNSPSLSNGGFKPSRPPRPSRPPPPTPRRPASVNGSPSATSESDGSSTGSLPPTNTNTNTSEGATSGLIIPLTISGGSGPRPLNPVTQAPLPPGWEQRVDQHGRVYYVDHVEKRTTWDRPEPLPPGWERRVDNMGRIYYVDHFTRTTTWQRPTLESVRNYEQWQLQRSQLQGAMQQFNQRFIYGNQDLFATSQSKEFDPLGPLPPGWEKRTDSNGRVYFVNHNTRITQWEDPRSQGQLNEKPLPEGWEMRFTVDGIPYFVDHNRRTTTYIDPRTGKSALDNGPQIAYVRDFKAKVQYFRFWCQQLAMPQHIKITVTRKTLFEDSFQQALFHGKFIDTGFSLPFYKRILNKPVGLKDLESIDPEFYNSLIWVKENNIEECDLEMYFSVDKEILGEIKSHDLKPNGGNILVTEENKEEYIRMVAEWRLSRGVEEQTQAFFEGFNEILPQQYLQYFDAKELEVLLCGMQEIDLNDWQRHAIYRHYARTSKQIMWFWQFVKEIDNEKRMRLLQFVTGTCRLPVGGFADLMGSNGPQKFCIEKVGKENWLPRSHTCFNRLDLPPYKSYEQLKEKLLFAIEETEGFGQE

SEQ ID NO: 67865 - protein, 125 aa, Homo sapiens
  MOD_RES (1)..(1): Any amino acid
XALLSSSSAEEYVGLSQQGLWQLTGLCLGQLQTSVPCQPRTGWTAATPMSPPRSATTGAAALTPGSLECLGVSSPCRKQNAPSEAPPAAPGRGMRGSEHPCPAVIAARHCSSQLFCPFAPGKRFC

SEQ ID NO: 67866 - protein, 289 aa, Homo sapiens
MQGDARRRRNENYFDDIPRSKLERQMAQSSVCEIWTNQNAGFPFSAIHQVHNTGDWGEPSITLRPPNEATASTPVQYWQHHPEKLIFQSCDYKAFYLGSMLIKELRGTESTQDACAKMRANCQKSTEQMKKVPTIILSVSYKGVKFIDATNKNIIAEHEIRNISCAAQDPEDLSTFAYITKDLKSNHHYCHVFTAFDVNLAYEIILTLGQAFEVAYQLALQARKGGHSSTLPESFENKPSKPIPKPRVSIRKSVIDPSEQKTLANLPWIVEPGQEAKRGINTKYETTIF

SEQ ID NO: 67867 - protein, 719 aa, Homo sapiens
MVVLRAGKKTFLPPLCRAFACRGCQLAPERGAERRDTAPSGVSRFCPPRKSCHDWIGPPDKYSNLRPVHFYIPENESPLEQKLRKLRQETQEWNQQFWANQNLTFSKEKEEFIHSRLKTKGLGLRTESGQKATLNAEEMADFYKEFLSKNFQKHMYYNRMYDNMSTMVYIKEDKLEKLTQDEIISKTKQVIQGLEALKNEHNSILQSLLETLKCLKKDDESNLVEEKSNMIRKSLEMLELGLSEAQVMMALSNHLNAVESEKQKLRAQVRRLCQENQWLRDELANTQQKLQKSEQSVAQLEEEKKHLEFMNQLKKYDDDISPSEDKDTDSTKEPLDDLFPNDEDDPGQGIQQQHSSAAAAAQQGGYEIPARLRTLHNLVIQYASQGRYEVAVPLCKQALEDLEKTSGHDHPDVATMLNILALVYRDQNKYKDAANLLNDALAIREKTLGKDHPAVAATLNNLAVLYGKRGKYKEAEPLCKRALEIREKVLGKDHPDVAKQLNNLALLCQNQGKYEEVEYYYQRALEIYQTKLGPDDPNVAKTKNNLASCYLKQGKFKQAETLYKEILTRAHEREFGSVDDENKPIWMHAEEREECKGKQKDGTSFGEYGGWYKACKVDSPTVTTTLKNLGALYRRQGKFEAAETLEEAAMRSRKQGLDNVHKQRVAEVLNDPENMEKRRSRESLNVDVVKYESGPDGGEEVSMSVEWNGMRKMKLGLVN

SEQ ID NO: 67868 - protein, 76 aa, Homo sapiens
  MOD_RES (1)..(1): Any amino acid
XYPAPACGEVDRRPAVLKDFHYLYFAILLCGLTAIVIVIVSLCTTPIPEEQVPIIFGFTFTTSSRLDPFQFTPREL

SEQ ID NO: 67869 - protein, 339 aa, Homo sapiens
MFYFLPQQKTKAAAPGVEDEPLLRENPRRFVIFPIEYHDIWQMYKKAEASFWTAEEVDLSKDIQHWESLKPEERYFISHVLAFFAASDGIVNENLVERFSQEVQITEARCFYGFQIAMENIHSEMYSLLIDTYIKDPKEREFLFNAIETMPCVKKKADWALRWIGDKEATYGERVVAFAAVEGIFFSGSFASIFWLKKRGLMPGLTFSNELISRDEGLHCDFACLMFKHLVHKPSEERVREIIINAVRIEQEFLTEALPVKLIGMNCTLMKQYIEFVADRLMLELGFSKVFRVENPFDFMENISLEGKTNFFEKRVGEYQRMGVMSSPTENSFTLDADF

SEQ ID NO: 67870 - protein, 141 aa, Homo sapiens
  MOD_RES (1)..(1): Any amino acid
XTIKAVFILDNDGRRLLAKYYDDTFPSMKEQMVFEKNVFNKTSRTESEIAFFGGMTIVYKNSIDLFLYVVGSSYENELMLMSVLTCLFESLNHMLSVILESDPQQVIQKVNFRADDGGLTEQSVAQVLQSAKEQIKWSLLK

SEQ ID NO: 67871 - protein, 171 aa, Homo sapiens
MVMYARKQQRLSDGCHDRRGDSQPYQGGDVLQALKYSSKSHPSSGDHRHEKMRDAGDPSPPNKMLRRSDSPENKYSDSTGHSKAKNVHTHRVRERDGGTSYSPQENSHNHSALHSSNSHSSNPSNNPSKTSDAPYDSADDWSEHISSSGKKYYYNCRTEVSQWEKPKEWLE

SEQ ID NO: 67872 - protein, 151 aa, Homo sapiens
  MOD_RES (1)..(1): Any amino acid
XPGAGSRGLSGTAVLDLRCLEPEGAAELRLDSHPCLEVTAAALRRERPGSEEPPAEPVSFYTQPFSHYGQALCVSFPQPCRAAERLQVLLTYRVGEGPGVCWLAPEQTAGKKKPFVYTQGQAVLNRAFFPCFDTPAVKYKYSALIEEPGVG

SEQ ID NO: 67873 - protein, 225 aa, Homo sapiens
MNGLSLSELCCLFCCPPCPGRIAAKLAFLPPEATYSLVPEPEPGPGGAGAAPLGTLRASSGAPGRWKLHLTERADFQYSQRELDTIEVFPTKSARGNRVSCMYVRCVPGASFYIGLGSRLHCNIFSYDYSGYGASSGRPSERNLYADIDAAWQALRTRASARCPPWTWPRATSVPRWCCTRRSPRACASPSPTPRRPTASTPSLTSRRCPRSRLPCSSSTARRTR

SEQ ID NO: 67874 - protein, 900 aa, Homo sapiens
MSDSGSQLGSMGSLTMKSQLQITETRFHHLDQAGLELLTSGSTHLGLPKYRDYRREPPRPAFISAKLKENKKNWFGPSPYVEVTVDGQSKKTEKCNNTNSPKWKQPLTVIVTPVSKLHFRVWSHQTLKSDVLLGTAALDIYETLKSNNMKLEEVVVTLQLGGDKEPTETIGDLSICLDGLQLESEVVTNGETTCSESASQNDDGSRSKDETRVSTNGSDDPEDAGAGENRRVSGNNSPSLSNGGFKPSRPPRPSRPPPPTPRRPASVNGSPSATSESDGSSTGSLPPTNTNTNTSEGATSGLIIPLTISGGSGPRPLNPVTQAPLPPGWEQRVDQHGRVYYVDHVEKRTTWDRPEPLPPGWERRVDNMGRIYYVDHFTRTTTWQRPTLESVRNYEQWQLQRSQLQGAMQQFNQRFIYGNQDLFATSQSKEFDPLGPLPPGWEKRTDSNGRVYFVNHNTRITQWEDPRSQGQLNEKPLPEGWEMRFTVDGIPYFVDHNRRTTTYIDPRTGKSALDNGPQIAYVRDFKAKVQYFRFWCQQLAMPQHIKITVTRKTLFEDSFQQIMSFSPQDLRRRLWVIFPGEEGLDYGGVAREWFFLLSHEVLNPMYCLFEYAGKDNYCLQINPASYINPDHLKYFRFIGRFIAMALFHGKFIDTGFSLPFYKRILNKPVGLKDLESIDPEFYNSLIWVKENNIEECDLEMYFSVDKEILGEIKSHDLKPNGGNILVTEENKEEYIRMVAEWRLSRGVEEQTQAFFEGFNEILPQQYLQYFDAKELEVLLCGMQEIDLNDWQRHAIYRHYARTSKQIMWFWQFVKEIDNEKRMRLLQFVTGTCRLPVGGFADLMGSNGPQKFCIEKVGKENWLPRSHTCFNRLDLPPYKSYEQLKEKLLFAIEETEGFGQE

SEQ ID NO: 67875 - protein, 194 aa, Homo sapiens
MQPQHGPWQTRMRKISNHGSLRVAKVAYPLGLCVGVFIYVAYIKWHRATATQAFFSITRAAPGARWGQQAHSPLGTAADGHEVFYGIMFDAGSTGTRVHVFQFTRPPRETPTLTHETFKALKPGLSAYADDVEKVKKVFKASPFLVGDDCVSIMNGTDEGVSAWITINFLTGSLKTPGGSSVGMLDLGGGSTQI

SEQ ID NO: 67876 - protein, 69 aa, Homo sapiens
MTERLLIKALSGGKNTKIITLNGKKMTKMPSALGKLPGLKTLVLQNNLIPKVCPELCNLTQAGCGGSCL

SEQ ID NO: 67877 - protein, 804 aa, Homo sapiens
MSSSPVNVKKLKVSELKEELKKRRLSDKGLKAELMERLQAALDDEEAGGRPAMEPGNGSLDLGGDSAGRSGAGLEQEAAAGGDEEEEEEEEEEEGISALDGDQMELGEENGAAGAADSGPMEEEEAASEDENGDDQGFQEGEDELGDEEEGAGDENGHGEQQPQPPATQQQQPQQQRGAAKEAAGKSSGPTSLFAVTVAPPGARQGQQQAGGDGKTEQKGGDKKRGVKRPREDHGRGYFEYIEENKYSRAKSPQPPVEEEDEHFDDTVVCLDTYNCDLHFKISRDRLSASSLTMESFAFLWAGGRASYGVSKGKVCFEMKVTEKIPVRHLYTKDIDIHEVRIGWSLTTSGMLLGEEEFSYGYSLKGIKTCNCETEDYGEKFDENDVITCFANFESDEVELSYAKNGQDLGVAFKISKEVLAGRPLFPHVLCHNCAVEFNFGQKEKPYFPIPEEYTFIQNVPLEDRVRGPKGPEEKKDCEVVMMIGLPGAGKTTWVTKHAAENPGKYNILGTNTIMDKMMVAGFKKQMADTGKLNTLLQRAPQCLGKFIEIAARKKRNFILDQTNVSAAAQRRKMCLFAGFQRKAVVVCPKDEDYKQRTQKKAEVEGKDLPEHAVLKMKGNFTLPEVAECFDEITYVELQKEEAQKLLEQYKEESKKALPPEKKQNTGSKKSNKNKSGKNQFNRGGGHRGRGGFNMRGGNFRGGAPGNRGGYNRRGNMPQRGGGGGGSGGIGYPYPRAPVFPGRGSYSNRGNYNRGGMPNRGNYNQNFRGRGNNRGYKNQSQGYNQWQQGSVHVNVLCGRVKGPN

SEQ ID NO: 67878 - protein, 195 aa, Homo sapiens
AVEARNKTLTRAQLAKQIFHSKESIVATTKSKKDTFVLESVDSADEQFQNTNAETLSTNCIPIKNGSLLMVSDSERTTEGTSQQKVKEGNGKTVPGETGLPGSMKDTCKIVLATPRLHITIPRRSKRNISKLSPPRIFQTVTNGLKKNQVVQLQEWMIKSINNNTAICVEGKLMISKLSHKEIYVWISRKLERAH

SEQ ID NO: 67879 - protein, 276 aa, Homo sapiens
MRIPVDPSTSRRFSPPSSSLQPGKMSDVSPVVAAQQQQQQQQQQQQQQQQQQQQQQQEAAAAAAAAAAAAAAAAAVPRLRPPHDNRTMVEIIADHPAELVRTDSPNFLCSVLPSHWRCNKTLPVAFKVVALGEVPDGTVVTVMAGNDENYSAELRNASAVMKNQVARFNDLRFVGRSGRGKSFTLTITVFTNPPQVATYHRAIKVTVDGPREPRNPRQAQSSPPWSYDQSYPSYLSQMTSPSIHSTTPLSSTRGTGLPAITDVPRRISARSRYSLR

SEQ ID NO: 67880 - protein, 60 aa, Homo sapiens
MPLPILLHVQEQILKMLVYHLLKLYLRILPTTKKNTLFILPKSLKHHKVVTLNKMKPQER

SEQ ID NO: 67881 - protein, 157 aa, Homo sapiens
MAAAAVQGGRSGGSGGCSGAGGASNCGTGSGRSGLLDKWKIDDKPVKIDKWDGSAVKNSLDDSAKKEKSIFLVAHRKDPTGMDPDDIWQLSSSLKRFDDKYTLKLTFISGRTKQQREAEFTKSIAKFFDHSGTLVMDAYEPEISRLHDSLAIERKIK

SEQ ID NO: 67882 - protein, 80 aa, Homo sapiens
MSAQLPGIPMPPPPLGLPPLQPPPPPPPPPPGLGLGFPMAHPPNLGPPPPLRVGEPVALSEEERLKLAQQQAALLMQQEE

SEQ ID NO: 67883 - protein, 178 aa, Homo sapiens
MEVRWDRSHRYPAVHVYMDGDHVAGEQMAEYRGRTVLVSDAIDEGRLTLQILSARPSDDGQYRCLFEKDDVYQEASLDLKVVGLGSSPLITVEGQEDGEMQLICSSDGWFPQPHVQWRDMEGKTIPSSSQALTQGSHGLFHVQTLLRVTNISAVDVTCSISIPFLGEEKIATFSLSGW

SEQ ID NO: 67884 - protein, 301 aa, Homo sapiens [sequence omitted]

SEQ ID NO: 67885 - protein, 160 aa, Homo sapiens
MTSRKKVLLKVIILGDSGVGKTSLMNQYVNKKFSNQYKATIGADFLTKEVMVDDRLVTMQIWDTAGQERFQSLGVAFYRGADCCVLVATKRAQAWCYSKNNIPYFETSAKEAINVEQAFQTIARNALKQETEVELYNEFPEPIKLDKNDRAKASAESCSC

SEQ ID NO: 67886 - protein, 87 aa, Homo sapiens
MNLTEGPLAMAEMDPTQGRVVFEDVAIYFSQEEWGHLDEAQRLLYRDVMLENLALLSSLGKALTLAQCPGLGCVTPFYPKAALRFPQ

SEQ ID NO: 67887 - protein, 122 aa, Homo sapiens
  MOD_RES (1)..(1): Any amino acid
XAPLPALRLLDLRWIEDVKDSQLRELLLPPPDTKPAERPGPEPLRPRRGPQCSPPHGPHVPTPRDPGAPQSCWLPPPNGPLPPAVPPLPSSTPPRPALLPPALTRSLCPAGSCRAPWPLPLP

SEQ ID NO: 67888 - protein, 146 aa, Homo sapiens
MKAYLKSAEGFFVLNKSTTIGRHENSDLVLQVSFPWMRGPAPWPGPQPPRATQQPNQAPPPSHIPFHQGVQPAPMQRSWSQAFPRPTVVLPASHRRPVSANKEMFSFVVDDARKPPVIKQVWTNAMKLSEKSVAEGIPGAVPPAEI

SEQ ID NO: 67889 - protein, 56 aa, Homo sapiens
MVRYSLDPENPTKSCKSRGSNLRVHFKNTRETAQAIKGMHIRKATKYLKDVTLQKQ

SEQ ID NO: 67890 - protein, 109 aa, Homo sapiens
SEEAEVDVRERETQRDREPKRARDLTLRDSCTDNSMQFGTRTTTAEPGFMGTWQNADTNLLFRMSQQAIRCTLVNCTCECFQPGKINLRTCDQCKHGWVAHETLKSCLQ

SEQ ID NO: 67891 - protein, 394 aa, Homo sapiens
MGFAAAAVSRKKKRRMGTYSLVPKKKTKVLKQRTVIEMFKSITHSTVGSKGEKDLGASSLHVNGESLEMDSDEDDSEELEEDDGHGAEQAAAFPTEDSRTSKESMSEADRAQKMDGESEEEQESVDTGEEEEGGDESDLSSESSIKKKFLKRKGKTDSPWIKPARKRRRRSRKKPSGALGSESYKSSAGSAEQTAPGDSTGYMEVSLDSLDLRVKGILSSQAEGLANGPDVLETDGLQEVPLCSCRMETPKSREITTLANNQCMATESVDHELGRCTNSVVKYELMRPSNKAPLLVLCEDHRGRMVKHQCCPGCGYFCTAGNFMECQPESSISHRFHKDCASRVNNASYCPHCGEESSKAKEVTIAKADTTSTVTPVPGQEKGSALEGRADTTT

SEQ ID NO: 67892 - protein, 167 aa, Homo sapiens
AGWDNEKKIAILHENFTTVKPEDAYEDFIVKPPVRKLVHDKELAAEDEQVFLMKQQESPARGPSGSPRTQGRGGPASVPSSSPGTSVKKPDPNIKNNAASEGVLASFFNSLLSKKTGSPGSPGAGGVQSTAKKSGQKTVLSNVQEELDRMTRKPDSMVTNSSTENEA

SEQ ID NO: 67893 - protein, 222 aa, Homo sapiens
MRTEARRKNLLILISHYLTQEGYIDTANALEQETKLGLRRFEVCDNIDLETILMEYESYYFVKFQKYPKIVKKSSDTENNLPQRSRGKTRRMMNDSCQNLPKINQQRPRSKTTAGKTGDTKSLNKEHPNQEVVDNTRLESANFGLHISRIRKDSGEENAHPRRGQIIDFQGLLTDAIKGATSELALNTFDHNPDPSERLLKPLSAFIGMNSEMRELAAVVSR

SEQ ID NO: 67894 - protein, 892 aa, Homo sapiens
MWSWKCLLFWAVLVTATLCTARPSPTLPEQAQPWGAPVEVESFLVHPGDLLQLRCRLRDDVQSINWLRDGVQLAESNRTRITGEEVEVQDSVPADSGLYACVTSSPSGSDTTYFSVNVSDALPSSEDDDDDDDSSSEEKETDNTKPNPVAPYWTSPEKMEKKLHAVPAAKTVKFKCPSSGTPNPTLRWLKNGKEFKPDHRIGGYKVRYATWSIIMDSVVPSDKGNYTCIVENEYGSINHTYQLDVVERSPHRPILQAGLPANKTVALGSNVEFMCKVYSDPQPHIQWLKHIEVNGSKIGPDNLPYVQILKVIMAPVFVGQSTGKETTVSGAQVPVGRLSCPRMGSFLTLQAHTLHLSRDLATSPRTSNRGHKVETAGVNTTDKEMEVLHLRNVSFEDAGEYTCLAGNSIGLSHHSAWLTVLEALEERPAVMTSPLYLEIIIYCTGAFLISCMVGSVIVYKMKSGTKKSDFHSQMAVHKLAKSIPLRRQVSADSSASMNSGVLLVRPSRLSSSGTPMLAGVSEYELPEDPRWELPRDRLVLGKPLGEGCFGQVVLAEAIGLDKDKPNRVTKVAVKMLKSDATEKDLSDLISEMEMMKMIGKHKNIINLLGACTQDGPLYVIVEYASKGNLREYLQARRPPGLEYCYNPSHNPEEQLSSKDLVSCAYQVARGMEYLASKKCIHRDLAARNVLVTEDNVMKIADFGLARDIHHIDYYKKTTNGRLPVKWMAPEALFDRIYTHQSDVWSFGVLLWEIFTLGGSPYPGVPVEELFKLLKEGHRMDKPSNCTNELYMMMRDCWHAVPSQRPTFKQLVEDLDRIVALTSNQVLHPDLTTHLLPLRCFWKVRKRRCLLRGQEPHPCSRGAGQRVKAQQPSTMDGFLQGNRWGWAGEGAPT

SEQ ID NO: 67895 - protein, 182 aa, Homo sapiens
MERYAAALEEVADGARQQERHYQLLSALQSLVKELPSACPTPRSATWPWRFSTAPCSKSCRGYWRSSTSPKRACTTSACAYRTSTEAVEHRIREEQRAMDQKIILELDRKVADQQSTLEKAGVAGFYVTTNPQELMLQMNLLELIRKLQQRGCRAGNAALGLGGPWQSPAAQCDQKGSPVPP

SEQ ID NO: 67896 - protein, 388 aa, Homo sapiens
MAWGLEAQDDPPAERTKNVCKDVETNIDSESTLIQGISEERDGMMSHGQLKSVPQRTDFPETRNVEKHQDIPTVKNIQGKVPRIPCARKPFICEECGKSFSYFSYYARHQRIHTGEKPFECSECGKAFNGNSSLIRHQRIHTGERPYQCEECGRAFNDNANLIRHQRIHSGDRPYYCTECGNSFTSSSEFVIHQRIHTGEKPYECNECGKAFVGNSPLLRHQKIHTGEKPYECNECGKSFGRTSHLSQHQRIHTGEKPYSCKVCGQAFNFHTKLTRHQRIHSEEKPFDCVDCGKAFSAQEQLKRHLRIHTQESSYVCDECGKALTSKRNLHQHQRIHTGEKPYECSKYEKAFGTSSQLGHLEHVYSGEKPVLDICRFGLPEFFTPFYW

SEQ ID NO: 67897 - protein, 97 aa, Homo sapiens
MAATAAVSPSDYLQPAASTTQDSQPSPLALLAATCSKIGPPAVEAAVTPPAPPQPTPRKLVPIKPAPLPLSPGKNSFGILSSKGNILQIQGSQLSAS

SEQ ID NO: 67898 - protein, 154 aa, Homo sapiens
MDLCHPEPAELSSGETEELQRIKWHRKQLLEDIQKLKDEIADVFAQIDCFESAEESRMAQKEKELCIGRKKFNMDPAKGIQYFIEHKLLTPDVQDIARFLYKGEGLNKTAIGTYLGERDPINLQVLQAFVDCHEFANLNLVQALRVVKTKWESV

SEQ ID NO: 67899 - protein, 61 aa, Homo sapiens
DSKTGETASKRWKGAKNSETAAKVALMKLKMHADGDKSLPQGAKRRANQCSFATDGALERP

SEQ ID NO: 67900 - protein, 75 aa, Homo sapiens
MTVHNLYLFDRNGVCLHYSEWHRKKQAGIPKEEEYKLMYGMLFSIRSFVSKMSPLDMKDGFLAFQTSRYKLHYYE

SEQ ID NO: 67901 - protein, 890 aa, Homo sapiens
MSPVVKDPDCFTPMICHCKVACTNNTLSLMFGCKKYRYQDEDAPHDHSLPRLTHEVRGPELVHVSEKNLSQIENVHGYVLQSHISPLKASPAPIIVNTDTLDTIPYVNGTEIEYEFEEITLERGNSGLGFSIAGGTDNPHIGDDPGIFITKIIPGGAAAEDGRLRVNDCILRVNEVDVSEVSHSKAVEALKEAGSIVRLYVRRRRPILETVVEIKLFKGPKGLGFSIAGGVGNQHIPGDNSIYVTKIIDGGAAQKDGRLQVGDRLLMVNNYSLEEVTHEEAVAILKNTSEVVYLKVGKPTTIYMTDPYGPPDITHSYSPPMENHLLSGNNGTLEYKTSLPPISPGRYSPIPKHMLVDDDYTRPPEPVYSTVNKLCDKPASPRHYSPVECDKSFLLSAPYSHYHLGLLPDSEMTSHSQHSTATRQPSMTLQRAVSLEGEPRKVVLHKGSTGLGFNIVGGEDGEGIFVSFILAGGPADLSGELQRGDQILSVNGIDLRGASHEQAAAALKGAGQTVTIIAQYQPEDYARFEAKIHDLREQMMNHSMSSGSGSLRTNQKRSLYVRAMFDYDKSKDSGLPSQGLSFKYGDILHVINASDDEWWQARRVMLEGDSEEMGVIPSKRRVERKERARLKTVKFNAKPGVIDSKGSFNDKRKKSFIFSRKFPFYKNKEQSEQETSDPERGQEDLILSYEPVTRQEINYTRPVIILGPMKDRINDDLISEFPDKFGSCVPHTTRPKRDYEVDGRDYHFVISREQMEKDIQEHKFIEAGQYNDNLYGTSVQSVRFVAERGKHCILDVSGNAIKRLQVAQLYPIAIFIKPRSLEPLMEMNKRLTEEQAKKTYDRAIKLEQEFGEYFTAIVQGDTLEDIYNQCKLVIEEQSGPFIWIPSKEKL

SEQ ID NO: 67902 - protein, 105 aa, Homo sapiens
  MOD_RES (1)..(1): Any amino acid
XMLYMKEMRAKVIAECTLKESAAINQILGRRWHALSREEQAKYYELARKERQLHMQLYPGWSARDNYGKKKRRSREKHQESTTENLKLTDIRRSQELQMWKQTLL

SEQ ID NO: 67903 - protein, 404 aa, Homo sapiens
MLRVRCLRGGSRGAEAVHYIGSRLGRTLTGWVQRTFQSTQAATASSRNSCAADDKATEPLPKDCPVSSYNEWDPLEEVIVGRAENACVPPFTIEVKANTYEKYWPFYQKQGGHYFPKDHLKKAVAEIEEMCNILKTEGVTVRRPDPIDWSLKYKTPDFESTGLYSAMPRDILIVVGNEIIEAPMAWRSRFFEYRAYRSIIKDYFHRGAKWTTAPKPTMADELYNQDYPIHSVEDRHKLAAQGKFVTTEFEPCFDAADFIRAGRDIFAQRSQVTNYLGIEWMRRHLAPDYRVHIISFKDPNPMHIDATFNIIGPGIVLSNPDRPCHQIDLFKKAGWTIITPPTPIIPDDHPLWMSSKWLSMNVLMLDEKRVMVDANEVPIQKMFEKLEAPSYYFTESQYFYFQHT

SEQ ID NO: 67904 - protein, 88 aa, Homo sapiens
MMEVAAADVKQLGGSVELVDIGKQKLPDGSEIPLPPILLGRLGSDPQKKTVCIYGHLDVQPAALEDGWDSEPFTLVERDGKLYGRGST

SEQ ID NO: 67905 - protein, 80 aa, Homo sapiens
MLLSIGMLMLSATQVYTILTVQLFAFLNLLPVEADILAYNFENASQTFDDLPARFGYRLPAEGLKGFLINSKPENACEPI

SEQ ID NO: 67906 - protein, 310 aa, Homo sapiens
MPKSGFTKPIQSENSDSDSNMVEKPYGRKSKDKIASYSKTPKIERSDVSKEMKEKSSMKRKLPFTISPSRNEERDSDTEKEGPEKKKTKKEAGNKKSTPVSILFGYPLSERKQMALLMQMTARDNNSTPNHPSQTTPAQKKTPSSSSRQKDKVNKRNERGETPLHMAAIRGDVKQVKELISLGANVNVKDFAGWTPLHEACNVGYYDVAKILIAAGADVNTQGLDDDTPLHDSASSGHRDIVKLLLRHGGNPFQANKHGERPVDVAETEELELLLKREVPLSDDDESYTDSEEAQSVNPSSVDENIDSET

SEQ ID NO: 67907 - protein, 37 aa, Homo sapiens
MAMESTATAAVAAELVSADKIEDVPAPSTSADKVERN

SEQ ID NO: 67908 - protein, 85 aa, Homo sapiens
MTQNKLKLCSKANVYTEVPDGGWGWAVAVSFFFVEVFTYGIIKTFGVFFNDLMDSFNESNSRISWIISICVFVLTFSAPLATVLS

SEQ ID NO: 67909 - protein, 153 aa, Homo sapiens
MAVDIQPACLGLYCGKTLLFKNGSTEIYGECGVCPRGQRTNAQKYCQPCTESPELYDWLYLGFMAMLPLVLHWFFIEWYSGKKSSSALFQHITALFECSMAAIITLLVSDPVGVLYIRSCRVLMLSDWYTMLYNPSPDYVTTVHCTHEAVYPL

SEQ ID NO: 67910 - protein, 820 aa, Homo sapiens
PLPMAVSRGLPPQQPQQPLLNLQGTNSASLLNGSMLQRALLLQQLQGNLRGYGMASPGLAAPSLTPPQLATPNLQQFFPQATRQSLLGPPPVGVPMNPSQFNLSGRNPQKQARTSSSTTPNRKTMPVEDKSDPPEGSEEAAEPRMDTPEDQDLPPCPEDIAKEKRTPAPEPEPCEASELPAKRLRSSEEPTEKEPPGQLQVKAQPQARMTVPKQTQTPDLLPEALEAQVLPRFQPRVLQVQAQVQSQTQPRIPSTDTQVQPKLQKQAQTQTSPEHLVLQQKQVQPQLQQEAEPQKQVQPQVQPQAHSQGPRQVQLQQEAEPLKQVQPQVQPQAHSQPPRQVQLQLQKQVQTQTYPQVHTQAQPSVQPQEHPPAQVSVQPPEQTHEQPHTQPQVSLLAPEQTPVVVHVCGLEMPPDAVEAGGGMEKTLPEPVGTQVSMEEIQNESACGLDVGECENRAREMPGVWGAGGSLKVTILQSSDSRAFSTVPLTPVPRPSDSVSSTPAATSTPSKQALQFFCYICKASCSSQQEFQDHMSEPQHQQRLGEIQHMSQACLLSLLPVPRDVLETEDEEPPPRRWCNTCQLYYMGDLIQHRRTQDHKIAKQSLRPFCTVCNRYFKTPRKFVEHVKSQGHKDKAKELKSLEKEIAGQDEDHFITVDAVGCFEGDEEEEEDDEDEEEIEVEEELCKQVRSRDISREEWKGSETYSPNTAYGVDFLVPVMGYICRICHKFYHSNSGAQLSHCKSLGHFENLQKYKAAKNPSPTTRPVSRRCAINARNALTALFTSSGRPPSQPNTQDKTPSKVTARPSQPPLPRRSTRLKT

SEQ ID NO: 67911 - protein, 124 aa, Homo sapiens
MEDHQHVPIDIQTSKLLDWLVDRRHCSLKWQSLVLTIREKINAAIQDMPESEEIAQLLSGSYIHYFHCLRILDLLKGTEASTKNIFGRYSSQRMKDWQEIIALYEKDNTYLASWFGMSTMRSPH

SEQ ID NO: 67912 - protein, 278 aa, Homo sapiens
MGFEELLEQVGGFGPFQLRNVALLALPRVLLPLHFLLPIFLAAVPAHRCALPGAPANFSHQDVWLEAHLPREPDGTLSSCLRFAYPQALPNTTLGEERQSRGELEDEPATVPCSQGWEYDHSEFSSTIATESQVGIYIIHLEVECRWRQSPWEAAGRGLPWEEAEAAGLGRDKVSYSPSWRESLGGLLSGMEWDLVCEQKGLNRAASTFFFAGVLVGAVAFGYLSDRFGRRRLLLVAYVSTLVLGLASAASVSYVMFAITRTLTGSALAGFTIIVMPL

SEQ ID NO: 67913 - protein, 200 aa, Homo sapiens
MGCGCSSHPEDDWMENIDVCENCHYPIVPLDGKGTLLIRNGSEVRDPLVTYEGSNPPASPLQGDPRQQGLKDKACGSLAVGFHLSPTYFLPGLAFLVPHPVTPGFLPIPARFSLMPLVFTDNLVIALHSYEPSHDGDLGFEKGEQLRILEQSGEWWKAQSLTTGQEGFIPFNFVAKANSLEPEPWFFKNLSRKDAERQLL

SEQ ID NO: 67914 - protein, 35 aa, Homo sapiens
MSGAQGHFLRQCWLSRSSWGAPSATLSAPKAVFPS

SEQ ID NO: 67915 - protein, 191 aa, Homo sapiens
MPGPRVWGKYLWRSPHSKGCPGAMWWLLLWGVLQACPTRGSVLLAQELPQQLTSPGYPEPYGKGQESSTDIKAPEGFAVRLVFQDFDLEPSQDCAGDSVTISFVGSDPSQFCGQQGSPLGRPPGQREFVSSGRSLRLTFRTQPSSENKTAHLHKGFLALYQTVGALTCATPGTWKDRQDGEEVLQCMPVCG

SEQ ID NO: 67916 - protein, 62 aa, Homo sapiens
MAAKETEKFMNRNMKVYQKTTFSSRMKSHSYLSQLAFYPKRSGRSFEKFGPGPAPIPRLIEG

SEQ ID NO: 67917 - protein, 421 aa, Homo sapiens
MSKRLRSSEVCADCSGPDPSWASVNRGTFLCDECCSVHRSLGRHISQVRHLKHTPWPPTLLQMVETLYNNGANSIWEHSLLDPASIMSGRRKANPQDKVHPNKAEFIRAKYQMLAFVHRLPCRDDDSVTAKDLSKQLHSSVRTGNLETCLRLLSLGAQANFFHPEKGNTPLHVASKAGQILQAELLAVYGADPGTQDSSGKTPVDYARQGGHHELAERLVEIQYELTDRLAFYLCGRKPDHKNGQHFIIPQMADSSLDLSELAKAAKKKLQSLSNHLFEELAMDVYDEVDRRETDAVWLATQNHSALVTETTVVPFLPVNPEYSSTRNQGRQKLARFNAHEFATLVIDILSDAKRRQQGSSLSGSKDNVELILKTINNQHSVESQDNDQPDYDSVASDEDTDLETTASKTNRQKLLGKDAN

SEQ ID NO: 67918 - protein, 179 aa, Homo sapiens
  MOD_RES (1)..(1): Any amino acid
XTNTGFGAVGSTLFGNNKLTTFGSSTTSAPSFGTTSGGLFGFGTNTSGNSIFGSKPAPGTLGTGLGAGFGTALTDPNASAAQQAVLQQHINSLTYSPFGDSPLFRNPMSDPKKKEERLKPTNPAAQKALTTPTHYKLTPRPATRVRPKALQTTGTAKSHLFDGLDDDEPSLANGAFMPK

SEQ ID NO: 67919 - protein, 332 aa, Homo sapiens
  MOD_RES (1)..(1): Any amino acid
XFMGGEKFDTPHPEGYLFGENMDLNFLGSRPVQFPYVTPAPHEPVKTLRSLVNIRKDSLRLVRYKDDADSPTEDGDKPRVLYSLEFTFDADARVAITIYCQASEEFLNGRAVYSPKSPSLQSETVHYKRGVSQQFSLPSFKIDFSEWKDDELNFDLDRGVFPVVIQAVVDEGDAVVEVTGHAHVLLAAFEKHMDGSFSVKPLKQKQIVDRVSYLLQEIYGIENKNNQETKPSDDENSDNSNECVVCLSDLRDTLILPCRHLCLCTSCADTLRYQANNCPICRLPFRALLQIRAVRKKPGALSPVSFSPVLAQSLEHDEHSCPFKKSKPHPAS

SEQ ID NO: 67920 - protein, 97 aa, Homo sapiens
MALEAAGGPPEETLSLWKREQARLKAHVVDRDTEAWQRDPAFSGLQRVGGVDVSFVKGDSVRACASLVVLSFPELEGWPCPEGRGAAQLTVTLPVAP

SEQ ID NO: 67921 - protein, 242 aa, Homo sapiens
MAAAMPLALLVLLLLGPGGWCLAEPPRDSLREELVITPLPSGDVAATFQFRTRWDSELQREGVSHYRLFPKALGQLISKYSLRELHLSFTQGFWRTRYWGPPFLQAPSGAELWVWFQDTVTDVDKSWKELSNVLSGIFCASLNFIDSTNTVTPTASFKPLGLANDTDHYFLRYAVLPREVVCTENLTPWKKLLPCSSKGFSYLFPSPPGRPLCAAEGRSLVPHQLPLPGSAYPPCLQKCTLY

SEQ ID NO: 67922 - protein, 220 aa, Homo sapiens
MQTPRPAMRMEAGEAAPPAGAGGRAAGGWGKWVRLNVGGTVFLTTRQTLCREQKSFLSRLCQGEELQSDRDETGAYLIDRDPTYFGPILNFLRHGKLVLDKDMAEEGVLEEAEFYNIGPLIRIIKDRMEEKDYTVTQVPPKHVYRVLQCQEEELTQMVSTMSDGWRFEQLVNIGSSYNYGSEDQAEFLCVVSKELHSTPNGLSSESSRKTKLLQARGTRM

SEQ ID NO: 67923 - protein, 453 aa, Homo sapiens
MRSGNCRQRYMILTVTILALCLPSPGNAQAQCTNGFDLDRQSGQCLDIDECRTIPEACRGDMMCVNQNGGYLCIPRTNPVYRGPYSNPYSTPYSGPYPAAAPPLSAPNYPTISRPLICRFGYQMDESNQCVDVDECATDSHQCNPTQICINTEGGYTCSCTDGYWLLEGQCLDIDECRYGYCQQLCANVPGSYSCTCNPGFTLNEDGRSCQDVNECATENPCVQTCVNTYGSFICRCDPGYELEEDGVHCSDMDECSFSEFLCQHECVNQPGTYFCSCPPGYILLDDNRSCQDINECEHRNHTCNLQQTCYNLQGGFKCIDPIRCEEPYLRISDNRCMCPAENPGCRDQPFTILYRDMDVVSGRSVPADIFQMQATTRYPGAYYIFQIKSGNEGREFYMRQTGPISATLVMTRPIKGPREIQLDLEMITVNTVINFRGSSVIRLRIYVSQYPF

SEQ ID NO: 67924 - protein, 13 aa, Homo sapiens
  MOD_RES (1)..(1): Any amino acid
XITFGQGTRLEIK

SEQ ID NO: 67925 - protein, 231 aa, Homo sapiens
MGIKTALPAAELGLYSLVLSGALAYAGRGLLEASQDGAHRKAFRESVRPGWEYIGRKMDVADFEWVMWFTSFRNVIIFALSGHVLFAKLCTMVAPKLRSWMYAVYGALAVMGTMGPWYLLLLLGHCVGLYVASLLGQPWLCLGLGLASLASFKMDPLISWQSGFVTGTFDLQEVLFHGGSSFTVLRCTSFALESCAHPDRHYSLADLLKYNFYLPFFFFGPIMTFDRFHAQ

SEQ ID NO: 67926 - protein, 60 aa, Homo sapiens
MILASVLRSGPGGGLPLRPLLGPALALRARSTSATDTHHVEMARERSKTVTSFYNQSAID

SEQ ID NO: 67927 - protein, 444 aa, Homo sapiens
MQLPRWWELGDPCAWTGQGRGTRRMSPATTGTFLLTVYSIFSKVHSDRNVYPSAGVLFVHVLEREYFKGEFPPYPKPGEISNDPITFNTNLMGYPDRPGWLRYIQRTPYSDGVLYGSPTAENVGKPTIIEITAYNRRTFETARHNLIINIMSAEAEFFIKNMNVEEMLASEVLGDFLGAVKNVWQPERLNAINITSALDRGGRVPLPINDLKEGVYVMVGADVPFSSCLREVENPQNQLRCSQEMEPVITCDKKFRTQFYIDWCKISLVDKTKQVSTYQEVIRGEGILPDGGEYKPPSDSLKSRDYYTDFLITLAVPSAVALVLFLILAYIMCCRREGVIQLVHHSAIQKSTKELRDMSKNREIAWPLSTLPVFHPVTGEIIPPLHTDNYDSTNMPLMQTQQNLPHQTQIPQQQTTGDFRLTTFQRFEVNGIPEERKLTEAMNL

SEQ ID NO: 67928 - protein, 116 aa, Homo sapiens
MDLSGLPETAVDSEDDDDEEDIERASDPLMSRDIVRDCLEKDPIDRTDDDIEQLLEFMHQLPAFANMTMSVRRELCAVMVFAVVERAGTIVLNDGEELDSWSVILNGSVEVTYPDG

SEQ ID NO: 67929 - protein, 951 aa, Homo sapiens [sequence omitted]

SEQ ID NO: 67930 - protein, 164 aa, Homo sapiens
LWSFNYFFYNKRLKRIVFFSCRSISGSTYTPSEAGNELDMELGEEEVEEESRSGGSGAEETSTMEEDRCVMGAMTRVLEAWSGYNRVGASSTWSKWWLLKAHCVPTSAQGPSDLYLMRRSRGPSFIQLQPMPGPVHLRGPWGLPSCWPDPGAATVLALPKAIPA

SEQ ID NO: 67931 - protein, 37 aa, Homo sapiens
MQLCGPQAQDEHLAAIVDAVGTMLPCFCPTEQALALV

SEQ ID NO: 67932 - protein, 165 aa, Homo sapiens
EFILVQADTPSSPSIDQVEPYSSTAQVQFDEPEATGGVPILKYKAEWRAVGEEVWHSKWYDAKEASMEGIVTIVGLKPETTYAVRLAALNGKGLGEISAASEFKTQPVHSPPPPASASSSTPVPLSPPDTTWPLPALATTEPAKNIAQNHCCNMFQAGLHNALMK

SEQ ID NO: 67933 - protein, 461 aa, Homo sapiens
MRGSDVCDAPEAAPRKACGSLGDVSVCEALGARPQGSGLGRRRRRPGLGALAAGVPAMAESVERLQQRVQELERELAQERSLQVPRSGDGGGGRVRIEKMSSEVVDSNPYSRLMALKRMGIVSDYEKIRTFAVAIVGVGGVGSVTAEMLTRCGIGKLLLFDYDKVELANMNRLFFQPHQAGLSKVQAAEHTLRNINPDVLFEVHNYNITTVENFQHFMDRISNGGLEEGKPVDLVLSCVDNFEARMTINTACNELGQTWMESGVSENAVSGHIQLIIPGESACFACAPPLVVAANIDEKTLKREGVCAASLPTTMGVVAGILVQNVLKFLLNFGTVSFYLGYNAMQDFFPTMSMKPNPQCDDRNCRKQQEEYKKKVAALPKQEVIQEEEEIIHEDNEWGIELVSEVSEEELKNFSGPVPDLPEGITVAYTIPKKQEDSVTELTVEDSGESLEDLMAKMKNM

SEQ ID NO: 67934 - protein, 45 aa, Homo sapiens
MAAAAAEQQQFYLLLGNLLSPDNVVRKQAETDMFEKFETCVALHK

SEQ ID NO: 67935 - protein, 213 aa, Homo sapiens
  MOD_RES (1)..(1): Any amino acid
XAGSSGFEAVEVAWPYAETPEALARAAREAGLRLVLINTPPGDQEKGEMGLGAVPGRQAAFREGLEQAVRIHLMAGRVPQGADRIAVKAEMEAVFLENLRHAAGVLAQEDLVGLLEPINTRITDPQYFLDTPQQAAAILQKVGRPNLQLQMDIFHWQIMDGNLTGNIREFLPIVGHVQVAQVPGRGEPSSPGELNFPYLFQLLEDEGYKGFVG

SEQ ID NO: 67936 - protein, 74 aa, Homo sapiens
  MOD_RES (1)..(1): Any amino acid
XYVMVRCGRGPGGRLGRRPRPGARRGSGEMSARSPPPPSRRAALREGIIWSCPPLPQLPLPGPLGGGTMRCPMA

SEQ ID NO: 67937 - protein, 159 aa, Homo sapiens
MGSRKCGGCLSCLLIPLALWSIIVNILLYFPNGQTSYASSNKLTNYVWYFEGICFSGIMMLIVTTVLLVLENNNNYKCCQSENCSKKYVTLLSIIFSSLGIAFSGYCLVISALGLVQGPYCRTLDGWEYAFEGTAGRFLTDSSIWIQCLEPAHVVEWNI

SEQ ID NO: 67938 - protein, 466 aa, Homo sapiens
MGTVTEDLIRRNAEHNDCVIFSLEELSLHQQEIERLEHIDKWCRDLKILYLQNNLIGKIENVSKLKKLEYLNLALNNIEKIENLEGCEELAKLDLTVNFIGELSSIKNLQHNIHLKELFLMGNPCASFDHYREFVVATLPQLKWLDGKEIEPSERIKALQDYSVIEPQIREQEKDHCLKRAKLKEEAQRKHQEEDKNEDKRSNAGFDGRWYTDINATLSSLESKDHLQAPDTEEHNTKKLDNSEDDLEFWNKPCLFTPESRLETLRHMEKQRKKQEKLSEKKKKVKPPRTLITEDGKALNVNEPKIDFSLKDNEKQIILDLAVYRYMDTSLIDVDVQPTYVRVMIKGKPFQLVLPAEVKPDSSSAKRSQTTGHLVICMPKVGEVITGGQRAFKSMKTTSDRSREQTNTRSKHMEKLEVDPSKHSFPDVTNIVQEKKHTPRRRPEPKIIPSEEDPTFEDNPEVPPLI

SEQ ID NO: 67939 - protein, 52 aa, Homo sapiens
MAPSHLSVREMREDEKPLVLEMLKVRGRGPRGPGSGCSGGIASGFSHPLPPT

SEQ ID NO: 67940 - protein, 35 aa, Homo sapiens
MPVRKQDTQRALHLLEEYRSKLSQTEDRQLRSSIE

SEQ ID NO: 67941 - protein, 248 aa, Homo sapiens
MDQNNSLPPYAQGLASPQGAMTPGIPIFSPMMPYGTGLTPQPIQNTNSLSILEEQQRQQQQQQQQQQQQQQQQQQQQQQQQQQQQQQQQQQQQQQAVAAAAVQQSTSQQATQGTSGQAPQLFHSQTLTTAPLPGTTPLYPSPMTPMTPITPATPASESSGIVPQLQNIVSTVNLGCKLDLKTIALRARNAEYNPKRFAAVIMRIREPRTTALIFSSGKMVCTGAKRYGQAWCLTKAGKSLEARSSRPA

SEQ ID NO: 67942 - protein, 144 aa, Homo sapiens
GHWIEATGHTNEMKHTTDFYFNIAGHQAMHYSRILPNIWLGSCPRQVEHVTIKLKHELGITAVMNFQTEWDIVQNSSGCNRYPEPMTPDTMIKLYREEGLAYIWMPTPDMSTEDEKRTADMCCSGMWEETADFGLGILDYLKQK

SEQ ID NO: 67943 - protein, 233 aa, Homo sapiens
MWGLKVLLLPVVSFALYPEEILDTHWELWKKTHRKQYNNKVDEISRRLIWEKNLKYISIHNLEASLGVHTYELAMNHLGDMTSEEVVQKMTGLKVPLSHSRSNDTLYIPEWEGRAPDSVDYRKKGYVTPVKNQGQCGSCWAFSSVGALEGQLKKKTGKLLNLSPQNLVDCVSENDGCGGGYMTNAFQYVQKNRGIDSEDAYPYVGQRVVCTTQQARQLNAEGTERSPRGMRKP

SEQ ID NO: 67944 - protein, 213 aa, Homo sapiens
MEFPDLGAHCSEPSCQRLDFLPLKCDACSGIFCADHVAYAQHHCGSAYQKIFTNKCERAGCRQREMMKLTCERCSRNFCIKHRHPLDHDCSGEGHPTSRAGLAAISRAQAVASTSTVPSPSQTMPSCTSPSRATTRSPSWTAPPVIALQNGLSEDEALQRALEMSLAETKPQVPSCQEEEDLALAQALSASEAEYQRQQAQSRSSKPSNCSLC

SEQ ID NO: 67945 - protein, 172 aa, Homo sapiens
MAAAAVSGALGRAGWRLLQLRCLPVARCRQALVPRAFHASAVGLRSSDEQKQQPPNSFSQQHSETQGAEKPDPESSHSPPRYTDQGGEEEEDYESEEQLQHRILTAALEFVPAHGWTAEAIAEGAQALSILMLPHNIPSSLSLLTSMVDDMWHYAGDQSTDFNWYTRRAMLA

SEQ ID NO: 67946 - protein, 120 aa, Homo sapiens
MSCILQNYNRPPVMALAIPIAVKFLHRGNKELCRNMSNYLSLAAITKADLLADHTEVIVKSILQGNTMLLRVLPAVYEKQPQPINRHLTELLALMSQLEQPEQYHLLRLLHVAAKKKQLE

SEQ ID NO: 67947 - protein, 376 aa, Homo sapiens
MLHLHHSCLCFRSWLPAMLAVLLSLAPSASSDISASRPNILLLMADDLGIGDIGCYGNNTMRTPNIDRLAEDGVKLTQHISAASLCTPSRAAFLTGRYPVRSGMVSSIGYRVLQWTGASGGLPTNETTFAKILKEKGYATGLIGKWHLGLNCESASDHCHHPLHHGFDHFYGMPFSLMGDCARWELSEKRVNLEQKLNFLFQVLALVALTLVAGKLTHLIPVSWMPVIWSALSAVLLLASSYFVGALIVHADCFLMRNHTITEQPMCFQRTTPLILQEVASFLKRNKHGPFLLFVSFLHVHIPLITMENFLGKSLHGLYGDNVEEMDWMVGRILDTLDVEGLSNSTLIYFTSDHGGSLENQLGNTQYGGWNGIYKE

SEQ ID NO: 67948 - protein, 299 aa, Homo sapiens
YLATSGYPWPAWSSLCSCVTCFMRCNVEFVGTRTIYVWLETWRPGLQLQLQRSWLSTMTTVPSVGTPCRLRGNCPVDIFSTRSRIASWLPSFSVEVMHTTNILGITQASNSQLNAMAHQIQEMFPQVPYHLVLQDLQLTRSVEITTDNILEGRIQVPFPTQRSDSIRPALNSPVERPSSDQEEGETSAQTERVPLDLSPRLEETLDFGEVEVEPSEVEDFEARGSRFSKSADERQRMLVQRKDELLQQARKRFLNKSSEDDAASESFLPSEGASSDPVTLRRRMLAAAAERRLQKQQTS

SEQ ID NO: 67949 - protein, 434 aa, Homo sapiens
MLNYQGLQRVKIIASDNLWESISASMLLDAELFKVVDVIGAHYPGTHSAKDAKLTGKKLWSSEDFSTLNSDMGAGCWGRILNQNYINGYMTSTIAWNLVASYYEQLPYGRCGLMTAQEPWSGHYVVESPVWVSAHTTQFTQPGWYYLKTVGHLEKGGSYVALTDGLGNLTIIIETMSHKHSKCIRPFLPYFNVSQQFATFVLKGSFSEIPELQVWYTKLGKTSERFLFKQLDSLWLLDSDGSFTLSLHEDELFTLTTLTTGRKGSYPLPPKSQPFPSTYKDDFNVDYPFFSEAPNFADQTGVFEYFTNIEDPGEHHFTLRQVLNQRPITWAADASNTISIIGDYNWTNLTIKCDVYIETPDTGGVFIAGRVNKGGILIRSARGIFFWIFANGSYRVTGDLAGWIIYALGRVEVTAKKWYTLTLTIKVAGRRKKT

SEQ ID NO: 67950 - protein, 215 aa, Homo sapiens
MTPLVSRLSRLWEVNQLWAGLGYYSRGRRLQEGARKVVEELGGHMPRTAETLQQLLPGVGRYTAGAIASIAFGQATGVVDGNVARVLCRVRAIGADPSSTLVSQQLWGLAQQLVDPARPGDFNQAAMELGATVCTPQRPLCSQCPVESLCRARQRVEQEQLLASGSLSGSPDVEECAPNTGQCHLCLPPSEPWDQTLGVVNFPRKASRKPPREES

SEQ ID NO: 67951 - protein, 51 aa, Homo sapiens
MLRRRGSPGMGVHVGAALGALWFCLTGALEVQVPEDPVVALVGTDATLCCS

SEQ ID NO: 67952 - protein, 56 aa, Homo sapiens
MADGVDHIDIYADVGEEFNQEAEYEREAENERGTGIVTETVTESVTESANIVIVRS

SEQ ID NO: 67953 - protein, 196 aa, Homo sapiens
MGRWALDVAFLWKAVLTLGLVLLYYCFSIGITFYNKWLTKSFHFPLFMTMLHLAVIFLFSALSRALVQCSSHRARVVLSWADYLRRVAPTALATALDVGLSNWSFLYVTVSLPHSSTWRASPWCWGPRSSVAFAGPSPRCSCRRLNSASRIPSTPCSTCSHSCSWGSSLSLLYLKVSICPHLRKSSVSRTQGCSCG

SEQ ID NO: 67954 - protein, 106 aa, Homo sapiens
MSNPSAPPPYEDRNPLYPGPPPPGGYGQPSVLPGGYPAYPGYPQPGYGHPAGYPQPMPPTHPMPMNYGPGHGYDGEERAVSDSFGPGEWDDRKVRHTFIRKVYSII

SEQ ID NO: 67955 - protein, 100 aa, Homo sapiens
MQENLRFASSGDDIKIWDASSMTLVDKFNPHTSPHGISSICWSSNNNFLVTASSSGDKIVVSSCKCKPVPLLELAEGQKQTCVNLNSTSMYLVSGGLNNT

SEQ ID NO: 67956 - protein, 175 aa, Homo sapiens
MRIGDKSFSFLEAGHTMLTGVTDGIFCCLLGTPPNAVGPLESVESSDGYTFVEVKPGRVLRVKHAGPAPAAAPPPPSSASSDAAQGDLSGLVRCQRRITVYRNGRLLVENLGRAPRADLLHGQNGSGEPPAALEVELADPAGSDGRLAPGSAGSGSGSGSGGRRRRARRPKRTIH

SEQ ID NO: 67957 - protein, 234 aa, Homo sapiens
MWGLIAQGVKCADCGLNVHKQCSKMVPNDCKPDLKHVKKVYSCDLTTLVKAHTTKRPMVVDMCIREIESRGLNSEGLYRVSGFSDLIEDVKMAFDRDGEKADISVNMYEDINIITGALKLYFRDLPIPLITYDAYPKFIESAKIMDPDEQLETLHEALKLLPPAHCETLRYLMAHLKRVTLHEKENLMNAENLGIVFGPTLMRSPELDAMAALNDIRYQRLVVELLIKNEDILF

SEQ ID NO: 67958 - protein, 59 aa, Homo sapiens
MKLERAAAQREQGGTAGLRLLPGRGELPAQGIREGLKVRPRVAADRAPEQPGQGTGAAH

SEQ ID NO: 67959 - protein, 275 aa, Homo sapiens
MNMTQARVLVAAVVGLVAVLLYASIHKIEEGHLAVYYRGGALLTSPSGPGYHIMLPFITTFRSVQTTLQTDEVKNVPCGTSGGVMIYIDRIEVVNMLAPYAVFDIVRNYTADYDKTLIFNKIHHELNQFCSAHTLQEVYIELFDQIDENLKQALQKDLNLMAPGLTIQAVRVTKPKIPEAIRRNFELMEAEKTKLLIAAQKQKVVEKEAETERKKAVIEAEKIAQVAKIRFQQKVMEKETEKRISEIEDAAFLAREKAKADAEYYAAHKYATSNK

SEQ ID NO: 67960 - protein, 113 aa, Homo sapiens
MRRVGGRADEDATAAGSEFRPLAASRVCFLRSRPPVAEPRPSEGLWVLAPPEPTGHLVIPGTSPLEPPCPWLDSHIFQCRFGKMLPLEKAFASPRSSPAPPDLPTPGSAAGVQ

SEQ ID NO: 67961 - protein, 161 aa, Homo sapiens
MAGSREVVAMDCEMVGLGPHRESGLARCSLVNVHGAVLYDKFIRPEGEITDYRTRVSGVTPQHMVGATPFAVARLEALKEDMSGYTIYDTSTDRLLWREAKLDHCRRVSLRVLSERLLHKSIQNSLLGHSSVEDARATMELYQISQRIRARRGLPRLAVSD

SEQ ID NO: 67962 - protein, 996 aa, Homo sapiens
MRDFGFGVLQTAPLRSSSPGPLFCGEAYGPYAVGSVNPLPSATPFGPLSPPPLPVTGFLEAASPFSVPLGGGAGSPAAAASSSSPFLAHQQTMQDELLLGLTQQPARPLSGAAATEKLPDHHPGGGTIAGVTHLLPSQDFKPSLHHPSSSSASSCCCCRTSSPQDFSKRQQQQLSSQKRKEFSPPHLPHPPDSKPPPPPPPLHCPGRFSPPPPPAGPLLQPAQLAQRQQQQPPQQFSLLHQQHLSPQDFAPRQRPADLPPLPQLPPSPPAAPRRRHGGAGSPRKTPAAGEGSAAESPNAGLASSTPVNPAPGSMESPNHPLLNSPSNLLPGGALGAGAFSSLQSPDLPHPGGGGGGGGGGPPGGGGGGGSASPPPLPGFGTPWSVQTASPPPQPQQPPPTQPQQQPPPPQQPPQPQPQPPGSSATTPGGGSGGSLSAMPPPSPDSENGFYPGLPSSMNPAFFPSFSPVSPHGCTGLSVPTSGGGGGGFGGPFSATAVPPPPPPAMNIPQQQPPPPAAPQQPQSRRSPVSPQLQQQHQAAAAAFLQQRNSYNHHQPLLKQSPWSNHQSSGWGTGSMSWGAMHGRDHRRTGNMGIPGTMNQISPLKKPFSGNVIAPPKFTRSTPSLTPKSWIEDNVFRTDNNSNTLLPLQDRSRMYDSLNMHSLENSLIDIMRAEHDPLKGRLSYPHPGTDNLLMLNGRSSLFPIDDGLLDDGHSDQVGVLNSPTCYSAHQNGERIERFSRKVFVGGLPPDIDEDEITASFRRFGPLVVDWPHKAESKSYFPPKGYAFLLFQEESSVQALIDACIEEDGKLYLCVSSPTIKDKPVQIRPWNLSDSDFVMDGSQPLDPRKTIFVGGVPRPLRAVELAMIMDRLYGGVCYAGIDTDPELKYPKGAGRVAFSNQQSYIAAISARFVQLQHGDIDKRVEVKPYVLDDQMCDECQGARCGGKFAPFFCANVTCLQYYCEFCWANIHSRAGREFHKPLVKEGADRPRQIHFRWN

SEQ ID NO: 67963 - protein, 84 aa, Homo sapiens
MSGLVLGQRDEPAGHRLSQEEILGSTRLVSQGLEALRSEHQAVLQSLSQTIECLQQGGHEEGLVHEKARQLRRSMENIELGLSE

SEQ ID NO: 67964 - protein, 152 aa, Homo sapiens
RKSINIIKKYFEEYALVNQDILENKESWDKILALVPEKSFQKSHNSLQRWEHLKKVASRYQNNIKNDKYGPWLEWEIMLQYCFPRLDINVSKGINHLLKSPFSVHPKTGRISVPIDLQKVDQFDPFTVPTISFICRELDAISTNEEEKEENE

SEQ ID NO: 67965 - protein, 185 aa, Homo sapiens
MESTLSASNMQDPSSSPLEKCLGSANGNGDLDSEEGSSLEETGFNWGEYLEETGASAAPHTSFKHVEISIQSNFQPGMKLEVANKNNPDTYWVATIITTCGQLLLLRYCGYGEDRRADFWCDVVIADLHPVGWCTQNNKVLMPPDAIKEKYTDWTEFLIRDLTGSRTAPANLLEGTSTSWLVSRE

SEQ ID NO: 67966 - protein, 92 aa, Homo sapiens
  MOD_RES (1)..(1): Any amino acid
XFVPFRELKNQRTAQGAPGIHHAASPVAANLCDPARHAQHTRIPCGAGQVRAGRGPEAGGGVLQPQRPAPEKPGCPCRRGQPRLHTVKMWRA

SEQ ID NO: 67967 - protein, 46 aa, Homo sapiens
MEFDLNNEGEIDLMSLKRMMEKLGVPKTHLEMKKMISEVTGGSHDV

SEQ ID NO: 67968 - protein, 107 aa, Homo sapiens
  MOD_RES (1)..(1): Any amino acid
XEIPDPSRLPLVASWKTYPLFFGTAIFSFESIGVVLPLENKMKNARHFPAILSLGMSIVTSLYIGMAALGYLRFGDDIKASISLNLPNCWYLHGLSGGGDSGMGGNV

SEQ ID NO: 67969 - protein, 198 aa, Homo sapiens
  MOD_RES (1)..(1): Any amino acid
XPFDNGVQATGALYSRSLTPDDDVFQYLAHTYASRNPNMKKGDECKNKMNFPNGVTNGYSWYPLQGGMQDYNYIWAQCFEITLELSCCKYPREEKLPSFWNNNKASLIEYIKQVHLGVKGQVFDQNGNPLPNVIVEVQDRKHICPYRTNKYGEYYLLLLPGSYIINVTVPGHDPHITKLRSFACNRGQDEFCLTSLMS

SEQ ID NO: 67970 - protein, 626 aa, Homo sapiens
MSLQWNLIRKLPPDCFKNYHDLQKLYLQNNKITSISIYAFRGLNSLTKLYLSHNRITFLKPGVFEDLHRLEWLIIEDNHLSRISPPTFYGLNSLILLVLMNNVLTRLPDKPLCQHMPRLHWLDLEGNHIHNLRNLTFISCSNLTVLVMRKNKINHLNENTFAPLQKLDELDLGSNKIENLPPLIFKDLKELSQLNLSYNPIQKIQANQFDYLVKLKSLLEGIEISNIQQRMFRPLMNLSHIYFKKFQYCGYAPHVRSCKPNTDGISSLENLLASIIQRVFVWVVSAVTCFGNIFVICMRPYIRSENKLYAMSIISLCCADCLMGIYLFVIGGFDLKFRGEYNKHAQLWMESTHCQLVGSLAILSTEVSVLLLTFLTLEKYICIVYPFRCVRPGKCRTITVLILIWITGFIVAFIPLSNKEFFKNYYGTNGVCFPLHSEDTESIGAQIYSVAIFLGINLAAFIIIVFSYGSMFYSVHQSAITATEIRNQVKKEMILAKRFFFIVFTDALCWIPIFVVKFLSLLQVEIPGTITSWVVIFILPINSALNPILYTLTTRPFKEMIHRFWYNYRQRKSMDSKGQKTYAPSFIWVEMWPLQEMPPELMKPDLFTYPCEMSLISQSTRLNSYS

SEQ ID NO: 67971 - protein, 796 aa, Homo sapiens
MSARTPLPTVNERDTENHTSVDGYTEPHIQPTKSSSRQNIPRCRNSITSATDEQPHIGNYRLQKTIGKGNFAKVKLARHVLTGREVAVKIIDKTQLNPTSLQKLFREVRIMKILNHPNIVKLFEVIETEKTLYLVMEYASGGEVFDYLVAHGRMKEKEARAKFRQIVSAVQYCHQKYIVHRDLKAENLLLDGDMNIKIADFGFSNEFTVGNKLDTFCGSPPYAAPELFQGKKYDGPEVDVWSLGVILYTLVSGSLPFDGQNLKELRERVLRGKYRIPFYMSTDCENLLKKLLVLNPIKRGSLEQIMKDRWMNVGHEEEELKPYTEPDPDFNDTKRIDIMVTMGFARDEINDALINQKYDEVMATYILLGRKPPEFEGGESLSSGNLCQRSRPSSDLNNSTLQSPAHLKVQRSISANQKQRRFSDHAGPSIPPAVSYTKRPQANSVESEQKEEWDKDVARKLGSTTVGSKSEMTASPLVGPERKKSSTIPSNNVYSGGSMARRNTYVCERTTDRYVALQNGKDSSLTEMSVSSISSAGSSVASAVPSARPRHQKSMSTSGHPIKVTLPTIKDGSEAYRPGSTTQRVPAASPSAHSISTATPDRTRFPRGSSSRSTFHGEQLRERRSVAYNGPPASPSHETGAFAHARRGTSTGIISKITSKFVRRDPSEGEASGRTDTSRSTSGEPKERDKEEGKDSKPRSLRFTWSMKTTSSMDPNDMMREIRKVLDANNCDYEQKERFLLFCVHGDARQDSLVQWEMEVCKLPRLSLNGVRFKRISGTSIAFKNIASKIANELKL

SEQ ID NO: 67972 - protein, 76 aa, Homo sapiens
MLFEGKVNPQTQSLLAECGEWTRRSLHLRVLGRQLILPTDKGVQHFQGSTPASAVHRPPLSACGHSSNIRELCISG

SEQ ID NO: 67973 - protein, 118 aa, Homo sapiens
MGSRNSSSAGSGSGDPSEGLPRRGAGLRRSEEEEEEDEDVDLAQVLAYLLRRPSWTQRKRMTELGMVVLGIDTTHLWMLPLTPGSWNSMRSRHKWNWPQGSWGLGGPPRSTAFLECCT

SEQ ID NO: 67974 - protein, 266 aa, Homo sapiens
MVYTSHYKSPGRRPLKTHPTVTYWRVNEGSSSSYDNGFPTGDHELFTTFSWDDQKVRRVFVRKVYTILLIQLLVTLAVVALFTFCDPVKDYVQANPGWYWASYAVFFATYLTLACCSGPRRHFPWNLILLTVFTLSMAYLTGMLSSYYNTTSVLLCLGITALVCLSVTVFSFQTKFDFTSCQGVLFVLLMTLFFSGLILAILLPFQYVPWLHAVYAALGAGVFTLFLALDTQLLMGNRRHSLSPEEYIFGALNIYLDIIYIFTFFL

SEQ ID NO: 67975 - protein, 172 aa, Homo sapiens
MRDCCGMVSSGSLSSLKAAERTPGALFFSSSTPGRYYNYDSSSRPQSRSVMSDQCAGQWFLKACGLGEGDTEVFPTQHVVRALQTIFELNVQAFAGGAMGAVNGMQPHGVPDKSSVQSDEVWVGVVYGLAATMIQEVMHSFSHLSTICILAQKTSSTTKFLQGITQCHLVRL

SEQ ID NO: 67976 - protein, 194 aa, Homo sapiens
MKKKVLLMGKSGSGKTSMRSIIFANYIARDTRRLGATIDVEHSHVRFLGNLVLNLWDCGGQDTFMENYFTSQRDNIFRNVEVLIYVFDVESRELEKDMHYYQSCLEAILQNSPDAKIFCLVHKMDLVQEDQRDLIFKEREEDLRRLSRPLECSCFRTSIWDETLYKAWSSIVYQLIPNVQQLEMNLRNFAEIIE

SEQ ID NO: 67977 - protein, 77 aa, Homo sapiens
  MOD_RES (1)..(1): Any amino acid
XTPSTGTIPKEIPAWGQLHTQPEVEPQVDSPAPPRPSLQPHPRLLDHRDSVEQVAVLASLGILSFLGLVAGALALGL

SEQ ID NO: 67978 - protein, 158 aa, Homo sapiens
MPGPLGLLCFLALGLLGSAGPSGAAPPLCAAPCSCDGDRRVDCSGKGLTAVPEGLSAFTQALDISMNNITQLPEDAFKNFPFLEELRLDANHITSVPEDSFEGLVQLRHLWLDDNSLTEVPVHPLSNLPTLQALTLALNKISSIPDFAFTNLSSLVVL

SEQ ID NO: 67979 - protein, 72 aa, Homo sapiens
LVSGDESSLLLNAASTVARPVFTEYQASAFGNVKLVVHDCPVWKSYLVHAHYVPQTEGAVLVQLKGSNLQKN

SEQ ID NO: 67980 - protein, 97 aa, Homo sapiens
QTEQRSKGDALDKCQAELKKLRKKSQGSKNPQKYSDKELQYIDAISNKQGELENYVSDGYKTALTEERRRFCFLVEKQCAVAKNSAAYHSKGGPGPV

SEQ ID NO: 67981 - protein, 53 aa, Homo sapiens
  MOD_RES (1)..(1): Any amino acid
XDYNPNCRLCNIPLASRETTRLVCYDSFLQIDEVVSPEPEPLNTSDFSDWSSF

SEQ ID NO: 67982 - protein, 143 aa, Homo sapiens
MDSFDLALLQEWDLESLWGEDILNQRNDSLVVEFQSSASRCRSVYEPDRNALRRKERERRNQETQQDDGTFNSSYSLFSEPYKTNKGDELSNRIQNTLGNYDEMKDFLTDRSNQSHLVGVPKPGVPQTPVNKIDEHFVADSRA

SEQ ID NO: 67983 - protein, 99 aa, Homo sapiens
MTDTRRRVKVYTLNEDRQWDDRGTGHVSSGYVERLKGMSLLVRAESDGSLLLESKINPNTAYQKQQDTLIVWSEAENYDLALSFQEKAGCDEIWEKICQ

SEQ ID NO: 67984 - protein, 21 aa, Homo sapiens
IALSFLIYFISALFGYLTFYG

SEQ ID NO: 67985 - protein, 783 aa, Homo sapiens
MGDEKDSWKVKTLDEILQEKKRRKEQEEKAEIKRLKNSDDRDSKRDSLEEGELRDHRMEITIRNSPYRREDSMEDRKTRSNCMLSAREQEKTQRTNISSTREAQTLSQKKARNKKEQGLHSQKQANTAGRYSNDTSTREAEAGESLEPGRRSKLLFRGNDGVCLFRDRLEQLERKRERERKMREQQKEQREQKERERRAEERRKEREARREVSAHHRTMREDYSDKVKASHWSRSPPRPPRERFELGDGRKPVKEEKMEERDLLSDLQDISDSERKTSSAESSSAESGSGSEEEEEEEEEEEEEGSTSEESEEEEEEEEEEEEETGSNSEEASEQSAEEVSEEEMSEDEERENENHLLVVPESRFDRDSGESEEAEEEVGEGTPQSSALTEGDYVPDSPALSPIELKQELPKYLPALQGCRSVEEFQCLNRIEEGTYGVVYRAKDKKTDEIVALKRLKMEKEKEGFPITSLREINTILKAQHPNIVTVREIVVGSNMDKIYIVMNYVEHDLKSLMETMKQPFLPGEVKTLMIQLLRGVKHLHDNWILHRDLKTSNLLLSHAGILKVGDFGLAREYGSPLKAYTPVVVTLWYRAPELLLGAKEYSTAVDMWSVGCIFGELLTQKPLFPGKSEIDQINKVFKDLGTPSEKIWPGYSELPAVKKMTFSEHPYNNLRKRFGALLSDQGFDLMNKFLTYFPGRRISAEDGLKHEYFRETPLPIDPSMFPTWPAKSEQQRVKRGTSPRPPEGGLGYSQLGDDDLKETGFHLTTTNQGASAAGPGFSLKF

SEQ ID NO: 67986 - protein, 140 aa, Homo sapiens
MVACYALLGRTLLAARGPERRRALRVVVALVAAFVVLQLPYSLALLLDTADLLAARERSCPASKRKDVALLVTSGLALARCGLNPVLYAFLGLRFRQDLRRLLRGGSCPSGPQPRRGCPRRPRLSSCSAPTETHSLSWDN

SEQ ID NO: 67987 - protein, 645 aa, Homo sapiens
MQEAELRDGEAAAAAASYRVLSRLLGYGEAAPEPGPPPPPPGHGPPPPPFLARPGPRGSRPPQLMVFRNVGRPPEEEDVEAAPEPGPSELLCPRHRCALDPKALPPGLALERTWGPAAGLEAQLAALGLGQPAGPGVKTVGGGCCPCPCPPQPPPPQPQPPAAAPQAGEDPTETSDALLVLEGLESEAESLETNSCSEEELSSPGRGGGGGGRLLLQPPGPELPPVPFPLQDLVPLGRLSRGEQQQQQQQQPPPPPPPPGPLRPLAGPSRKGSFKIRLSRLFRTKSCNGGSGGGDGTGKRPSGELAASAASLTDMGGSAGRELDAGRKPKLTRTQSAFSPVSFSPLFTGETVSLVDVDISQRGLTSPHPPTPPPPPRRSLSLLDDISGTLPTSVLVAPMGSSLQSFPLPPPPPPHAPDAFPRIAPIRAAESLHSQPPQHLQCPLYRPDSSSFAASLRELEKCGWYWGPMNWEDAEMKLKGKPDGSFLVRDSSDPRYILSLSFRSQGITHHTRMEHYRGTFSLWCHPKFEDRCQSVVEFIKRAIMHSKNGKFLYFLRSRVPGLPPTPVQLLYPVSRFSNVKSLQHLCRFRIRQLVRIDHIPDLPLPKPLISYIRKFYYYDPQEEVYLSLKEAQLISKQKQEVEPST

SEQ ID NO: 67988 - protein, 174 aa, Homo sapiens
MELGKGKLLRTGLNALHQAVHPIHGLAWTDGNQVVLTDLRLHSGEVKFGDSKVIGQFECVCGLSWAPPVADDTPVLLAVQHEKHVTVWQLCPSPMESSKWLTSQTCEIRGSLPILPQGCVWHPKCAILTVLTAQDVSIFPNVHSDDSQVKADINTQGRIHCACWTQDGLRLVVA

SEQ ID NO: 67989 - protein, 843 aa, Homo sapiens
  MOD_RES (1)..(1): Any amino acid
XHLDVSDEKQRKACMSKITKELLNKRGFPAIRDYHFVNATEESDALAKLRKTIINESLNFKIRDQLVVGQLIPDCYVELEKIILSERKNVPIEFPVIDRKRLLQLVRENQLQLDENELPHAVHFLNESGVLLHFQDPALQLSDLYFVEPKWLCKIMAQILTVKVEGCPKHPKGIISRRDVEKFLSKKRKFPKNYMSQYFKLLEKFQIALPIGEEYLLVPSSLSDHRPVIELPHCENSEIIIRLYEMPYFPMGFWSRLINRLLEISPYMLSGRERALRPNRMYWRQGIYLNWSPEAYCLVGSEVLDNHPESFLKITVPSCRKGCILLGQVVDHIDSLMEEWFPGLLEIDICGEGETLLKKWALYSFNDGEEHQKILLDDLMKKAEEGDLLVNPDQPRLTIPISQIAPDLILADLPRNIMLNNDELEFEQAPEFLLGDGSFGSVYRAAYEGEEVAVKIFNKHTSLRLLRQELVVLCHLHHPSLISLLAAGIRPRMLVMELASKGSLDRLLQQDKASLTRTLQHRIALHVADGLRYLHSAMIIYRDLKPHNVLLFTLYPNAAIIAKIADYGIAQYCCRMGIKTSEGTPGFRAPEVARGNVIYNQQADVYSFGLLLYDILTTGGRIVEGLKFPNEFDELEIQGKLPDPVKEYGCAPWPMVEKLIKQCLKENPQERPTSAQVFDILNSAELVCLTRRILLPKNVIVECMVATHHNSRNASIWLGCGHTDRGQLSFLDLNTEGYTSEEVADSRILCLALVHLPVEKESWIVSGTQSGTLLVINTEDGKKRHTLEKMTDSVTCLYCNSFSKQSKQKNFLLVGTADGKLAIFEDKTVKAGSQWHDHSLLQP

SEQ ID NO: 67990 - protein, 82 aa, Homo sapiens
MAGFWVGTAPLVAAGRRGRWPPQQLMLSAALRTLKHVLYYSRQCLMVSRNLGSVGYDPNEKDLKILQVFGSSSFALLSPAAL

SEQ ID NO: 67991 - protein, 399 aa, Homo sapiens
MSTNENANTPAARLHRFKNKGKDSTEMRRRRIEVNVELRKAKKDDQMLKRRNVSSFPDDATSPLQENRNNQGTVNWSVDDIVKGINSSNVENQLQATQAARKLLSREKQPPIDNIIRAGLIPKFVSFLGRTDCSPIQFESAWALTNIASGTSEQTKAVVDGGAIPAFISLLASPHAHISEQAVWALGNIAGDGSVFRDLVIKYGAVDPLLALLAVPDMSSLACGYLRNLTWTLSNLCRNKNPAPPIDAVEQILPTLVRLLHHDDPEVLADTCWAISYLTDGPNERIGMVVKTGVVPQLVKLLGASELPIVTPALRAIGNIVTGTDEQTQVVIDAGALAVFPSLLTNPKTNIQKEATWTMSNITAGRQDQIQQVVNHGLVPFLVSVLSKILRHKRKLCGP

SEQ ID NO: 67992 - protein, 321 aa, Homo sapiens
MDTGVIEGGLNVTLTIRLLMHGKEVGSIIGKKGESVKKMREESGARINISEGNCPERIITLAGPTNAIFKAFAMIIDKLEEDISSSMTNSTAASRPPVTLRLVVPASQCGSLIGKGGCKIKEIRESTGAQVQVAGDMLPNSTERAITIAGIPQSIIECVKQICVVMLETLSQSPPKGVTIPYRPKPSSSPVIFAGGQLTKLHQLAMQQSHFPMTHGNTGFSGIESSSPEVKGYWAGLDASAQTTSHELTIPNDLIGCIIGRQGAKINEIRQMSGAQIKIANPVEGSTDRQVTITGSAASISLAQYLINVRLSSETGGMGSS

SEQ ID NO: 67993 - protein, 75 aa, Homo sapiens
  MOD_RES (1)..(1): Any amino acid
XVSLWDVDELVCVRCFSRLDWPVRTLSFSHDGKMLASASEDHFIDIAEVETDRVSFCHPAWCAVVQAILLPQPPK

SEQ ID NO: 67994 - protein, 135 aa, Homo sapiens
LQLQRNQLRMLEPEPLAGLDQLRELSLAHNRLRVGDIGPGTWHELQALQMLDLSHNELSFVPPDLPEALEELHLEGNRIGHVGPEAFLSTPRLRALFLRCPEGDRRGGGGQGRAWEGHDRLSVQGQQASHDEHRG

SEQ ID NO: 67995 - protein, 122 aa, Homo sapiens
MTNSKGRSITDKTSGGPSSGGGFVDWTLRLNTIQSDKFLNLLLSMVPVIYQKNQEDRHKKANGIWQDGLSTAVQTFSNRSEQHMEYHSFSEQSFHANNGHASSSCSQKYDDYANYNYCDGRE

SEQ ID NO: 67996 - protein, 20 aa, Homo sapiens
SLKDAEASLQSDPAFCKVIA

SEQ ID NO: 67997 - protein, 73 aa, Homo sapiens
MLLWTLVERAPDHLRHIGALQGCCCGCFESNFLCAACDRRWEEHETFFDTQKTRQRGGRPRGTDTVSNWHRPL

SEQ ID NO: 67998 - protein, 243 aa, Homo sapiens
MAASRRSQHHHHHHQQQLQPAPGASAPPPPPPPPLSPGLAPGTTPASPTASGLAPFASPRHGLALPEGDGSRDPPDRPRSPDPVDGTSCCSTTSTICTVAAAPVVPAVSTSSAAGVAPNPAGSGSNNSPSSSSSPTSSSSSSPSSPGSSLAESPEAAGVSSTAPLGPGAAGPGTGVPAVSGALRELLEACRNGDVSRVKRLVDAANVNAKDMAGRKSSPLHFAAGQRLLNCLLRVMGLGAGSG

SEQ ID NO: 67999 - protein, 560 aa, Homo sapiens
MAALTIATGTGNWFSALALGVTLLKCLLIPTYHSTDFEVHRNWLAITHSLPISQWYYEATSEWTLDYPPFFAWFEYILSHVAKYFDQEMLNVHNLNYSSSRTLLFQRFSVIFMDVLFVYAVRECCKCIDGKKVGKELTEKPKFILSVLLLWNFGLLIVDHIHFQYNGFLFGLMLLSIARLFQKRHMEGAFLFAVLLHFKHIYLYVAPAYGVYLLRSYCFTANKPDGSIRWKSFSFVRVISLGLVVFLVSALSLGPFLALNQLPQVFSRLFPFKRGLCHAYWAPNFWALYNALDKVLSVIGLKLKFLDPNNIPKASMTSGLVQQFQHTVLPSVTPLATLICTLIAILPSIFCLWFKPQGPRGFLRCLTLCALSSFMFGWHVHEKAILLAILPMSLLSVGKAGDASIFLILTTTGHYSLFPLLFTAPELPIKILLMLLFTIYSISSLKTLFRKEKPLFNWMETFYLLGLGPLEVCCEFVFPFTSWKGPALLPRLEYSGAVSVHCNLHLSLPSSWDYRRHDQDQIIFVFFVEMGFHHFAQAGLELLAQAVHPPRPPKVLGLQV

SEQ ID NO: 68000 - protein, 122 aa, Homo sapiens
RVATGGRPGTSPALFSGRGAATGGRQGGRFDTKCLAAATWGRLPGPEETLPGQDSWNGVPSRAGLGMCALAAALVVHCYSKSPSNKDAALLEAARANNMQEVSRNRCALLHSAAVQEYGYGN

SEQ ID NO: 68001 - protein, 604 aa, Homo sapiens [sequence omitted]

SEQ ID NO: 68002 - protein, 812 aa, Homo sapiens
  MOD_RES (1)..(1): Any amino acid
XLFLLELLTCQKDFTNYFGHLEGCGADLHKEIRDTYYQLVLFLVKAVKGFSSLNDRSLLPALSCVQTALLHLLDMGWEPNDLAFFVDIQLPDLLMKMSQENISVHDSVISQWSEEDELADAKQNSEWMDECQDGMFEAWYEKIAQEDPEKQRKMHMFIARYCDLLNVDISCDGCDEIAPWHRYRCLQCSDMDLCKTCFLGGVKPEGHGDDHEMVNMEFTCDHCQGLIIGRRMNCNVCDDFDLCYGCYAAKKYSYGHLPTHSITAHPMVTIRISDRQRLIQPYIHNYSWLLFAALALYSAHLASAEDVDGEKLDPQTRSSATTLRSQCMQLVGDCLMKAHQGKGLKALALLGVLPDGDSSLEDQALPVTVPTGASEEQLEKKAVQGAELSEAGNGKRAVHEEIRPVDFKQRNKADKGVSLSKDPSCQTQISDSPADASPPTGLPDAEDSEVSSQKPIEEKAVTPSPEQVFAECSQKRILGLLAAMLPPLKSGPTVPLIDLEHVLPLMFQVVISNAGHLNETYHLTLGLLGQLIIRLLPAEVDAAVIKVLSAKHNLFAAGDSSIVPDGWKTTHLLFSLGAVCLDSRVGLDWACSMAEILRSLNSAPLWRDVIATFTDHCIKQLPFQLKHTNIFTLLVLVGFPQVLCVGTRCVYMDNANEPHNVIILKHFTEKNRAVIVDVKTRKRKTVKDYQLVQKGGGQECGDSRAQLSQYSQHFAFIASHLLQSSMDSHCPEAVEATWVLSLALKGLYKTLKAHGFEEIRATFLQTDLLKLLVKKCSKGTGFSKTWLLRDLEVRDERDSCSSFLVQMCWPRS

SEQ ID NO: 68003 - protein, 64 aa, Homo sapiens
MSELLRARSQSSERGNDQESSQPVGSVIVQEPTEEKRQEEEPPTDNQGIAPSGEIENQAVPAFQ

SEQ ID NO: 68004 - protein, 230 aa, Homo sapiens
MQPRWAQGATMWLGVLLTLLLCSSLEGQENSFTINSVDMKSLPDWTVQNGKNLTLQCFADVSTTSHVKPQHQMLFYKDDVLFYNISSMKSTESYFIPEVRIYDSGTYKCTVIVNNKEKTTAEYQVLVEGVPSPRVTLDKKEAIQGGIVRVNCSVPEEKAPIHFTIEKLELNEKMVKLKREKNSRDQNFVILEFPVEEQDRVLSFRCQARIISGIHMQTSESTKSELVTVT

SEQ ID NO: 68005 - protein, 148 aa, Homo sapiens
MPCIQAQYGTPAPSPGPRDHLASDPLTPEFIKPTMDLASPEAAPAAPTALPSFSTFMDGYTGEFDTFLYQLPGTVQPCSSASSSASSTSSSSATSPASASFKFEDFQVAQCRKTPSTSAWLTRTALWTRGGETAASSAASRSAWRWAW

SEQ ID NO: 68006 - protein, 127 aa, Homo sapiens
MYSAEKRAKSGPEAALYSHPLPESCLGEHEVPVPSYYRASPSYSALDKTPHCSGANDFEAPFEQRASLNPRAEHLESPQLGGKVSFPETPKSDSQTPSPNEIKTEQSLAGPKGSPSESEKERAKAAD

SEQ ID NO: 68007 - protein, 191 aa, Homo sapiens
  MOD_RES (1)..(1): Any amino acid
XQMHVIDHTKGQPSEGESRNVLTESARIARGKITDLANLSAANHDAAIFPGGFGAAKNLSTFAVDGKDCKVNKEVERVLKEFHQAGKPIGLCCIAPVLAAKVLRGVEVTVGHEQEEGGKWPYAGTAEAIKALGAKHCVKEVVEAHVDQKNKVVTTPAFMCETALHYIHDGIGAMEEREIAAPQPPGLTSGE

SEQ ID NO: 68008 - protein, 486 aa, Homo sapiens
MARQPPPPWVHAAFLLCLLSLGGAIEIPMDPSIQNELTQPPTITKQSAKDHIVDPRDNILIECEAKGNPAPSFHWTRNSRFFNIAKDPRVSMRRRSGTLVIDFRSGGRPEEYEGEYQCFARNKFGTALSNRIRLQVSKSPLWPKENLDPVVVQEGAPLTLQCNPPPGLPSPVIFWMSSSMEPITQDKRVSQGHNGDLYFSNVMLQDMQTDYSCNARFHFTHTIQQKNPFTLKVLTNHPYNDSSLRNHPDMYSARGVAERTPSFMYPQGTASSQMVLRGMDLLLECIASGVPTPDIAWYKKGGDLPSDKAKFENFNKALRITNVSEEDSGEYFCLASNKMGSIRHTISVRVKAAPYWLDEPKNLILAPGEDGRLVCRANGNPKPTVQWMVNGEPLQSAPPNPNREVAGDTIIFRDTQISSRAVYQCNTSNEHGYLLANAFVSVLDVPPRMLSPRNQLIRVILYNRTRLDCPFFGSPIPTLRCPHGLS

SEQ ID NO: 68009 - protein, 99 aa, Homo sapiens
LRADQEALLEKLLDRPPPGLQRPEDRFCGTYIIFFSLGIGSLLPWNFFITAKEYWMFKLRNSSSPATGEDPEGSDILEEPWAGRSAPWPHWWTWLHPVM

SEQ ID NO: 68010 - protein, 75 aa, Homo sapiens
MTVRGDVLAPDPASPTTAAASPSVSVIPEGSPTAMEQPVFLMTTAAQAISGFFVWTALLITCHQNPSICGPILLI

SEQ ID NO: 68011 - protein, 89 aa, Homo sapiens
MEEFDLVKTLHKTSSSVGSDENSLHSLGLNLNTDRSSPHLSTNGVSSFSGKTRPSVIQGTVEVLTSLMQELQNSGKTDSELWKNCENVE

SEQ ID NO: 68012 - protein, 143 aa, Homo sapiens
MVQVVFRHGARSPLKPLPLEEQVEWNPQLLEVPPQTQFDYTVTNLAGGPKPYSPYDSQYHETTLKGGMFAGQLTKVGMQQMFALGERLRKNYVEDIPFLSPTFNPQEVFIRSTNIFRNLESTRCLLAGLFQCQKEGPIIIHTD

SEQ ID NO: 68013 - protein, 70 aa, Homo sapiens
MMMPVVDPVVREKQLQQELLLIQQQQQIQKQLLIAEFQKQHENLTRQHQAQLQEHIKLQQELLAIKQQQE

SEQ ID NO: 68014 - protein, 53 aa, Homo sapiens
  MOD_RES (1)..(1): Any amino acid
XERDRLKYESQKSKSSSVAVGNDFGFSSPVPDEDFRGRRQEAPKVEEGLREGQ

SEQ ID NO: 68015 - protein, 81 aa, Homo sapiens
MGLQACLLGLFALILSGKCSYSPEPDQRRTLPPGWVSLGRADPEEELSLTFALRQQNVERLSELVQAVSDPSSPQYGAFWD

SEQ ID NO: 68016 - protein, 536 aa, Homo sapiens
MSGRSKRESRGSTRGKRESESRGSSGRVKRERDREREPEAASSRGSPVRVKREFEPASAREAPASVVPFVRVKREREVDEDSEPEREVRAKNGRVDSEDRRSRHCPYLDTINRSVLDFDFEKLCSISLSHINAYACLVCGKYFQGRGLKSHAYIHSVQFSHHVFLNLHTLKFYCLPDNYEIIDSSLEDITYVLKPTFTKQQIANLDKQAKLSRAYDGTTYLPGIVGLNNIKANDYANAVLQALSNVPPLRNYFLEEDNYKNIKRPPGDIMFLLVQRFGELMRKLWNPRNFKAHVSPHEMLQAVVLCSKKTFQITKQGDGVDFLSWFLNALHSALGGTKKKKKTIVTDVFQGSMRIFTKKLPHPDLPAEEKEQLLHNDEYQETMVESTFMYLTLDLPTAPLYKDEKEQLIIPQVPLFNILAKFNGITEKEYKTYKENFLKRFQLTKLPPYLIFCIKRFTKNNFFVEKNPTIVNFPITNVDLREYLSEEVQAVHKNTTYDLIANIVHDGKPSEGSYRIHVLHHIWKRRDNDETNQQGA

SEQ ID NO: 68017 - protein, 55 aa, Homo sapiens
YEGTALVTVGEDGQIKIWSKTGMLRSTLAQQGTPVYSVAWGPDSEKVLYTAVESS

SEQ ID NO: 68018 - protein, 1178 aa, Homo sapiens
MRSKARARKLAKSDGDVVNNMYEPNRDLLASHSAEDEAEDSAMSPIPVGPPSPFPTSEDFTPKEGSPYEAPVYIPEDIPIPADFELRESSIPGAGLGVWAKRKMEAGERLGPCVVVPRAAAKETDFGWEQILTDVEVSPQEGCITKQISEDLGSEKFCVDANQAGAGSWLKYIRVACSCDDQNLTMCQISEQIYYKVIKDIEPGEELLVHVKEGVYPLGTVPPGLDEEPTFRCDECDELFQSKLDLRRHKKYTCGSVGAALYEGLAEELKPEGLGGGSGQAHECKDCERMFPNKYSLEQHMVIHTEEREYKCDQCPKAFNWKSNLIRHQMSHDSGKRFECENCVKVFTDPSNLQRHIRSQHVGARAHACPDCGKTFATSSGLKQHKHIHSTVKPFICEVCHKSYTQFSNLCRHKRMHADCRTQIKCKDCGQMFSTTSSLNKHRRFCEGKNHYTPGGIFAPGLPLTPSPMMDKAKPSPSLNHASLGFNEYFPSRPHPGSLPFSTAPPTFPALTPGFPGIFPPSLYPRPPLLPPTSLLKSPLNHTQDAKLPSPLGNPALPLVSAVSNSSQGTTAAAGPEEKFESRLEDSCVEKLKTRSSDMSDGSDFEDVNTTTGTDLDTTTGTGSDLDSDVDSDPDKDKGKGKSAEGQPKFGGGLAPPGAPNSVAEVPVFYSQHSFFPPPDEQLLTATGAAGDSIKAIASIAEKYFGPGFMGMQEKKLGSLPYHSAFPFQFLPNFPHSLYPFTDRALAHNLLVKAEPKSPRDALKVGGPSAECPFDLTTKPKDVKPILPMPKGPSAPASGEEQPLDLSIGSRARASQNGGGREPRKNHVYGERKLGAGEGLPQVCPARMPQQPPLHYAKPSPFFMDPIYSRVEKRKVTDPVGALKEKYLRPSPLLFHPQMSAIETMTEKLESFAAMKADSGSSLQPLPHHPFNFRSPPPTLSDPILRKGKERYTCRYCGKIFPRSANLTRHLRTHTGEQPYRCKYCDRSFSISSNLQRHVRNIHNKEKPFKCHLCNRCFGQQTNLDRHLKKHEHENAPVSQHPGVLTNHLGTSASSPTSESDNHALLDEKEDSYFSEIRNFIANSEMNQASTRTEKRADMQIVDGSAQCPGLASEKQEDVEEEDDDDLEEDDEDSLAGKSQDDTVSPAPEPQAAYEDEEDEEPAASLAVGFDHTRRHMQ

SEQ ID NO: 68019 - protein, 2261 aa, Homo sapiens
MARFGDEMPARYGGGGSGAAAGVVVGSGGGRGAGGSRQGGQPGAQRMYKQSMAQRARTMALYNPIPVRQNCLTVNRSLFLFSEDNVVRKYAKKITEWPPFEYMILATIIANCIVLALEQHLPDDDKTPMSERLDDTEPYFIGIFCFEAGIKIIALGFAFHKGSYLRNGWNVMDFVVVLTGILATVGTEFDLRTLRAVRVLRPLKLVSGIPSLQVVLKSIMKAMIPLLQIGLLLFFAILIFAIIGLEFYMGKFHTTCFEEGTDDIQGESPAPCGTEEPARTCPNGTKCQPYWEGPNNGITQFDNILFAVLTVFQCITMEGWTDLLYNSNDASGNTWNWLYFIPLIIIGSFFMLNLVLGVLSGEFAKERERVENRRAFLKLRRQQQIERELNGYMEWISKAEEVILAEDETDGEQRHPFDGALRRTTIKKSKTDLLNPEEAEDQLADIASVGSPFARASIKSAKLENSTFFHKKERRMRFYIRRMVKTQAFYWTVLSLVALNTLCVAIVHYNQPEWLSDFLYYAEFIFLGLFMSEMFIKMYGLGTRPYFHSSFNCFDCGVIIGSIFEVIWAVIKPGTSFGISVLRALRLLRIFKVTKYWASLRNLVVSLLNSMKSIISLLFLLFLFIVVFALLGMQLFGGQFNFDEGTPPTNFDTFPAAIMTVFQILTGEDWNEVMYDGIKSQGGVQGGMVFSIYFIVLTLFGNYTLLNVFLAIAVDNLANAQELTKDEQEEEEAANQKLALQKAKEVAEVSPLSAANMSIAVKEQQKNQKPAKSVWEQRTSEMRKQNLLASREALYNEMDPDERWKAAYTRHLRPDMKTHLDRPLVVDPQENRNNNTNKSRAAEPTVDQRLGQQRAEDFLRKQARYHDRARDPSGSAGLDARRPWAGSQEAELSREGPYGRESDHHAREGSLEQPGFWEGEAERGKAGDPHRRHVHRQGGSRESRSGSPRTGADGEHRRHRAHRRPGEEGPEDKAERRARHREGSRPARGGEGEGEGPDGGERRRRHRHGAPATYEGDARREDKERRHRRRKENQGSGVPVSGPNLSTTRPIQQDLGRQDPPLAEDIDNMKNNKLATAESAAPHGSLGHAGLPQSPAKMGNSTDPGPMLAIPAMATNPQNAASRRTPNNPGNPSNPGPPKTPENSLIVTNPSGTQTNSAKTARKPDHTTVDIPPACPPPLNHTVVQVNKNANPDPLPKKEEEKKEEEEDDRGEDGPKPMPPYSSMFILSTTNPLRRLCHYILNLRYFEMCILMVIAMSSIALAAEDPVQPNAPRNNVLRYFDYVFTGVFTFEMVIKMIDLGLVLHQGAYFRDLWNILDFIVVSGALVAFAFTGNSKGKDINTIKSLRVLRVLRPLKTIKRLPKLKAVFDCVVNSLKNVFNILIVYMLFMFIFAVVAVQLFKGKFFHCTDESKEFEKDCRGKYLLYEKNEVKARDREWKKYEFHYDNVLWALLTLFTVSTGEGWPQVLKHSVDATFENQGPSPGYRMEMSIFYVVYFVVFPFFFVNIFVALIIITFQEQGDKMMEEYSLEKNERACIDFAISAKPLTRHMPQNKQSFQYRMWQFVVSPPFEYTIMAMIALNTIVLMMKFYGASVAYENALRVFNIVFTSLFSLECVLKVMAFGILNYFRDAWNIFDFVTVLGSITDILVTEFGNNFINLSFLRLFRAARLIKLLRQGYTIRILLWTFVQSFKALPYVCLLIAMLFFIYAIIGMQVFGNIGIDVEDEDSDEDEFQITEHNNFRTFFQALMLLFRSATGEAWHNIMLSCLSGKPCDKNSGILTRECGNEFAYFYFVSFIFLCSFLMLNLFVAVIMDNFEYLTRDSSILGPHHLDEYVRVWAEYDPAAWGRMPYLDMYQMLRHMSPPLGLGKKCPARVAYKRLLRMDLPVADDNTVHFNSTLMALIRTALDIKIAKGGADKQQMDAELRKEMMAIWPNLSQKTLDLLVTPHKSTDLTVGKIYAAMMIMEYYRQSKAKKLQAMREEQDRTPLMFQRMEPPSPTQEGGPGQNALPSTQLDPGGALMAHESGLKESPSWVTQRAQEMFQKTGTWSPEQGPPTDMPNSQPNSQSVEMREMGRDGYSDSEHYLPMEGQGRAASMPRLPAENQRRRGRPRGNNLSTISDTSPMKRSASVLGPKARRLDDYSLERVPPEENQRHHQRRRDRSHRASERSLGRYTDVDTGLGTDLSMTTQSGDLPSKERDQERGRPKDRKHRQHHHHHHHHHHPPPPDKDRYAQERPDHGRARARDQRWSRSPSEGREHMAHRQ

SEQ ID NO: 68020 - protein, 372 aa, Homo sapiens
MAALRALCGFRGVAAQVLRPGAGVRLPIQPSRGVRQWQPDVEWAQQFGGAVMYPSKETAHWKPPPWNDVDPPKDTIVKNITLNFGPQHPAAHGVLRLVMELSGEMVRKCDPHIGLLHRGTEKLIEYKTYLQALPYFDRLDYVSMMCNEQAYSLAVEKLLNIRPPPRAQWIRVLFGEITRLLNHIMAVTTHALDLGAMTPFFWLFEEREKMFEFYERVSGARMHAAYIRPGGVHQDLPLGLMDDIYQFSKNFSLRLDELEELLTNNRIWRNRTIDIGVVTAEEALNYGFSGVMLRGSGIQWDLRKTQPYDVYDQVEFDVPVGSRGDCYDRYLCRVEEMRQSLRIIAQCLNKMPPGEIKVDDAKVSPPKRAEMK

SEQ ID NO: 68021 - protein, 1677 aa, Homo sapiens
MFRQFYLWTCLASGIILGSLFEICLGQYDDDCKLARGGPPATIVAIDEESRNGTILVDNMLIKGTAGGPDPTIELSLKDNVDYWVLMDPVKQMLFLNSTGRVLDRDPPMNIHSIVVQVQCINKKVGTIIYHEVRIVVRDRNDNSPTFKHESYYATVNELTPVGTTIFTGFSGDNGATDIDDGPNGQIEYVIQYNPDDPTSNDTFEIPLMLTGNIVLRKRLNYEDKTRYFVIIQANDRAQNLNERRTTTTTLTVDVLDGDDLGPMFLPCVLVPNTRDCRPLTYQAAIPELRTPEELNPIIVTPPIQAIDQDRNIQPPSDRPGILYSILVGTPEDYPRFFHMHPRTAELSLLEPVNRDFHQKFDLVIKAEQDNGHPLPAFAGLHIEILDENNQSPYFTMPSYQGYILESAPVGATISDSLNLTSPLRIVALDKDIEDTKDPELHLFLNDYTSVFTVTQTGITRYLTLLQPVDREEQQTYTFSITAFDGVQESEPVIVNIQVMDANDNTPTFPEISYDVYVYTDMRPGDSVIQLTAVDADEGSNGEITYEILVGAQGDFIINKTTGLITIAPGVEMIVGRTYALTVQAADNAPPAERRNSICTVYIEVLPPNNQSPPRFPQLMYSLEISEAMRVGAVLLNLQATDREGDSITYAIENGDPQRVFNLSETTGILTLGKALDRESTDRYILIITASDGRPDGTSTATVNIVVTDVNDNAPVFDPYLPRNLSVVEEEANAFVGQVKATDPDAGINGQVHYSLGNFNNLFRITSNGSIYTAVKLNREVRDYYELVVVATDGAVHPRHSTLTLAIKVLDIDDNSPVFTNSTYTVLVEENLPAGTTILQIEAKDVDLGANVSYRIRSPEVKHFFALHPFTGELSLLRSLDYEAFPDQEASITFLVEAFDIYGTMPPGIATVTVIVKDMNDYPPVFSKRIYKGMVAPDAVKGTPITTVYAEDADPPGLPASRVRYRVDDVQFPYPASIFEVEEDSGRVITRVNLNEEPTTIFKLVVVAFDDGEPVMSSSATVKILVLHPGEIPRFTQEEYRPPPVSELATKGTMVGVISAAAINQSIVYSIVSGNEEDTFGINNITGVIYVNGPLDYETRTSYVLRVQADSLEVVLANLRVPSKSNTAKVYIEIQDENNHPPVFQKKFYIGGVSEDARMFTSVLRVKATDKDTGNYSVMAYRLIIPPIKEGKEGFVVETYTGLIKTAMLFHNMRRSYFKFQVIATDDYGKGLSGKADVLVSVVNQLDMQVIVSNVPPTLVEKKIEDLTEILDRYVQEQIPGAKVVVESIGARRHGDAFSLEDYTKCDLTVYAIDPQTNRAIDRNELFKFLDGKLLDINKDFQPYYGEGGRILEIRTPEAVTSIKKRGESLGYTEGALLALAFIIILCCIPAILVVLVSYRQFKVRQAECTKTARIQAALPAAKPAVPAPAPVAAPPPPPPPPPGAHLYEELGDSSMHKYEMPQYGSRRRLLPPAGQEEYGEVVGEAEEEYEEEEWARKRMIKLVVDREYETSSTGEDSAPECQRNRLHHPSIHSNINGNIYIAQNGSVVRTRRACLTDNLKVASPVRLGGPFKKLDKLAVTHEENVPLNTLSKGPFSTEKMNARPTLVTFAPCPVGTDNTAVKPLRNRLKSTVEQESMIDSKNIKEALEFHSDHTQSDDEELWMGPWNNLHIPMTKL

SEQ ID NO: 68022 - protein, 39 aa, Homo sapiens
HQPWAQLHPSPQNTPQKVPVHQHSPSEPFLEKPVPDMTQ

SEQ ID NO: 68023 - protein, 67 aa, Homo sapiens
MDSVAFEDVAVNFTQEEWALLGPSQKSLYRNVMQETIRNLDCIEVIHVKLKMTVNVEKLLARFQIVL

SEQ ID NO: 68024 - protein, 86 aa, Homo sapiens
  MOD_RES (1)..(1): Any amino acid
XAVSGEARFAYFPASSVGDTTAVSVQTTDQSLQAGGQFYVMMTPQDVLQTGTQRTIAPRTHPYSPKIDGTRTPRDERRRAQHNEVP

SEQ ID NO: 68025 - protein, 23 aa, Homo sapiens
MSEVSCKKRDDYLEWPEYFMAVA

SEQ ID NO: 68026 - protein, 372 aa, Homo sapiens
MPATLLRAVARSHHILSKAHQCRRIGHLMLKPLKEFENTTCSTLTIRQSLDLFLPDKTASGLNKSQILEMNQKKSDTSMLSPLNAARCQDEKAHLPTMKSFGTHRRVTHKPNLLGSKWFIKILKRHFSSVSTETFVPKQDFPQVKRPLKASRTRQPSRTNLPVLSVNEDLMHCTAFATADEYHLGNLSQDLASHGYVEVTSLPRDAANILVMGVENSAKEGDPGTIFFFREGAAVFWNVKDKTMKHVMKVLEKHEIQPYEIALVHWENEELNYIKIEGQSKLHRGEIKLNSELDLDDAILEKFAFSNALCLSVKLAIWEASLDKFIESIQSIPEALKAGKKVKLSHEEVMQKIGELFALRRLRQEDHLSPGV

SEQ ID NO: 68027 - protein, 48 aa, Homo sapiens
MNKWVRCICDICGFNPTEEDPVKPPGSSLQAPADLPLAINTAPPSTQA

SEQ ID NO: 68028 - protein, 108 aa, Homo sapiens
MKIFCSRANPTTGSVEWLEEDEHYDYHQEIARSSYADMLHDKDRNVKYYQGIRAAVSRVKDRGQKALVLDIGTGTGLLSMMAVTAGADFCYAIEVFKPMADAAVKIVE

SEQ ID NO: 68029 - protein, 458 aa, Homo sapiens
MAEAVFHAPKRKRRVYETYESPLPIPFGQDHGPLKEFKIFRAEMINNNVIVRNAEDIEQLYGKGYFGKGILSRSRPSFTISDPKLVAKWKDMKTNMPIITSKRGHSKYMCCRIEHCSVFLTRYQHSVEWAAELMRRQGQDESTVRRILKDYTKPLEHPPVKRNEEAQVHDKLNSGMVSNMEGTAGGERPSVVNGDSGKSGGVGDPREPLGCLQEGSGCHPTTESFEKSVREDASPLPHVCCCKQDALILQRGLHHEDGSQHIGLLHPGDRGPDHEYVLVEEAECAMSEREAAPNEEAFFLVYALGCLSIYYEKEPLTIVKLWKAFTVVQPTFRTTYMAYHYFRSKGWVPKVGLKYGTDLLLYRKGPPFYHASYSVIIELVDDHFEGSLRRPLSWKSLAALSRVSVNVSKELMLCYLIKPSTMTDKEMESPECMKRIKVQEVILSRWVSSRERSDQDDL

SEQ ID NO: 68030 - protein, 219 aa, Homo sapiens
MDQTMLDDSAAESFNGNETLGHSSIASGGTHSREMGDSNSDGKTGLEQDEQPLNLSDSPLSAQLTSEYRIDDHNSNGKNKYKNLLISDLKMEREARENGSKSPAHSYSSYDSGKNESVDRGAEDLSLNRGDEDEDDHEDHDDSEKVNETDGVEAERLKAFNSRPIPSHLTSAVAESILASACESESRNAAKRMRLERQQDESAPADKQCKPEATQATYS

SEQ ID NO: 68031 - protein, 155 aa, Homo sapiens
MGTRDDEYDYLFKVVLIGDSGVGKSNLLSRFTRNEFNLESKSTIGVEFATRSIQVDGKTIKAQIWDTAGQERYRAITSAYYRGAVGALLVYDIAKHLTYENVERWLKELRDHADSNIVIMLVGNKSDLRHLRAVPTDEARAFAEIYRIVSQKQMS

SEQ ID NO: 68032 - protein, 85 aa, Homo sapiens
MRSLLLLSAFCLLEAATLAERSAGLAFSLYQAMAKDQAVENILVSPVVVASSLGLVSLGGKATTASQAKAVLSAEQLRDEEVHAG

SEQ ID NO: 68033 - protein, 204 aa, Homo sapiens
MAANVAHGLQQNVLYVDSNGGLTASRLLQLLQAKTQDEEEQAEALRRIQVVHAFDIFQMLDVLQELRGTVAQQVTGSSGTVKVVVVDSVTAVVSPLLGGQQREGLALMMQLARELKTLARDLGMAVVVTNHITRDRDSGRLKPALGRSWSFVPSTRILLDTIEGAGASGGRRMACLAKSSRQILSCGQPAATGSAWMDSLRRSH

SEQ ID NO: 68034 - protein, 304 aa, Homo sapiens
MSCSAGLACWDSTGVMEVGGPQSGARETPAVPGVATWEGGPAGRSSQSLQSCGSELDIDKQYVGFATLPNQVHRKSVKKGFDFTLMVAGESGLGKSTLVHSLFLTDLYKDRKLLSAEERISQTVEILKHTVDIEEKGVKLKLTIVDTPGFGDAVNNTECWKPITDYVDQQFEQYFRDESGLNRKNIQDNRVHCCLYFISPFGHGLRPVDVGFMKALHEKVNIVPLIAKADCLVPSEIRKLKERIREEIDKFGIHVYQFPECDSDEDEDFKQQDRELKESAPFAVIGSNTVVEAKGQRVRGRLYP

SEQ ID NO: 68035 - protein, 143 aa, Homo sapiens
MTETDAFYKREMFDPAEKYKMDHRRRGIALIFNHERFFWHLTLPERRGTCADRDNLTRRFSDLGFEVKCFNDLKAEELLLKIHEVSTVSHADADCFVCVFLSHGEGNHIYAYDAKIEIQTLTGLFKGDKCHSLVGKPKIFIIQ

SEQ ID NO: 68036 - protein, 24 aa, Homo sapiens
QDDEERELQMDPADYGKQHFNDVL

SEQ ID NO: 68037 - protein, 182 aa, Homo sapiens
  MOD_RES (1)..(1): Any amino acid
XERIGAQPNDPSASEHTHFKNIPIGFWWAVVTMTTLGYGDMYPQTWSGMLVGALCALAGVLTIAMPVPVIVNNFGMYYSLAMAKQKLPKKKKKHIPRPPQLGSPNYCKSVVNSPHHSTQSDTCPLAQEEILEINRAGHSAEMDNSIWFFLRETEPSHVSTYGVPIEDSTFAIASWNLESLLR

SEQ ID NO: 68038 - protein, 992 aa, Homo sapiens
MSKKPPNRPGITFEIGARLEALDYLQKWYPSRIEKIDYEEGKMLVHFERWSHRYDEWIYWDSNRLRPLERPALRKEGLKDEEDFFDFKAGEEVLARWTDCRYYPAKIEAINKEGTFTVQFYDGVIRCLKRMHIKAMPEDAKGQDWIALVKAAAAAAAKNKTGSKPRTSANSNKDKDKDERKWFKVPSKKEETSTCIATPDVEKKEDLPTSSETFVGLHVENVPKMVFPQPESTLSNKRKNNQGNSFQAKRARLNKITGLLASKAVGVDGAEKKEDYNETAPMLEQAISPKPQSQKKNEADISSSANTQKPALLSSTLSSGKARSKKCKHESGDSSGCIKPPKSPLSPELIQVEDLTLVSQLSSSVINKTSPPQPVNPPRPFKHSERRRRSQRLATLPMPDDSVEKVSSPSPATDGKVFSISSQNQQESSVPEVPDVAHLPLEKLGPCLPLDLSRGSEVTAPVASDSSYRNECPRAEKEDTQMLPNPSSKAIADGRGAPAAAGISKTEKKVKLEDKSSTAFGKRKEKDKERREKRDKDHYRPKQKKKKKKKKKSKQHDYSDYEDSSLEFLERCSSPLTRSSGSSLASRSMFTEKTTTYQYPRAILSVDLSGENLSDVDFLDDSSTESLLLSGDEYNQDFDSTNFEESQDEDDALNEIVRCICEMDEENGFMIQCEECLCWQHSVCMGLLEESIPEQYICYICRDPPGQRWSAKYRYDKEWLNNGRMCGLSFFKENYSHLNAKKIVSTHHLLADVYGVTEVLHGLQLKIGILKNKHHPDLHLWACSGKRKDQDQIIAGVEKKIAQDTVNREEKKYVQNHKEPPRLPLKMEGTYITSEHSYQKPQSFGQDCKSLADPGSSDDDDVSSLEEEQEFHMRSKNSLQYSAKEHGMPEKNPAEGNTVFVYNDKKGTEDPGDSHLQWQLNLLTHIENVQNEVTSRMDLIEKEVDVLESWLDFTGELEPPDPLARLPQLKRHIKQLLIDMGKVQQIATLCSV

SEQ ID NO: 68039 - protein, 47 aa, Homo sapiens
  MOD_RES (1)..(1): Any amino acid
XFEMQRDLVSFPLSPAVRVKLVSAGFQTAEELLEVKPSELSKVCSWQ

SEQ ID NO: 68040 - protein, 251 aa, Homo sapiens
MADTRSVHETRFEAAVKVIQSLPKNGSFQPTNEMMLKFYSFYKQATEGPCKLSRPGFWDPIGRYKWDAWSSLGDMTKEEAMIAYVEEMKKIIETMPMTEKVEELLRVIGPFYEIVEDKKSGRSSDITSVRLEKISKCLEDLGNVLTSTPNAKTVNGKAESSDSGAESEEEEAQEEVKGAEQSDNDKKMMKKSADHKNLEVIVTNGYDKDGFVQDIQNDIHASSSLNGRSTEEVKPIDENLGQTGKSAVCIH

SEQ ID NO: 68041 - protein, 66 aa, Homo sapiens
MAAGQREARPQVSLTFEDVAVLFTRDEWRKLAPSQRNLYRDVMLENYRNLVSLGPYINRQWSEFGP

SEQ ID NO: 68042 - protein, 40 aa, Homo sapiens
  MOD_RES (1)..(1): Any amino acid
XEDELDKYSEDLKDAQEKLELTEKKASDRNEGDRKPGHEG

SEQ ID NO: 68043 - protein, 136 aa, Homo sapiens
MDFPSSLRPALFLTGPLGLSDVPDLSFMCSWRDALTLPEAQPQNSENGALHVTKDLLWEPATPGPLPMLPPLIALSVTSFSDPWDPGLTARDLLFRGGCRYRKRPRVVLDVTEQISRFLLDHGDVAFAPLGKLMLE

SEQ ID NO: 68044 - protein, 39 aa, Homo sapiens
MMAAVPPGLEPWNRVRIPKAGNRSAVTVQNPGAALGDQF

SEQ ID NO: 68045 - protein, 157 aa, Homo sapiens
SYSFDYPSDMGPRRLFSHPREPALGPHGPSRHKMSPPPSGFGERSSGGSGGGPLSHFYSGSPTSYFTSGLQAGLKQSHLSKAIGSSPLGSGEGLLGLSPGPNGHSHLLKTPLGGQKRSFAHLLPSPEPSPEGSYVGQHSQGLGGHYADSYLKRKRIF

SEQ ID NO: 68046 - protein, 34 aa, Homo sapiens
MDPVSQLASAGTFRVLKEPLAFLRALELVAPGDV

SEQ ID NO: 68047 - protein, 165 aa, Homo sapiens
FKTNYEKRSFKVPIQANETLVGAVINNVSEAMETLTRITEELVPVPGSVNGVNALGLVVFSMCFGFVIGNMKEQGQALREFFDSLNEAIMRLVAVIMCHRLATPLLLGNTEKPLGFYWRVAASTHHRSGDLFKFCHPTHHLQVPGREQWRGQARHQIRAPRRSHH

SEQ ID NO: 68048 - protein, 192 aa, Homo sapiens
MEPPKMNPVVEPLSWMLGTWLSDPPGAGTYPTLQPFQYLEEVHISHVGQPMLNFSFNSFHPDTRKPMHRECGFIRLKPDTNKVAFVSAQNTGVVEVEEGEVNGQELCIASHSIARISFAKEPHVEQVSPALLPARSCLLFAAVCGVSLFLFREITRKFRLNSEGKLEQTVSMATTTQPMTQHLHVTYKKVTP

SEQ ID NO: 68049 - protein, 93 aa, Homo sapiens
MAAATGDPGLSKLQFAPFSSALDVGFWHELTQKKLNEYRLDEAPKDIKGYYYNGDSAGLPARLTLEFSAFDMSAPTPARCCPAIGTLYNTNTL

SEQ ID NO: 68050 - protein, 123 aa, Homo sapiens
MWTQRWKRSVSPGPADIRFVWEKNGRALETCVPVQTHALPDGRAHALSWLQDAIRESAEYRCSVLSSAGNKTSKVQVAVMRPEVTHQERWTRELSAWRAVAGEHDRMMQSWRKAWESCSKDTL

SEQ ID NO: 68051 - protein, 82 aa, Homo sapiens
MSYVFVNDSSQTNVPLLQACIDGDFNYSKRLLESGFDPNIRDSRGRTGLHLAAARGNVDICQLLHKFGADLLATDYQGNTAL

SEQ ID NO: 68052 - protein, 276 aa, Homo sapiens
QQQRASQRKAQVRGLPRAKKLEKLGVFSACKANETCKCNGWKNPKPPTAPRMDLQQPAANLSELCRSCEHPLADHVSHLENVSEDEINRLLGMVVDVENLFMSVHKEEDTDTKQVYFYLFKLLRKCILQMTRPVVEGSLGSPPFEKPNIEQGVLNFVQYKFSHLAPRERQTMFELSKMFLLCLNYWKLETPAQFRQRSQAEDVATYKVNYTRWLCYCHVPQSCDSLPRYETTHVFGRSLLRSIFTVTRRQLLEKFRVEKDKLVPEKRTLILTHFPK

SEQ ID NO: 68053 - protein, 137 aa, Homo sapiens
ALTTMQIQVAGLLQFAVPLFSTAEEDLLAIQLLLNSSESSLHQLTAMVDCRGLHKAKPVPFAPSSQGVLLLAILASASVPPSLVPHPATSSALFRASFLVPSSQIIWTLLLASATTASRACCTLASSPSWPPSPSPP

SEQ ID NO: 68054 - protein, 1372 aa, Homo sapiens
MDQKILSLAAEKTADKLQEFLQTLREGDLTNLLQNQAVKGKVAGALLRAIFKGSPCSEEAGTLRRRKIYTCCIQLVESGDLQKEIASEIIGLLMLEAHHFPGPLLVELANEFISAVREGSLVNGKSLELLPIILTALATKKENLAYGKGVLSGEECKKQLINTLCSGRWDQQYVIQLTSMFKDVPLTAEEVEFVVEKALSMFSKMNLQEIPPLVYQLLVLSSKGSRKSVLEGIIAFFSALDKQHNEEQSGDELLDVVTVPSGELRHVEGTIILHIVFAIKLDYELGRELVKHLKVGQQGDSNNNLSPFSIALLLSVTRIQRFQDQVLDLLKTSVVKSFKDLQLLQGSKFLQNLVPHRSYVSTMILEVVKNSVHSWDHVTQGLVELGFILMDSYGPKKVLDGKTIETSPSLSRMPNQHACKLGANILLETFKIHEMIRQEILEQVLNRVVTRASSPISHFLDLLSNIVMYAPLVLQSCSSKVTEAFDYLSFLPLQTVQRLLKAVQPLLKVSMSMRDCLILVLRKAMFANQLDARKSAVAGFLLLLKNFKVLGSLSSSQCSQSLSVSQVHVDVHSHYNSVANETFCLEIMDSLRRCLSQQADVRLMLYEGFYDVLRRNSQLANSVMQTLLSQLKQFYEPKPDLLPPLKLEACILTQGDKISLQEPLDYLLCCIQHCLAWYKNTVIPLQQGEEEEEEEEAFYEDLDDILESITNRMIKSELEDFELDKSADFSQSTSIGIKNNICAFLVMGVCEVLIEYNFSISSFSKNRFEDILSLFMCYKKLSDILNEKAGKAKTKMANKTSDSLLSMKFVSSLLTALFRDSIQSHQESLSVLRSSNEFMRYAVNVALQKVQQLKETGHVSGPDGQNPEKIFQNLCDITRVLLWRYTSIPTSVEESGKKEKGKSISLLCLEGLQKIFSAVQQFYQPKIQQFLRALDVTDKEGEEREDADVSVTQRTAFQIRQFQRSLLNLLSSQEEDFNSKEALLLVTVLTSLSKLLEPSSPQFVQMLSWTSKICKENSREDALFCKSLMNLLFSLHVSYKSPVILLRDLSQDIHGHLGDIDQDVEVEKTNHFAIVNLRTAAPTVCLLVLSQAEKVLEEVDWLITKLKGQVSQETLSEEASSQATLPNQPVEKAIIMQLGTLLTFFHELVQTALPSGSCVDTLLKDLCKMYTTLTALVRYYLQVCQSSGGIPKNMEKLVKLSGSHLTPLCYSFISYVQGQKQITAYQPLWNVCSSLFSRTWHVEQVSCFSHGSSCRASLYFQNKSKSLNYTGEKKEKPAAVATAMARVLRETKPIPNLIFAIEQYEKFLIHLSKKSKVNLMQHMKLSTSRDFKIKGNILDMVLREDGEDENEEGTASEHGGQNKEPAKKKRKK

SEQ ID NO: 68055 - protein, 58 aa, Homo sapiens
MSPASSTTSLPVSPLTEEPVPFKNIQHYINCTHIWSDTCHCIIIEEPKDNQFCIDHIP

SEQ ID NO: 68056 - protein, 241 aa, Homo sapiens
MGGTTSTRRVTFEADENENITVVKGIRLSENVIDRMKESSPSGSKSQRYSGAYGASVSDEELKRRVAEELALEQAKKESEDQKREETSETALRKFCVQSFSSNFLESQNMYTLLLKQAKELDRERAAANEQLTRAILRERICSEEERAKAKHLARQLEEKDRVLKKQDAFYKEQLARLEERSSEFYRVTTEQYQKAAEEVEAKFKFGEMKYHKTGLFILLPLVPVWLLVGELVTSPSFQAT

SEQ ID NO: 68057 - protein, 416 aa, Homo sapiens
MLENFGNLTALGYPVPKPALISLLERGDMAWGLEAQDDPPAERTKNVCKDVETNIDSESTLIQGISEERDGMMSHGQLKSVPQRTDFPETRNVEKHQDIPTVKNIQGKVPRIPCARKPFICEECGKSFSYFSYYARHQRIHTGEKPFECSECGKAFNGNSSLIRHQRIHTGERPYQCEECGRAFNDNANLIRHQRIHSGDRPYYCTECGNSFTSSSEFVIHQRIHTGEKPYECNECGKAFVGNSPLLRHQKIHTGEKPYECNECGKSFGRTSHLSQHQRIHTGEKPYSCKVCGQAFNFHTKLTRHQRIHSEEKPFDCVDCGKAFSAQEQLKRHLRIHTQESSYVCDECGKALTSKRNLHQHQRIHTGEKPYECSKYEKAFGTSSQLGHLEHVYSGEKPVLDICRFGLPEFFTPFYW

SEQ ID NO: 68058 - protein, 191 aa, Homo sapiens
MAASMFYGRLVAVATLRNHRPRTAQRAAAQVLGSSGLFNNHGLQVQQQQQRNLSLHEYMSMELLQEAGVSVPKGYVAKSPDEAYAIAKKLGSKDVVIKAQVLAGGRGKGTFESGLKGGVKIVFSPEEAKAVSSQMIGKKLFTKQTGEKGRICNQVLVCERKYPRREYYFAITMERSFQVSNCRHDTYGINL

SEQ ID NO: 68059 - protein, 10 aa, Homo sapiens
MYPPSMIATG

SEQ ID NO: 68060 - protein, 95 aa, Homo sapiens
MAEAHQAVGFRPSLTSDGAEVELSAPVLQEIYLSGLRSWKRHLSRFWNDFLTGVFPASPLSWLFLFSAIQLAWFLQLDPSLGLMEKIKELLPDWG

SEQ ID NO: 68061 - protein, 100 aa, Homo sapiens
MLFEQGQQALELPECTMQKAAYYENPGLFGGYGYSKTTDTYGYSTPHQPYPPPAAASSLDTDYPGSACSIQSSAPLRAPAHKGAELNGSCMRPGTGNSQG

SEQ ID NO: 68062 - protein, 159 aa, Homo sapiens
MSTTVNVDSLAEYEKSQIKRALELGTVMTVFSFRKSTPERRTVQVIMETRQVAWSKTADKIEGFLDIMEIKEIRPGKNSKDFERAKAVRQKEDCCFTILYGTQFVLSTLSLAADSKEDAVNWLSGLKILHQEAMNASTPTIIESWLRKQIYSVDQTRRN

SEQ ID NO: 68063 - protein, 151 aa, Homo sapiens
MCEEEDSTALVCDNGSGLCKAGFAGDDAPRAVFPSIVGRPRHQGVMVGMGQKDSYVGDEAQSKRGILTLKYPIEHGIITNWDDMEKIWHHSFYNELRVAPEEHPTLLTEAPLNPKANREKMTQIMFETFNVPAMYVAIQAVLSLYASGRTT

SEQ ID NO: 68064 - protein, 120 aa, Homo sapiens
MRLRFCISSQEYNINNAESFSASYPETYDVQGMFQLTNWTLTSEGRLDTTPVGDSFIEMAQKLLNSDLGELINKMKLAQQYVMTSLQQEYKKQMLTAAHALAVDAKNLLDVIDQARLKML

SEQ ID NO: 68065 - protein, 807 aa, Homo sapiens
MDQREILQKFLDEAQSKKITKEEFANEFLKLKRQSTKYKADKTYPTTVAEKPKNIKKNRYKDILPYDYSRVELSLITSDEDSSYINANFIKGVYGPKAYIATQGPLSTTLLDFWRMIWEYSVLIIVMACMEYEMGKKKCERYWAEPGEMQLEFGPFSVSCEAEKRKSDYIIRTLKVKFNSETRTIYQFHYKNWPDHDVPSSIDPILELIWDVRCYQEDDSVPICIHCSAGCGRTGVICAIDYTWMLLKDGIIPENFSVFSLIREMRTQRPSLVQTQEQYELVYNAVLELFKRQMDVIRDKHSGTESQAKHCIPEKNHTLQADSYSPNLPKSTTKAAKMMNQQRTKMEIKESSSFDFRTSEISAKEELVLHPAKSSTSFDFLELNYSFDKNADTTMKWQTKAFPIVGEPLQKHQSLDLGSLLFEGCSNSKPVNAAGRYFNSKVPITRTKSTPFELIQQRETKEVDSKENFSYLESQPHDSCFVEMQAQKVMHVSSAELNYSLPYDSKHQIRNASNVKHHDSSALGVYSYIPLVENPYFSSWPPSGTSSKMSLDLPEKQDGTVFPSSLLPTSSTSLFSYYNSHDSLSLNSPTNISSLLNQESAVLATAPRIDDEIPPPLPVWTPESFIVVEEAGEFSPNVPKSLSSAVKVKIGTSLEWGGTSEPKKFDDSVILRPSKSVKLRSPKSELHQDRSSPPPPLPERTLESFFLADEDCMQAQSIETYSTSYPDTMENSTSSKQTLKTPGKSFTRSKSLKILRNMKKSICNSCPPNKPAESVQSNNSSSFLNFGFANRFSKPKGPRNPPPTWNI

SEQ ID NO: 68066 - protein, 39 aa, Homo sapiens
MLKNPYTIKKQPLHQFVQRPLFPLPAAFYHPGSYLGLKE

SEQ ID NO: 68067 - protein, 114 aa, Homo sapiens
MPRSGAPKERPAEPLTPPPSYGHQPQTGSGESSGASGDKDHLYSTVCKPRSPKPAAPAAPPFSSSSGVLGTGLCELDRLLQELNATQFNITALPARLLASQRLLPPQPLWSWID

SEQ ID NO: 68068 - protein, 771 aa, Homo sapiens
MHIKLPLKPNDLKNRSSAFGTLNWFTKVLSVDESIIKPEQEFFTAPFEKNRMNDFYIVDRDAFFNPATRSRIVYFILSRVKYQVINNVSKFGINRLVNSGIYKAAFPLHDCKFRRQSEDPSCPNERYLLYREWAHPRSIYKKQPLDLIRKYYGEKIGIYFAWLGYYTQMLLLAAVVGVACFLYGYLNQDNCTWSKEVCHPDIGGKIIMCPQCDRLCPFWKLNITCESSKKLCIFDSFGTLVFAVFMGVWVTLFLEFWKRRQAELEYEWDTVELQQEEQARPEYEARCTHVVINEITQEEERIPFTAWGKCIRITLCASAVFFWILLIIASVIGIIVYRLSVFIVFSAKLPKNINGTDPIQKYLTPQTATSITASIISFIIIMILNTIYEKVAIMITNFELPRTQTDYENSLTMKMFLFQFVNYYSSCFYIAFFKGKFVGYPGDPVYWLGKYRNEECDPGGCLLELTTQLTIIMGGKAIWNNIQEVLLPWIMNLIGRFHRVSGSEKITPRWEQDYHLQPMGKLGLFYEYLEMIIQFGFVTLFVASFPLAPLLALVNNILEIRVDAWKLTTQFRRLVPEKAQDIGAWQPIMQGIAILAVVTNAMIIAFTSDMIPRLVYYWSFSVPPYGDHTSYTMEGYINNTLSIFKVADFKNKSKGNPYSDLGNHTTCRYRDFRYPPGHPQEYKHNIYYWHVIAAKLAFIIVMEHVIYSVKFFISYAIPDVSKRTKSKIQREKYLTQKLLHENHLKDMTKNMGVIAERMIEAVDNNLRPKSE

SEQ ID NO: 68069 - protein, 157 aa, Homo sapiens
MNPRKKVDLKLIIVGAIGVGKTSLLHQYVHKTFYEEYQTTLGASILSKIIILGDTTLKLQIWDTGGQERFRSMVSTFYKGSDGCILAFDVTDLESFEALDIWRGDVLAKIVPMEQSYPMVLLGNKIDLADRKYQSILENHLTESIKLSPDQSRSRCC

SEQ ID NO: 68070 - protein, 1017 aa, Homo sapiens
MAAMAPGGSGSGGGVNPFLSDSDEDDDEVAATEERRAVLRLGAGSGLDPGSAGSLSPQDPVALGSSARPGLPGEASAAAVALGGTGETPARLSIDAIAAQLLRDQYLLTALELHTELLESGRELPRLRDYFSNPGNFERQSGTPPGMGAPGVPGAAGVGGAGGREPSTASGGGQLNRAGSISTLDSLDFARYSDDGNRETDEKVAVLEFELRKAKETIQALRANLTKAAEHEVPLQERKNYKSSPEIQEPIKPLEKRALNFLVNEFLLKNNYKLTSITFSDENDDQDFELWDDVGLNIPKPPDLLQLYRDFGNHQVTGKDLVDVASGVEEDELEALTPIISNLPPTLETPQPAENSMLVQKLEDKISLLNSEKWSLMEQIRRLKSEMDFLKNEHFAIPAVCDSVQPPLDQLPHKDSEDSGQHPDVNSSDKGKNTDIHLSISDEADSTIPKENSPNSFPRREREGMPPSSLSSKKTVHFDKPNRKLSPAFHQALLSFCRMSADSRLGYEVSRIADSEKSVMLMLGRCLPHIVPNVLLAKREELIPLILCTACLHPEPKERDQLLHILFNLIKRPDDEQRQMILTGCVAFARHVGPTRVEAELLPQCWEQINHKYPERRLLVAESCGALAPYLPKEIRSSLVLSMLQQMLMEDKADLVREAVIKSLGIIMGYIDDPDKYHQGFELLLSALGDPSERVVSATHQVFLPAYAAWTTELGNLQSHLILTLLNKIEKLLREGEHGLDEHKLHMYLSALQSLIPSLFALVLQNAPFSSKAKLHGEVPQIEVTRFPRPMSPLQDVSTIIGSREQLAVLLQLYDYQLEQEGTTGWESLLWVVNQLLPQLIEIVGKINVTSTACVHEFSRFFWRLCRTFGKIFTNTKVKPQFQEILRLSEENIGNGVLTKATVPIYATGVLTCYIQEEDRKLLVGFLEDVMTLLSLSHAPLDSLKASFVELGANPAYHELLLTVLWYGVVHTSALVRCTAARMFEVCQHMPLLVSIIMIFFFLRRRREFFLIKRLCI

SEQ ID NO: 68071 - protein, 175 aa, Homo sapiens
MVPAWLWLLCVSVPQALPKAQPAELSVEVPENYGGNFPLYLTKLPLPREGAEGQIVLSGDSGKATEGPFAMDPDSGFLLVTRALDREEQAEYQLQVTLEMQDGHVLWGPQPVLVHVKDENDQVPHFSQAIYRARLSRGTRPVCPPTVNQASPSSSLRLQTGMSQAQPTRIFDSTS

SEQ ID NO: 68072 - protein, 219 aa, Homo sapiens
MWSGLLPPGLNESDAESNSEDEATLENSGLNLQEDKEDESIRKTEIIDFSTDEPKTETESNVNAYEECPSGIPIDMWNKFQELHKKHSEQKSTTSRFRGKRRKRSRKDKLKNEKELHSEPSSNETQWKELTQYFGVNDRFDPPVKRKKVEKSGLEKRIDQAVEEWNIEKAEELSNQLATREENHGSNVVCFSVSAIQRLVLSLCPFPDGVTSINYFSLV

SEQ ID NO: 68073 - protein, 581 aa, Homo sapiens
MQCCGLVHRRRVRVSYGSADSYTSRPSDSDVSLEEDREAVRREAERQAQAQLEKAKTKPVAFAVRTNVSYSAAHEDDVPVPGMAISFEAKDFLHVKEKFNNDWWIGRLVKEGCEIGFIPSPVKLENMRLQHEQRAKQGKFYSSKSGGNSSSSLGDIVPSSRKSTPPSSGAKSADEQDQWKTAGLFWRFTTEHTPPYDVVPSMRPVVLVGPSLKGYEVTDMMQKALFDFLKHRFEGRISITRVTADISLAKRSVLNNPSKHAIIERSNTRSSLAEVQSEIERIFELARTLQLVVLDADTINHPAQLSKTSLAPIIVYVKISSPKVLQRLIKSRGKSQAKHLNVQMVAADKLAQCPPELFDVILDENQLEDACEHLADYLEAYWKATHPPSSSLPNPLLSRTLATSSLPLSPTLASNSQGSQGDQRTDRSAPIRSASQAEEEPSVEPVKKSQHRSSSSAPHHNHRSGTSRGLSRQETFDSETQESRDSAYVEPKEDYSHDHVDHYASHRDHNHRDETHGSSDHRHRESRHRSRDVDREQDHNECNKQRSRHKSKDRYCEKDGEVISKKRNEAGEWNRDVYIRQ

SEQ ID NO: 68074 - protein, 105 aa, Homo sapiens
MELSYQTLKFTHQAREAVLFELARYHAPSTIFLDELESVMSQRGTASGGEHEGSLRMKTELLVQMDGLARSEDLVFVLAASNLPCNHMHFWAPGRSCPPCLQSRS

SEQ ID NO: 68075 - protein, 209 aa, Homo sapiens
MFNSKFGSIPKFYVRAPGRVNIIGEHIDYCGYSVLPMAVEQDVLIAVEPVKTYALQLANTNPLYPDFSTSANNIQIDKTKPLWHNYFLCGLKGIQEHFGLSNLTGMNCLVDGNIPPSSGLSSSSALVCCAGLVTLTVLGRNLSKAKLIEFSPLRATDVKLPSGAVFVIANSCVEMNKAATSHFNIRVMECRLAAKVQAKLGISLEEMLL

SEQ ID NO: 68076 - protein, 164 aa, Homo sapiens
TRRAMTLKSLLRALVNMPPHYRYLCISHLIGWTAFLSNMLFFTDFMGQIVYRGDPYSAHNSTEFLIYERGVEVGCWGLCINSVFSSLYSYFQKVLVSYIGLKGLYFTGYLLFGLGTGFIGLFPNVYSTLVLCSLFGVMSSTLYTVPFNLITEYHREEEKEVCCH

SEQ ID NO: 68077 - protein, 94 aa, Homo sapiens
MKTPFGKAAAGQRSRTGAGHGSVSVTMIKRKAAHKKHRSRPTSQPRGNIVGCRIQHGWKDGDEPLTQWKGTVLDQLLDDYKDGDLRILQDSNDS

SEQ ID NO: 68078 - protein, 141 aa, Homo sapiens
MLAVSLKWRLGVVRRRLKGADDGPYSKGGKDAGGADVSLACRRQSIPEEFRGITVVELIKKEGSTLGLTISGGTDKDGKPRVSNLRPGGLAARSDLLNIGDYIRSVNGIHLTRLRHDEIITLLKNVGERVVLEVEYELPPP

SEQ ID NO: 68079 - protein, 193 aa, Homo sapiens
KNIRILSPLSKTFTEKEVINGLKQRILKLEQQCKEKDGTISKLQTDMKTTNLEEMRIAMETYYEEVHRLQTLLASSETTGKKPLGEKKTGAKRQKKMGSALLSLSRSVQELTEENQSLKEDLDRVLSTSPTISKTQGYVEWSKPRLLRRIVELEKKLSVMESSKSHAAEPVRSHPPACLASSSALHRQPRGDR

SEQ ID NO: 68080 - protein, 40 aa, Homo sapiens
MGVTGMSRTLPEEGFPGIRNSICKGTGCRKACGTLGVASA

SEQ ID NO: 68081 - protein, 260 aa, Homo sapiens
MPRARSGRRSRGAGGREETFLRVRANRQTRLNARIGKMKRRKQDEGQVCPLCNRPLAGSEQEMSRHVEHCLSKREGSCMAEDDAVDIEHENNNRFEEYEWCGQKRIRATTLLEGGFRGSGFIMCSGKENPDSDADLDVDGDDTLEYGKPQYTEADVIPCTGEEPGEAKEREALRGAVLNGGPPSTRITPEFSKWASDEMPSTSNGESSKQEAMQKTCKNSDIEKITEDSAVTTFEALKARVRELERQLSRGDRYKCLICM

SEQ ID NO: 68082 - protein, 312 aa, Homo sapiens
  MOD_RES (1)..(1): Any amino acid
XTLRAAVFDLDGVLALPAVFGVLGRTEEALALPRGLLNDAFQKGGPEGATTRLMKGEITLSQWIPLMEENCRKCSETAKVCLPKNFSIKEIFDKAISARKINRPMLQAALMLRKKGFTTAILTNTWLDDRAERDGLAQLMCELKMHFDFLIESCQVGMVKPEPQIYKFLLDTLKASPSELLNTPAPLPTSCNPSDMSHGYVTVKPRVRLHFVELGSGPAVCLCHGFPESWYSWRYQIPALAQAGYRVLAMDMKGYGESSAPPEIEEYCMEVLCKEMVTFLDKLGLSQAVFIGHDWGGMLVWYMALFYPERVR

SEQ ID NO: 68083 - protein, 113 aa, Homo sapiens
MMWQKYAGSRRSMPLGARILFHGVFYAGGFAIVYYLIQKFHSRALYYKLAVEQLQSHPEAQEALGPPLNIHYLKLIDRENFVDIVDAKLKIPVSGSKSEGLLYVHSSRGGPFQ

SEQ ID NO: 68084 - protein, 41 aa, Homo sapiens
LIVSILRLECNGVILAHGNLCLPGSSDSPASASQVAGMTGA

SEQ ID NO: 68085 - protein, 328 aa, Homo sapiens
MAVGDSPLAALPGLSQDSLDFESSGSSEPPAQVGRLLASQKLGEVLERSRRLPTAPTSLSGQHRSLRLASKPEREVPLGAGQQESMEADTDLEAGLEEEAVGGLGPGAWACLPGQGLRYLEHLCLVLEQMARLQQLYLQLRIQRPPGDPGEEESTRAPLPSPLHTPGNRGQGPWELLSQTEHTGAKAASPPKVEVPSANPPRLPETPVEPTYHLPSSQGHKRDISHWDKVKVLLNRICRRSHHHPEPPAPPDGSDPRIESRDLPERPQCRPHRKTFMPSLVVKKQRAKPFCRLRPLGAPGDPGWRGLAVKSSSPSALLLLLHIARKSC

SEQ ID NO: 68086 - protein, 19 aa, Homo sapiens
MVWKVAVFLSVALGIGAVP

SEQ ID NO: 68087 - protein, 196 aa, Homo sapiens
KSKKEDGVKEEKRKRDSSTQPPKSAKPPAGGKSSQQPSTPQQAPPGQPQQGTFVAHKEIKLTLLNKAADKGSRKRYEPSDKDRQSPPPAKRPNTSPDRGSRDRKSGGRLGSPKPERQRGQNSKAPAAPADRKRQLSPQSKSSSKVTSVPGKASDPGAASTKSGKASTLSRREELLKQLKAVEDAIARKRAKIPGKA

SEQ ID NO: 68088 - protein, 163 aa, Homo sapiens
  MOD_RES (1)..(1): Any amino acid
XKCIDHYTKQCVENADLPEGEKKPIDQRLEGIVNKMFQRCLDDHKYKQAIGIALETRRLDVFEKTILESNDVPGMLAYSLKLCMSLMQNKQFRNKVLRVLVKIYMNLEKPDFINVCQNLRTVGTPIASVPGSTNTGTVPGSEKDSDSMETEEKTSSAFVGKTP

SEQ ID NO: 68089 - protein, 70 aa, Homo sapiens
  MOD_RES (1)..(1): Any amino acid
XLIHLNTSNDCGFQKITLDCQNIYTWKSRHIVGKRGDTRKKIEMETKTSISIPKPGQDGEIEKSEKEMIW

SEQ ID NO: 68090 - protein, 1393 aa, Homo sapiens
RDLSENQIQGIPRKAFRGITDVKNLQLDNNHISCIEDGAFRALRDLEILTLNNNNISRILVTSFNHMPKIRTLRLHSNHLYCDCHLAWLSDWLRQRRTVGQFTLCMAPVHLRGFNVADVQKKEYVCPAPHSEPPSCNANSISCPSPCTCSNNIVDCRGKGLMEIPANLPEGIVEIRLEQNSIKAIPAGAFTQYKKLKRIDISKNQISDIAPDAFQGLKSLTSLVLYGNKITEIVKGLFDGLVSLQLLLLNANKINCLRVNTFQDLQNLNLLSLYDNKLQTISKGLFAPLQSIQTLHLAQNPFVCDCHLKWLADYLQDNPIETSGARCSSPRRLANKRISQIKSKKFRCSGSEDYRSRFSSECFMDLVCPEKCRCEGTIVDCSNQKLVRIPSHLPEYVTDLRLNDNEVSVLEATGIFKKLPNLRKINLSNNKIKEVREGAFDGAASVQELMLTGNQLETVHGRVFRGLSGLKTLMLRSNLIGCVSNDTFAGLSSVRLLSLYDNRITTITPGAFTTLVSLSTINLLSNPFNCNCHLAWLGKWLRKRRIVSGNPRCQKPFFLKEIPIQDVAIQDFTCDGNEESSCQLSPRCPEQCTCMETVVRCSNKGLRALPRGMPKDVTELYLEGNHLTAVPRELSALRHLTLIDLSNNSISMLTNYTFSNMSHLSTLILSYNRLRCIPVHAFNGLRSLRVLTLHGNDISSVPEGSFNDLTSLSHLALGTNPLHCDCSLRWLSEWVKAGYKEPGIARCSSPEPMADRLLLTTPTHRFQCKVLWFCCPGPVDINIVAKCNACLSSPCKNNGTCTQDPVELYRCACPYSYKGKDCTVPINTCIQNPCQHGGTCHLSDSHKDGFSCSCPLGFEGQRCEINPDDCEDNDCENNATCVDGINNYVCICPPNYTGELCDEVIDHCVPELNLCQHEAKCIPLDKGFSCECVPGYSGKLCETDNDDCVAHKCRHGAQCVDTINGYTCTCPQGFSGPFCEHPPPMVLLQTSPCDQYECQNGAQCIVVQQEPTCRCPPGFAGPRCEKLITVNFVGKDSYVELASAKVRPQANISLQVATDKDNGILLYKGDNDPLALELYQGHVRLVYDSLSSPPTTVYSVETVNDGQFHSVELVTLNQTLNLVVDKGTPKSLGKLQKQPAVGINSPLYLGGIPTSTGLSALRQGTDRPLGGFHGCIHEVRINNELQDFKALPPQSLGVSPGCKSCTVCKHGLCRSVEKDSVVCECRPGWTGPLCDQEARDPCLGHRCHHGKCVATGTSYMCKCAEGYGGDLCDNKNDSANACSAFKCHHGQCHISDQGEPYCLCQPGFSGEHCQQENPCLGQVVREVIRRQKGYASCATASKVPIMECRGGCGPQCCQPTRSKRRKYVFQCTDGSSFVEEVERHLECGCLACS

SEQ ID NO: 68091 - protein, 142 aa, Homo sapiens
TITQKALQSQSWKMKAQGAIAMASIAKQTSSLVPPYLGMILTALLQGLAGRTWAGKEELLKAIACVVTACSAELEKSVPNQPSTNEILQAVLKECSKENVKYKIVAISCAADILKATKEDRFQEFSNIVIPLIKKKTLENLE

SEQ ID NO: 68092 - protein, 85 aa, Homo sapiens
LEKVYAKVHGSYEHLWAGQVADALVDLTGGLAERWNLKGVAGSGGQQDRPGRWEHRTCRQLLHLKDQCLISCCVLSPRAVIDNIR

SEQ ID NO: 68093 - protein, 918 aa, Homo sapiens
MDMPGRELNEDRDSGIARSASLSSLLITPFPSPNSSLTRSCASSYQRRWRRSQTTSLENGVFPRWSIEESFNLSDESCGPNPGIVRKKKIAIGVIFSLSKDEDENNKFNEFFFSHFPLFESHMNKLKSAIEQAMKMSRRSADASQRSLAYNRIVDALNEFRTTICNLYTMPRIGEPVWLTMMSGTPEKNHLCYRFMKEFTFLMENASKNQFLPALITAVLTNHLAWVPTVMPNGQPPIKIFLEKHSSQSVDMLAKTHPYNPLWAQLGDLYGAIGSPVRLARTVVVGKRQDMVQRLLYFLTYFIRCSELQETHLLENGEDEAIVMPGTVITTTLEKGEIEESEYVLVLLFKESEEIRTPNCNCKYCSHPLLGQNVENISQQEREDIQNSSKELLGISDECQMISPSDCQEENAVDVKQYRDKLRTCFDAKLETVVCTGSVPVDKCALSESGLESTEETWQSEKLLDSDSHTGKAMRSTGMVVEKKPPDKIVPASFSCEAAQTKVTFLIGDSMSPDSDTELRSQAVVDQITRHHTKPLKEERGAIDQHQETKQTTKDQSGESDTQNMVSEEPCELPCWNHSDPESMSLFDEYFNDDSIETRTIDDVPFKTSTDSKDHCCMLEFSKILCTKNNKQNNEFCKCIETVPQDSCKTCFPQQDQRDTLSILVPHGDKESSDKKIAVGTEWDIPRNESSDSALGDSESEDTGHDMTRQVSSYYGGEQEDWAEEDEIPFPGSKLIEVSAVQPNIANFGRSLLGGYCSSYVPDFVLQGIGSDERFRQCLMSDLSHAVQHPVLDEPIAEAVCIIADMDKWTVQVASSQRRVTDNKLGKEVLVSSLVSNLLHSTLQLYKHNLSPNFCVMHLEDRLQELYFKSKMLSEYLRGQMRVHVKELGVVLGIESSDLPLLAAVASTHSPYVAQILL

SEQ ID NO: 68094 - protein, 207 aa, Homo sapiens
  MOD_RES (1)..(1): Any amino acid
XAARAAAASSVSTAASSLPAATPSWTWPITVTPTSVTTMPWPLRELCFSRCRWEAHLRTKESSGTSPAHTCMPRKRTAPSGVGSWTCFRTGWLISENLPPRPAQPTPRSWWHLTSSVEISTLITAPLTTSWSSNTPCSPTTGTPAAWGLVRRSRGPSVLCWTRTACTMRMCAPPTTCRRSWRVRRAAGSTWRFPPARARARRGGRSC

SEQ ID NO: 68095 - protein, 171 aa, Homo sapiens
SSSYSSDALDFETEHKLDPVFDSPRMSRRSLRLATTACTLGDGEAVGADSGTSSAVSLKNRAARTTKQRRSTNKSAFSINHVSRQVTSSGVSHGGTVSLQDAVTRRPPVLDESWIREQTTVDHFWGKAASGVFWWLGIGWYQFVTLISWLNVFLLTRCLRNICKFLVLLIP

SEQ ID NO: 68096 - protein, 604 aa, Homo sapiens
MAVLVCPASCHGLKEFRIRRGMWRLCLVYYFYPASSTLYVLRIDVLNYTSKDEGPSAEGPQRNTRLGWIQGKQVTVLGSPVPVNVFLGVPFAAPPLGSLRFTNPQPASPWDNLREATSYPNLCLQNSEWLLLDQHMLKVHYPKFGVSEDCLYLNIYAPAHADTGSKLPVLVWFPGGAFKTGSASIFDGSALAAYEDVLVVVVQYRLGIFGFFTTWDQHAPGNWAFKDQVAALSWVQKNIEFFGGDPSSVTIFGESAGAISVSSLILSPMAKGLFHKAIMESGVAIIPYLEAHDYEKSEDLQVVAHFCGNNASDSEALLRCLRTKPSKELLTLSQKTKSFTRVVDGAFFPNEPLDLLSQKAFKAIPSIIGVNNHECGFLLPMKEAPEILSGSNKSLALHLIQNILHIPPQYLHLVANEYFHDKHSLTEIRDSLLDLLGDVFFVVPALITARYHRDAGAPVYFYEFRHRPQCFEDTKPAFVKADHADEVRFVFGGAFLKGDIVMFEGATEEEKLLSRKMMKYWATFARTGNPNGNDLSLWPAYNLTEQYLQLDLNMSLGQRLKEPRVEFWTSTIPLILSASDMLHSPLSSLTFLSLLQPFFFFCAP

SEQ ID NO: 68097 - protein, 79 aa, Homo sapiens
MEALGFLKLEVNGPMVTVALSVALLALLKWYSTSAFSRLEKLGLRHPKPSPFIGNLTFFRQGFWESQMELRKLYGPLCG

SEQ ID NO: 68098 - protein, 84 aa, Homo sapiens
  MOD_RES (1)..(1): Any amino acid
XFKSRTPETITIEELGTLVTYQLLAFLDFNNTRKRMSVIVRNPEGQIKLYSKGADTILFEKLHPSNEVLLSLTSDHLSEASMVF

SEQ ID NO: 68099 - protein, 109 aa, Homo sapiens
MQIARARLRMRLGASGSGSAPQFFALTSLRLVFLLAFGLMIIVCIDQWKNKIWPEIKVPRPDALDNESWGFVHPRLLSVPELCHHVAEVWVSGTIFIRNVLLFKKQNPG

SEQ ID NO: 68100 - protein, 144 aa, Homo sapiens
MYDDSYVPGFEDSEAGSADSYTSRPSLDSDVSLEEDRESARREVESQAQQQLERAKHKPVAFAVRTNVSYCGVLDEECPVQGSGVNFEAKDFLHIKEYSNDWWIGRLVKEGGDIAFIPSPQRLESIRLKQEQKARRSGNPSSLS

SEQ ID NO: 68101 - protein, 398 aa, Homo sapiens
MSLMVISKACVAFFLLQGAWPHEGGQDKPLLSTWPSLVVPPEHVTLRCHSNLGFNNFSLYKDDGVPVPELYNRIFWKSLFMGPVTPSHTGTYRCRGSHTHSPSGGSAPSNPLVIVVTGFRRKPSLLAHPGPLVKSEETVILQCWSDVMFEHFLLHREGTFNHTLRLIGEHIDGVSKGNFSIGRMTQDLAGTYRCYGSVTHSPYQLSAPSDPLDIVITGLYEKPSLSAQPGPTVLAGESVTLSCSSRSSYDMYHLSREGEAHERRLPAGTKVNGTFQADFPLDPATHGGTYRCFGSFRDSPYEWSKSSDPLLVSVTGNSSNSWPSPTEPSSETGNPRHLHVLIGTSVVKLPFTILLFFLLHRWCSNKKNASVMDQGPAGNRTVNREDSDEQDHQEVSYA

SEQ ID NO: 68102 - protein, 309 aa, Homo sapiens
MTTFIPIIFSSVVVVLFVIGNFANGFIALVNSIEWVKRQKISFADQILTALAVSRVGLLWVLLLNWYSTVFNPAFYSVEVRTTAYNVWAVTGHFSNWLATSLSIFYLLKIANFSNLIFLHLKRRVKSVILVMLLGPLLFLACQLFVINMKEIVRTKEYEGNMTWKIKLRSAVYLSDATVTTLGNLVPFTLTLLCFLLLICSLCKHLKKMQLHGKGSQDPSTKVHIKVLQTVIFFLLLCAIYFLSIMISVWSFGSLENKPVFMFCKAIRFSYPSIHPFILIWGNKKLKQTFLSVLRQVRYWVKGEKPSSP

SEQ ID NO: 68103 - protein, 92 aa, Homo sapiens
MARDLVMFRDVAVDFSQEEWECLNSYQRNLYRDVILENYSNLVSLGCSISKPDVITLLEQGKEPWMVVRDEKRRWTLGPTFKYHHLGIRVST

SEQ ID NO: 68104 - protein, 36 aa, Homo sapiens
MRTRPRPRLRLECNGMISAHWHLHLLSSSDSPPSAS

SEQ ID NO: 68105 - protein, 608 aa, Homo sapiens
MGKPGCRTCCKIKFYLLFSYFQVQASHFEGLITTIVGYILLAITLIICHGLATLVKFHRSRRLLGVCYIVVKVSLLVVVEIGVFPLICGWWLDICSLEMFDATLKDRELSFQSAPGTTMFLHWLVGMVYVFYFASFILLLREVLRPGVLWFLRNLNDPDFNPVQEMIHLPIYRHLRRFILSVIVFGSIVLLMLWLPIRIIKSVLPNFLPYNVMLYSDAPVSELSLELLLLQVVLPALLEQGHTRQWLKGLVRAWTVTAGYLLDLHSYLLGDQEENENSANQQVNNNQHARNNNAIPVVGEGLHAAHQAILQQGGPVGFQPYRRPLNFPLRIFLLIVFMCITLLIASLICLTLPVFAGRWLMSFWTGTAKIHELYTAACGLYVCWLTIRAVTVMVAWMPQGRRVIFQKVKEWSLMIMKTLIVAVLLAGVVPLLLGLLFELVIVAPLRVPLDQTPLFYPWQDWALGVLHAKIIAAITLMGPQWWLKTVIEQVYANGIRNIDLHYIVRKLAAPVISVLLLSLCVPYVIASGVVPLLGVTAEMQNLVHRRIYPFLLMVVVLMAILSFQVRQFKRLYEHIKNDKYLVGQRLVNYERKSGKQGSSPPPPQSSQE

SEQ ID NO: 68106 - protein, 220 aa, Homo sapiens
  MOD_RES (1)..(1): Any amino acid
XSAALPCAEARGPGTSAGSEQKERGPGPGQGSPGGGPGPRSLSGPEQGTACCELEEAQGQCQQEEAQREAASVPLRDSGHPGHAEGREGDFPAADLDSLWEDFSQSLARGNSELLAFLTSSGAGSQPEAQRELDVVLRTVIPKTSPHCPLTTPRREIVVQERWHSDGIVYPKPTWLGEELLAKLAKWSVENKKSDFKSTLSLISIMKYSKAYQELKEKYK

SEQ ID NO: 68107 - protein, 148 aa, Homo sapiens
  MOD_RES (1)..(1): Any amino acid
XAAVLSGPSAGSAAGVPGGTGGLSAVSSGPRLRLLLLESVSGLLQPRTGSAVAPVHPPNRSAPHLPGLMCLLRLHGSVGGAQNLSALGALVSLSNARLSSIKTRFEGLCLLSLLVGESPTELFQQHCVSWLRSIQQVLQGKLASFFLS

SEQ ID NO: 68108 - protein, 1374 aa, Homo sapiens
MLLSVSTPLPAVTQTRGATETASQGHLDLTQLIGVPLPSSVSFVTGYGGFPAYSFGPGANVGRPARTLIPSTFFRDFAISVVVKPSSTRGGVLFAITDAFQKVIYLGLRLSGVEDGHQRIILYYTEPGSHVSQEAAAFSVPVMTHRWNRFAMIVQGEEVTLLVNCEEHSRIPFQRSSQALAFESSAGIFMGNAGATGLERFTGSLQQLTVHPDPRTPEELCDPEESSASGETSGLQEADGVAEILEAVTYTQASPKEAKVEPINTPPTPSSPFEDMELSGEPVPEGTLETTNMSIIQHSSPKQGKGAILNDTLEGVHSVDGDPITDSGSGAGAFLDIAEEKNLAATAAGLAEVPISTAGEAEASSVPTGGPTLSMSTENPEEGVTPGPDNEERLAATAAGEAEALASMPGEVEASGVAPGELDLSMSAQSLGEEATVGPSSEDSLTTAAAATEVSLSTFEDEEASGVPTDGLAPLTATMAPERAVTSGPGDEEDLAAATTEEPLITAGGEESGSPPPDGPPLPLPTVAPERWITPAQREHVGMKGQAGPKGEKGDAGEELPGPPEPSGPVGPTAGAEAEGSGLGWGSDVGSGSGDLVGSEQLLRGPPGPPGPPGLPGIPGKPGTDVFMGPPGSPGEDGPAGEPGPPGPEGQPGVDGATGLPGMKGEKGARGPNGSVGEKGDPGNRGLPGPPGKKGQAGPPGVMGPPGPPGPPGPPGPGCTMGLGFEDTEGSGSTQLLNEPKLSRPTAAIGLKGEKGDRGPKGERGMDGASIVGPPGPRGPPGHIKVLSNSLINITHGFMNFSDIPELVGPPGPDGLPGLPGFPGPRGPKGDTGLPGFPGLKGEQGEKGEPGAILTEDIPLERLMGKKGEPGMHGAPGPMGPKGPPGHKGEFGLPGRPGRPGLNGLKGTKGDPGVIMQGPPGLPGPPGPPGPPGAVINIKGAIFPIPVRPHCKMPVDTAHPGSPELITFHGVKGEKGSWGLPGSKGEKGDQGAQGPPGPPLDLAYLRHFLNNLKGENGDKGFKGEKGEKGDINGSFLMSGPPGLPGNPGPAGQKGETVVGPQGPPGAPGLPGPPGFGRPGDPGPPGPPGPPGPPAILGAAVALPGPPGPPGQPGLPGSRNLVTAFSNMDDMLQKAHLVIEGTFIYLRDSTEFFIRVRDGWKKLQLGELIPIPADSPPPPALSSNPHQLLPPPNPISSANYEKPALHLAALNMPFSGDIRADFQCFKQARAAGLLSTYRAFLSSHLQDLSTIVRKAERYSLPIVNLKGQVLFNNWDSIFSGHGGQFNMHIPIYSFDGRDIMTDPSWPQKVIWHGSSPHGVRLVDNYCEAWRTADTAVTGLASPLSTGKILDQKAYSCANRLIVLCIENSFMTDARK

SEQ ID NO: 68109 - protein, 3041 aa, Homo sapiens
METEAEPARPHGVAMETTPGLGLRSPGAPLAQNPAELLCEAGAAVAAARWDLQKHSLLIVIGDIGTESQLRAVRAHLEQGILSWNIDLSSFDLNQQLRLFITRHLAHFSSEVKGQRTLCHQSEILETIILVNPSADSISSEVHHLLSSSSAYKLLILSGQSLEPGGDLILQSGTYSYENFAQVLHNPEISQLLSNRDPGIQAFLTVSCLGEGDWSHLGLSSSQETLHLRLNPEPTLPTMDGVAEFSEYVSETVDVPSPFDLLEPPTSGGFLKLSKPCCYIFPGGRGDSALFAVNGFNILVDGGSDRKSCFWKLVRHLDRIDSVLLTHIGADNLPGINGLLQRKVAELEEEQSQGSSSYSDWVKNLISPELGVVFFNVPEKLRLPDASRKAKRSIEEACLTLQHLNRLGIQAEPLYRVVSNTIEPLTLFHKMGVGRLDMYVLNPVKDSKEMQFLMQKWAGNSKAKTGIVLPNGKEAEISVPYLTSITALVVWLPANPTEKIVRVLFPGNAPQNKILEGLEKLRHLDFLRYPVATQKDLASGAVPTNLKPSKIKQRADSKESLKATTKTAVSKLAKREEVVEEGAKEARSELAKELAKTEKKAKESSEKPPEKPAKPERVKTESSEALKAEKRKLIKDKVGKKHLKEKISKLEEKKDKEKKEIKKERKELKKDEGRKEEKKDAKKEEKRKDTKPELKKISKPDLKPFTPEVRKTLYKAKVPGRVKIDRSRAIRGEKELSSEPQTPPAQKGTVPLPTISGHRELVLSSPEDLTQDFEEMKREERALLAEQRDTGLGDKPFPLDTAEEGPPSTAIQGTPPSVPGLGQEEHVMKEKELVPEVPEEQGSKDRGLDSGAETEEEKDTWEEKKQREAERLPDRTEAREESEPEVKEDVIEKAELEEMEEVHPSDEEEEDATKAEGFYQKHMQEPLKVTPRSREAFGGRELGLQGKAPEKETSLFLSSLTTPAGATEHVSYIQDETIPGYSETEQTISDEEIHDEPEERPAPPRFHTSTYDLPGPEGAGPFEASQPADSAVPATSGKVYGTPETELTYPTNIVAAPLAEEEHVSSATSITECDKLSSFATSVAEDQSVASLTAPQTEETGKSSLLLDTVTSIPSSRTEATQGLDYVPSAGTISPTSSLEEDKGFKSPPCEDFSVTGESEKRGEIIGKGLSGERAVEEEEEETANVEMSEKLCSQYGTPVFSAPGHALHPGEPALGEAEERCLSPDDSTVKMASPPPSGPPSATHTPFHQSPVEEKSEPQDFQEADSWGDTKRTPGVGKEDAAEETVKPGPEEGTLEKEEKVPPPRSPQAQEAPVNIDEGLTGCTIQLLPAQDKAIVFEIMEAGEPTGPILGAEALPGGLRTLPQEPGKPQKDEVLRYPDRSLSPEDAESLSVLSVPSPDTANQEPTPKSPCGLTEQYLHKDRWPEVSPEDTQSLSLSEESPSKETSLDVSSKQLSPESLGTLQFGELNLGKEEMGHLMQAEDTSHHTAPMSVPEPHAATASPPTDGTTRYSAQTDITDDSLDRKSPASSFSHSTPSGNGKYLPGAITSPDEHILTPDSSFSKSPESLPGPALEDIAIKWEDKVPGLKDRTSEQKKEPEPKDEVLQQKDKTLEHKEVVEPKDTAIYQKDEALHVKNEAVKQQDKALEQKGRDLEQKDTALEQKDKALEPKDKDLEEKDKALEQKDKIPEEKDKALEQKDTALEQKDKALEPKDKDLEQKDRVLEQKEKIPEEKDKALDQKVRSVEHKAPEDTVAEMKDRDLEQTDKAPEQKHQAQEQKDKVSEKKDQALEQKYWALGQKDEALEQNIQALEENHQTQEQESLVQEDKTRKPKMLEEKSPEKVKAMEEKLEALLEKTKALGLEESLVQEGRAREQEEKYWRGQDVVQEWQETSPTREEPAGEQKELAPAWEDTSPEQDNRYWRGREDVALEQDTYWRELSCERKVWFPHELDGQGARPHYTEERESTFLDEGPDDEQEVPLREHATRSPWASDFKDFQESSPQKGLEVERWLAESPVGLPPEEEDKLTRSPFEIISPPASPPEMVGQRVPSAPGQESPIPDPKLMPHMKNEPTTPSWLADIPPWVPKDRPLPPAPLSPAPGPPTPAPESHTPAPFSWGTAEYDSVVAAVQEGAAELEGGPYSPLGKDYRKAEGEREEEGRAEAPDKSSHSSKVPEASKSHATTEPEQTEPEQREPTPYPDERSFQYADIYEQMMLTGLGPACPTREPPLGAAGDWPPCLSTKEAAAGRNTSAEKELSSPISPKSLQSDTPTFSYAALAGPTVPPRPEPGPSMEPSLTPPAVPPRAPILSKGPSPPLNGNILSCSPDRRSPSPKESGRSHWDDSTSDSELEKGAREQPEKEAQSPSPPHPIPMGSPTLWPETEAHVSPPLDSHLGPARPSLDFPASAFGFSSLQPAPPQLPSPAEPRSAPCGSLAFSGDRALALAPGPPTRTRHDEYLEVTKAPSLDSSLPQLPSPSSPGAPLLSNLPRPASPALSEGSSSEATTPVISSVAERFSPSLEAAEQESGELDPGMEPAAHSLWDLTPLSPAPPASLDLALAPAPSLPGDMGDGILPCHLECSEAATEKPSPFQVPSEDCAANGPTETSPNPPGPAPAKAENEEAAACPAWERGAWPEGAERSSRPDTLLSPEQPVCPAGGSGGPPSSASPEVEAGPQGCATEPRPHRGELSPSFLNPPLPPSIDDRDLSTEEVRLVGRGGRRRVGGPGTTGGPCPVTDETPPTSASDSGSSQSDSDVPPETEECPSITAEAALDSDEDGDFLPVDKAGGVSGTHHPRPGHDPPPLPQPDPRPSPPRPDVCMADPEGLSSESGRVERLREKEKVQGRVGRRAPGKAKPASPARRLDLRGKRSPTPGKGPADRASRAPPRPRSTTSQVTPAEEKDGHSPMSKGLVNGLKAGPMALSSKGSSGAPVYVDLAYIPNHCSGKTADLDFFRRVRASYYVVSGNDPANGEPSRAVLDALLEGKAQWGENLQVTLIPTHDTEVTREWYQQTHEQQQQLNVLVLASSSTVVMQDESFPACKIEF

SEQ ID NO: 68110 - protein, 89 aa, Homo sapiens
  MOD_RES (1)..(1): Any amino acid
XFLDTSKQAIGMLFIHFANVYLADLTEEDPCSLYLINFLLDATVGMLLIYVGVRAVSVLVEWQQWESLRFGEYEEKAKSLLMRMRDSGK

SEQ ID NO: 68111 - protein, 135 aa, Homo sapiens
VQQVQTVQQVQHVYPAQVQYVEGSDTVYTNGAIRTTTYPYTETQMYSQNTGGNYFDTQGSSAQVTTVVSSHSMVGTGGIQMGVTGGQLISSSGGTYLIGNSMENSGHSVTHTTRASPATLFLFSCVPFSLGQLSP

SEQ ID NO: 68112 - protein, 122 aa, Homo sapiens
MSKRGRGGSSGAKFRISLGLPVGAVINCADNTGAKNLYIISVKGIKGRLNRLPAAGVGDMVMATVKKGKPELRKKVHPAVVIRQRKSYRRKDGVFLYFEDNAGVIVNNKGEMKGRKSVQLVP

SEQ ID NO: 68113 - protein, 107 aa, Homo sapiens
  MOD_RES (1)..(1): Any amino acid
XLPLGVDCWIDNTRVVYNRSSGLVSNAPGVQIRVPGFGKTYSVEYLDSSKLAGPPATACAPAAPARDTASQHGLQQPDPGAHQCHPAGCLPPGSPCIPDCQPRAPAS

SEQ ID NO: 68114 - protein, 335 aa, Homo sapiens
MDNARMNSFLEYPILSSGDSGTCSARAYPSDHRITTFQSCAVSANSCGGDDRFLVGRGVQIGSPHHHHHHHHRHPQPATYQTSGNLGVSYSHSSCGPSYGSQNFSAPYSPYALNQEADVSGGYPQCAPAVYSGNLSSPMVQHHHHHQGYAGGAVGSPQYIHHSYGQEHQSLALATYNNSLSPLHASHQEACRSPASETSSPAQTFDWMKVKRNPPKTGKVGEYGYLGQPNAVRTNFTTKQLTELEKEFHFNKYLTRARRVEIAASLQLNETQVKIWFQNRRMKQKKREKEGLLPISPATPPGNDEKAEESSEKSSSSPCVPSPGSSTSDTLTTSH

SEQ ID NO: 68115 - protein, 438 aa, Homo sapiens
MSLTVVSMACVGFFLLQGAWPLMGGQDKPFLSARPSTVVPRGGHVALQCHYRRGFNNFMLYKEDRSHVPIFHGRIFQESFIMGPVTPAHAGTYRCRGSRPHSLTGWSAPSNPLVIMVTGNHRKPSLLAHPGPLLKSGETVILQCWSDVMFEHFFLHREGISEDPSRLVGQIHDGVSKANFSIGPLMPVLAGTYRCYGSVPHSPYQLSAPSDPLDIVITGLYEKPSLSAQPGPTVQAGENVTLSCSSWSSYDIYHLSREGEAHERRLRAVPKVNRTFQADFPLGPATHGGTYRCFGSFRALPCVWSNSSDPLLVSVTGICRHLHVLIGTSVVIFLFILLLFFLLYRWCSNKKNAAVMDQEPAGDRTVNRQDSDEQDPQEVMYAQLDHCVFIQRKISRPSQRPKTPLTDTSVYTELPNAEPRSKVVSCPRAPQSGLEGVF

SEQ ID NO: 68116 - protein, 87 aa, Homo sapiens
MAKPFFRLQKFLRRTQFLLFFLTAAYLMTGSLLLLQRVRVALPQGPRAPGPLQTLPVAAVALGVGLLDSRALHDPRVSPELLLGVDM

SEQ ID NO: 68117 - protein, 94 aa, Homo sapiens
  MOD_RES (1)..(1): Any amino acid
XFREKVLWTAITLFIFLVCCQIPLFGIMSSDSADPFYWMRVILASNRGTLMELGISPIVTSGLIMQLLAGAKIIEVGDTPKDRALFNGAQKREH

SEQ ID NO: 68118 - protein, 363 aa, Homo sapiens
MANYIHVPPGSPEVPKLNVTVQDQEEHRCREGALSLLQHLRPHWDPQEVTLQLFTDGITNKLIGCYVGNTMEDVVLVRIYGNKTELLVDRDEEVKSFRVLQAHGCAPQLYCTFNNGLCYEFIQGEALDPKHVCNPAIFRLIARQLAKIHAIHAHNGWIPKSNLWLKMGKYFSLIPTGFADEDINKRFLSDIPSSQILQEEMTWMKEILSNLGSPVVLCHNDLLCKNIIYNEKQGDVQFIDYEYSGYNYLAYDIGNHFNEFAGVSDVDYSLYPDRELQSQWLRAYLEAYKEFKGFGTEVTEKEVEILFIQVNQFALASHFFWGLWALIQAKYSTIEFDFLGYAIVRFNQYFKMKPEVTALKVPE

SEQ ID NO: 68119 - protein, 395 aa, Homo sapiens
MPRVKAAQAGRQSSAKRHLAEQFAVGEIITDMAKKEWKVGLPIGQGGFGCIYLADMNSSESVGSDAPCVVKVEPSDNGPLFTELKFYQRAAKPEQIQKWIRTRKLKYLGVPKYWGSGLHDKNGKSYRFMIMDRFGSDLQKIYEANAKRFSRKTVLQLSLRILDILEYIHEHEYVHGDIKASNLLLNYKNPDQVYLVDYGLAYRYCPEGVHKEYKEDPKRCHDGTIEFTSIDAHNGVAPSRRGDLEILGYCMIQWLTGHLPWEDNLKDPKYVRDSKIRYRENIASLMDKCFPEKNKPGEIAKYMETVKLLDYTEKPLYENLRDILLQGLKAIGSKDDGKLDLSVVENGGLKAKTITKVQEPERESRSNSDAVNQISFSLFSFDFFLLFYLNCFIFL

SEQ ID NO: 68120 - protein, 255 aa, Homo sapiens
  MOD_RES (1)..(1): Any amino acid
XFSSKAKLHGEVPQIEVTRFPRPMSPLQDVSTIIGSREQLAVLLQLYDYQLEQEGTTGWESLLWVVNQLLPQLIEIVGKINVTSTACVHEFSRFFWRLCRTFGKIFTNTKVKPQFQEILRLSEENIDSSAGNGVLTKATVPIYATGVLTCYIQEEDRKLLVGFLEDVMTLLSLSHAPLDSLKASFVELGANPAYHELLLTVLWYGVVHTSALVRCTAARMFEVCQHMPLLVSIIMIFFFLRRRREFFLIKRLCIS

SEQ ID NO: 68121 - protein, 156 aa, Homo sapiens
MEAIAKYDFKATADDELSFKRGDILKVLNEECDQNWYKAELNGKDGFIPKNYIEMKPHPWFFGKIPRAKAEEMLSKQRHDGAFLIRESESAPGDFSLSVNSRHTSRPSLTLIPRRMESWASAGEILSMSWITQTPTGGKELATGRPACFPAIMSPP

SEQ ID NO: 68122 - protein, 123 aa, Homo sapiens
VYMYQLFRSLAYIHSQGVCHRDIKPQNLLVDPDTAVLKLCDFVQSSWSEGSPMSPTSVLATTGPQSSSLEPLITPHPSMFGQLAVYWQSSSWASPSSLGTVGWTSWWRSSRCWEHQPGNKSER

SEQ ID NO: 68123 - protein, 478 aa, Homo sapiens
MKMSIRTPPRLLELAGRSLLRDQALAMSTLEELPTELFPPLFMEAFSRRCCEALKLMVQAWPFRRLPLRPLIKMPCLEAFQAVLDGLDALLTQGVCPRRWKLQVLDLQDVCENFWMVWSEAMARGSFLNAKRNKTPVQDCPRMRGQQPLTVFVELWLKNRTLDEYLTYLLLWVKQRKDLLHLCCKKLKILGMPFRNIRSILKMVNLDCIQEVEVNCKWVLPILTQFTPYLGHMRNLQKLVLSHMDVSRYVSPEQKKEIVTQFTTQFLKLHCLQKLYMNSVSFLEGHLDQLLSCLKTSLKFLTITNCVLLESDLKHLSQCPSISQLKTLDLSGIRLTNYSLVPLQILLEKVAATLEYLDLDDCGIIDSQVNAILPALSRCFELNAFSFCGNPISMATLENLLSHTIILKNLCVEVYPAPRESYGADGTLCWNRFAQIRAELMNRVRDLRHPKRIFFCIDNCPDCGNRSFYDLEADQYCC

SEQ ID NO: 68124 - protein, 128 aa, Homo sapiens
MESSTGPRMPLLKYCSVATSLKAPGWDGAAPPWDLSFTYPFALQAPWLTGHKPLARHASSCPCLHVADPAWQGPGWLGRAGDAANTWVLARREADGFYYRAQIKATPEGSAEGSSVATIAPCLHEPHR

SEQ ID NO: 68125 - protein, 205 aa, Homo sapiens
MTAYLATGILWKEMFFSYGTKILYQNTEALQSKFFSPLQKAMLPPNSFQGKVAFITGGGTGLGKGMTTLLSSLGAQCVIASRKMDVLKATAEQISSQTGNKVHAIQCDVRDPDMVQNTVSELIKVAGHPNIVINNAAGNFISPTERLSPNAWKTITDIVLNGTAFVTLEIGKQLIKAQKGAAFLSITTIYAETGSGFVVPSASAK

SEQ ID NO: 68126 - protein, 1460 aa, Homo sapiens
MAANVGSMFQYWKRFDLQQLQRELDATATVLANRQDESEQSRKRLIEQSREFKKNTPEDLRKQVAPLLKSFQGEIDALSKRSKEAEAAFLNVYKRLIDVPDPVPALDLGQQLQLKVQRLHDIETENQKLRETLEEYNKEFAEVKNQEVTIKALKEKIREYEQTLKNQAETIALEKEQKLQNDFAEKERKLQETQMSTTSKLEEAEHKVQSLQTALEKTRTELFDLKTKYDEETTAKADEIEMIMTDLERANQRAEVAQREAETLREQLSSANHSLQLASQIQKAPDVEQAIEVLTRSSLEVELAAKEREIAQLVEDVQRLQASLTKLRENSASQISQLEQQLSAKNSTLKQLEEKLKGQADYEEVKKELNILKSMEFAPSEGAGTQDAAKPLEVLLLEKNRSLQSENAALRISNSDLSGSARRKGKDQPESRRPGSLPAPPPSQLPRNPGEQASNTNGTHQFSPAGLSQDFFSSSLASPSLPLASTGKFALNSLLQRQLMQSFYSKAMQEAGSTSMIFSTGPYSTNSISSQSPLQQSPDVNGMAPSPSQSESAGSVSEGEEMDTAEIARQVKEQLIKHNIGQRIFGHYVLGLSQGSVSEILARPKPWNKLTVRGKEPFHKMKQFLSDEQNILALRSIQGRQRAEPAQPSSASGSGNSDDAIRSILQQARREMEAQQAALDPALKQAPLSQSDITILTPKLLSTSPMPTVSSYPPLAISLKKPSAAPEAGASALPNPPALKKEAQDAPGLDPQGAADCAQGVLRQVKNEVGRSGAWKDHWWSAVQPERRNAASSEEAKAEETGGGKEKGSGGSGGGSQPRAERSQLQGPSSSEYWKEWPSAESPYSQSSELSLTGASRSETPQNSPLPSSPIVPMSKPTKPSVPPLTPEQYEVYMYQEVDTIELTRQVKEKLAKNGICQRIFGEKVLGLSQGSVSDMLSRPKPWSKLTQKGREPFIRMQLWLNGELGQGVLPVQGQQQGPVLHSVTSLQDPLQQGCVSSESTPKTSASCSPAPESPMSSSESVKSLTELVQQPCPPIEASKDSKPPEPSDPPASDSQPTTPLPLSGHSALSIQELVAMSPELDTYGITKRVKEVLTDNNLGQRLFGETILGLTQGSVSDLLARPKPWHKLSLKGREPFVRMQLWLNDPNNVEKLMDMKRMEKKAYMKRRHSSVSDSQPCEPPSVGTEYSQGASPQPQHQLKKPRVVLAPEEKEALKRAYQQKPYPSPKTIEDLATQLNLKTSTVINWFHNYRSRIRRELFIEEIQAGSQGQAGASDSPSARSGRAAPSSEGDSCDGVEATEGPGSADTEEPKSQGEAEREEVPRPAEQTEPPPSGTPGPDDARDDDHEGGPVEGPGPLPSPASATATAAPAAPEDAATSAAAAPGEGPAAPSSAPPPSNSSSSSAPRRPSSLQSLFGLPEAAGARDSRDNPLRKKKAANLNSIIHRLEKAASREEPIEWEF

SEQ ID NO: 68127 - protein, 265 aa, Homo sapiens
MDPAARVVRALWPGGCALAWRLGGRPQPLLPTQSRAGFAGAAGGPSPVAAARKGSPRLLGAAALALGGALGLYHTARWHLRAQDLHAERSAAQVVEVNPVRRAEIKFSSYRKVPILVAQEGESSQQLNDSSVIISALKTYLVSGQPLEEIITYYPAMKAVNEQGKEVTEFGNKYWLMLNEKEAQQVYGGKEARTEEMKWRQWADDWLVHLISPNVYRTPTEALASFDYIVREGKFGAVEGAVAKYMGAAAMYLISKRLKSRHRLQ

SEQ ID NO: 68128 - protein, 160 aa, Homo sapiens
MAFLGLFSLLVLQSMATGATFPEEAIADLSVNMYNRLRATGEDENILFSPLSIALAMGMMELGAQGSTQKEIRHSMGYDSLKNGEEFSFLKEFSNMVTAKESQYVMKIANSLFVQNGFHVNEEFLQMMKKYFNAAVNHVDFSQNVAVANYINKWVENNTN

SEQ ID NO: 68129 - protein, 444 aa, Homo sapiens
MCLCSGRKTILEIYPGQFQPSLCHKFIALSDKEGKLLRNYTQNIDTLEQVAGIQRIIQCHGSFATASCLICKYKVDCEAVRGDIFNQVVPRCPRCPADEPLAIMKPEIVFFGENLPEQFHRAMKYDKDEVDLLIVIGSSLKVRPVALIPSSIPHEVPQILINREPLPHLHFDVELLGDCDVIINELCHRLGGEYAKLCCNPVKLSEITEKPPRTQKELAYLSELPPTPLHVSEDSSSPERTSPPDSSVIVTLLDQAAKSNDDLDVSESKGCMEEKPQEVQTSRNVESIAEQMENPDLKNVGSSTGEKNERTSVAGTVRKCWPNRVAKEQISRRLDGNQYLFLPPNRYIFHGAEVYSDSEDDVLSSSSCGSNSDSGTCQSPSLEEPMEDESEIEEFYNGLEDEPDVPERAGGAGFGTDGDDQEAINEAISVKQEVTDMNYPSNKS

SEQ ID NO: 68130 - protein, 575 aa, Homo sapiens
MAQWNQLQQLDTRYLEQLHQLYSDSFPMELRQFLAPWIESQDWAYAASKESHATLVFHNLLGEIDQQYSRFLQESNVLYQHNLRRIKQFLQSRYLEKPMEIARIVARCLWEESRLLQTAATAAQQGGQANHPTAAVVTEKQQMLEQHLQDVRKRVQDLEQKMKVVENLQDDFDFNYKTLKSQGDMQDLNGNNQSVTRQKMQQLEQMLTALDQMRRSIVSELAGLLSAMEYVQKTLTDEELADWKRRQQIACIGGPPNICLDRLENWITSLAESQLQTRQQIKKLEELQQKVSYKGDPIVQHRPMLEERIVELFRNLMKSAFVVERQPCMPMHPDRPLVIKTGVQFTTKVRLLVKFPELNYQLKIKVCIDKDSGDVAALRGSRKFNILGTNTKVMNMEESNNGSLSAEFKHLTLREQRCGNGGRANCDASLIVTEELHLITFETEVYHQGLKIDLETHSLPVVVISNICQMPNAWASILWYNMLTNNPKNVNFFTKPPIGTWDQVAEVLSWQFSSTTKRGLSIEQLTTLAEKLLGPGVNYSGCQITWAKFCKVSNLVKFSWEWECSPARLSLRALA

SEQ ID NO: 68131 - protein, 211 aa, Homo sapiens
MNILAPVRRDRVLAELPQCLRKEAALHGHKDFHPRVTCACQEHRTGTVGRFKISKVIVVGDLSVGKTCLINRFCKDTFDKNYKATIGVDFEMERFEVLGIPFSLQLWDTAGQERFKCIASTYYRGAQAIIIVFNLNDVASLEHTKQWLADALKENDPSSVLLFLVGSKKDLSTPAQYALMEKDALQVAQEMKTVQRLPSPRALCHPHSSRA

SEQ ID NO: 68132 - protein, 82 aa, Homo sapiens
MASLQRSRVLRCCSCRLFQAHQVKKSVKWTCKACGEKQSFLQAYGEGSGADCRRHVQKLNLLQGQVSELPLRKNRSPQRVAG

SEQ ID NO: 68133 - protein, 174 aa, Homo sapiens
MLSSKGLTVVDVYQGWCGPCKPVVSLFQKMRIEVGLDLLHFALAEADRLDVLEKYRGKCEPTFLFYAIKDEALSDEDECVSHGKNNGEDEDMVSSERTCTLAIIKPDAVAHGKTDEIIMKIQEAGFEILTNEERTMTEAEVRLFYQHKAGESPSSVRHRNALQCRPWKPGQRRC

SEQ ID NO: 68134 - protein, 537 aa, Homo sapiens
MIHVRRHETRRNSKSHVPEQKSRVDWRRTKRSSISQLLDSDEELDSEEFDSDEELDSDESFENDEELDSNKGPDCNKTPGSERELNLSKIQSEGNDSKCLINSGNGSTYEEETNKIKHRNIDLQDQEKHLSQEDNDLNKQTGQIIEDDQEKHLSQEDNDLNKQTGQIIEDDLEEEDIKRGKRKRLSSVMCDSDESDDSDILVRKVGVKRPRRVVEDEGSSVEMEQKTPEKTLAAQKREKLQKLKELSKQRSRQRRSSGRDFEDSEKESCPSSDEVDEEEEEDNYESDEDGDDYIIDDFVVQDEEGDEENKNQQGEKLTTSQLKLVKQNSLYSFSDHYTHFERVVKALLINALDESFLGTLYDGTRQKSYAKDMLTSLHYLDNRFVQPRLESLVSRSRWKEQYKERVENYSNVSIHLKNPENCSCQACGLHRYCKYSVHLSGELYNTRTMQIDNFMSHDKQVFTVGRICASRTRIYHKLKHFKFKLYQECCTIAMTEEVEDEQVKETVERIFRRSKENGWIKENSSCDLRVKKHLVPV

SEQ ID NO: 68135 - protein, 36 aa, Homo sapiens
MVSAKKFKRIPRTEPKGGEIVHRKFHPHPGQFARWL

SEQ ID NO: 68136 - protein, 156 aa, Homo sapiens
MPVARSWVCRKTYVTPRRPFEKSRLDQELKLIGEYGLRNKREVWRVKFTLAKIRKAARELLTLDEKDPRRLFEGNALLRRLVRIGVLDEGKMKLDYILGLKIEDFLERRLQTQVFKLGLAKSIHHARVLIRQRHIRYHLGWAPESSSTCPSDGCPH

SEQ ID NO: 68137 - protein, 131 aa, Homo sapiens
MTPQSLLQTTLFLLSLLFLVQGAHGRGHREDFRFCSQRNQTHRSSLHYKPTPDLRISIENSEEALTVHAPFPAAHPASRSFPDPRGLYHFCLYWNRHAGRLHLLYGKRDFLLSDKASSLLCFQHQEESLAQ

SEQ ID NO: 68138 - protein, 160 aa, Homo sapiens
MTSKDYYFDSYAHFGIHEEMLKDEVRTLTYRNSMFHNRHLFKDKVVLDVGSGTGILCMFAAKAGARKVIGIECSSISDYAVKIVKANKLDHVVTIIKGKVEEVELPVEKVDIIISEWMGYCLFYESMLNTVLYARDKWLAPDGLIFPDRATLYVTAIEDR

SEQ ID NO: 68139 - protein, 91 aa, Homo sapiens
  MOD_RES (1)..(1): Any amino acid
XAAFFITYEYVKWFLHADSSSYLTPMKHMLAASAGEVVACLIRVPSEVVKQRAQVSASTRTFQIFSNILYEEGIQGLYRGYKSTVLREEED

SEQ ID NO: 68140 - protein, 319 aa, Homo sapiens
MELTELLLVVMLLLTARLTLSSPAPPACDLRVLSKLLRDSHVLHSRLSQCPEVHPLPTPVLLPAVDFSLGEWKTQMEETKAQDILGAVTLLLEGVMAARGQLGPTCLSSLLGQLSGQVRLLLGALQSLLGTQDHSSQGSQCHLPELPTPAPRKGAFPDACRRVHPLRQAGPTHHSCPQQNLSSPHTERAPKQDFWIVGDKLHCLSQNYWLWASEVAAGIQSQDSWSAEPNLQVPGPNPRIPEQDTRTLEWNSWTLSWTLTQDPRSPGHFLRNIRHRLPATQPPAWIFSFPNPSSYWTVYALPSSTHLAHPCGPAPPPAS

SEQ ID NO: 68141 - protein, 142 aa, Homo sapiens
  MOD_RES (1)..(1): Any amino acid
XQPSPTDQPSFSNLTAFPGGAKELLLRDLDQLFLSSDCRHFNRTESLRLADELSGWVQRHQRGRRKIPQRAQERQSLDTSPSRSLSHGRSHLQLRQSPSNPLDPQKGILWASCNYIATQTVRSQHSWMQLTDGKTHFMLSLS

SEQ ID NO: 68142 - protein, 280 aa, Homo sapiens
MTGKTQTSNVTNKNDPKSINSRVFIGNLNTAIVKKVDIEAIFSKYGKIVGCSVHKGYAFVQYMSERHARAAVAGENARVIAGQPLDINMAGEPKPYRPKPGNKRPLSALYSGYVFDYDYYRDDFYNRLFDYHGRVPPPPRAVIPLKRPRVAVTTTRRGKGVFSMKGGSRSTASGSTGSKLKSDELQTIKKELTQIKTKIDSLLGRLEKIEKQQKAEAEAQKKQLEESLVLIQEECVSEIADHSTEEPAEGGPDADGEEMTDGIEEDFDEDGGHELFLQIK

SEQ ID NO: 68143 - protein, 220 aa, Homo sapiens
MKRLVCVLLVCSSAVAQLHKDPTLDHHWHLWKKTYGKQYKEKNEEAVRRLIWEKNLKFVMLHNLEHSMGMHSYDLGMNHLGDMTSEEVMSLMSSLRVPSQWQRNITYKSNPNRILPDSVDWREKGCVTEVKYQGSCGACWAFSAVGALEAQLKLKTGKLVSLSAQNLVDCSTEKYGNKGCNGGFMTTAFQYIIDNKGIDSDASYPYKAMVSTMNHPVLRM

SEQ ID NO: 68144 - protein, 71 aa, Homo sapiens
MEDGGLTAFEEDQRCLSQSLPLPVSAEGPAAQTTAEPSRSFSSAHRHLSRRNGLSRLCQSRTALSGGHHQP

SEQ ID NO: 68145 - protein, 310 aa, Homo sapiens
MKIIFPILSNPVFRRTVKLLLCLLWIGYSQGTTHVLRFGGIFEYVESGPMGAEELAFRFAVNTINRNRTLLPNTTLTYDTQKINLYDSFEASKKACDQLSLGVAAIFGPSHSSSANAVQSICNALGVPHIQTRWKHQVSDNKDSFYVSLYPDFSSLSRAILDLVQFFKWKTVTVVYDDSTGLIRLQELIKAPSRYNLRLKIRQLPADTKDAKPLLKEMKRGKEFHVIFDCSHEMAAGILKQALAMGMMTEYYHYIFTTLDLFALDVEPYRYSGVNMTGFRILNTENTQVSSIIEKWSMERLQAPPKPDSD

SEQ ID NO: 68146 - protein, 88 aa, Homo sapiens
MASSLNEDPEGSRITYVKGDLFACPKTDSLAHCISEDCRMGAGIAVLFKKKFGGVQELLNQREFWKPLTWFALARAPFNLLHFNKICV

SEQ ID NO: 68147 - protein, 220 aa, Homo sapiens
MAVFLQLLPLLLSRAQGNPGASLDGRPGDRVNLSCGGVSHPIRWVWAPSFPACKGLSKGRRPILWASSSGTPTVPPLQPFVGRLRSLDSGIRRLELLLSAGDSGTFFCKGRHEDESRTVLHVLGDRTYCKAPGPTHGSVYPQLLIPLLGAGLVLGLGALGLVWWLHRRLPPQPIRPLPRFAPLVKTEPQRPVKEEEPKIPGDLDQEPVRAWGWEGDSQNL

SEQ ID NO: 68148 - protein, 245 aa, Homo sapiens
MSPTVIILACLGFFLDQSVWAHVGLYEKPSLTARPGPTVRTGENVTLSCSSQSSFDIYHLSREGEAHELRLPAVPSINGTFQADFPLGPATHGETYRCFGSFHGSPYEWSDASDPLPVSVTGNPSSSWPSPTEPSFKTDAAVMNQEPAGHRTVNREDSDEQDPQEVTYAQLDHCIFTQRKITGPSQRSKRPSTDTSVCIELPNAEPRALSPAHEHHSQALMGSSRETTALSQTQLASSNVPAAGI

SEQ ID NO: 68149 - protein, 349 aa, Homo sapiens
MLDPGLDPAASATAAAAASHDKGPEAEEGVELQEGGDGPGAEEQTAVAITSVQQAAFGDHNIQYQFRTETNGGQVTYRVVQVTDGQLDGQGDTAGAVSVVSTAAFAGGQQAVTQVGVDGAAQRPGPAAASVPPGPAAPFPLAVIQNPFSNGGSPAAEAVSGEARFAYFPASSVGDTTAVSVQTTDQSLQAGGQFYVMMTPQDVLQTGTQRTIAPRTHPYSPKIDGTRTPRDERRRAQHNEVERRRRDKINNWIVQLSKIIPDCNADNSKTGASKGGILSKACDYIRELRQTNQRMQETFKEAERLQMDNELLRQQVGAGPGAGQGPGAPDARRWPSAPLTSVVSARSRS

SEQ ID NO: 68150 - protein, 365 aa, Homo sapiens
MAVMAPRTLLLLLSGALALTQTWAGSHSMRYFFTSVSRPGRGEPRFIAVGYVDDTQFVRFDSDAASQKMEPRAPWIEQEGPEYWDQETRNMKAHSQTDRANLGTLRGYYNQSEDGSHTIQIMYGCDVGPDGRFLRGYRQDAYDGKDYIALNEDLRSWTAADMAAQITKRKWEAVHAAEQRRVYLEGRCVDGLRRYLENGKETLQRTDPPKTHMTHHPISDHEATLRCWALGFYPAEITLTWQRDGEDQTQDTELVETRPAGDGTFQKWAAVVVPSGEEQRYTCHVQHEGLPKPLTLRWELSSQPTIPIVGIIAGLVLLGAVITGAVVAAVMWRRKSSDRKGGSYTQAASSDSAQGSDVSLTACKV

SEQ ID NO: 68151 - protein, 181 aa, Homo sapiens
MGGCAGSRRRFSDSEGEETVPEPRLPLLDHQGAHWKNAVGFWLLGLCNNFSYVVMLSAAHDILSHKRTSGNQSHVDPGPTPIPHNSSSRFDCNSVSTAAVLLADILPTLVIKLLAPLGLHLLPYSPRVLVSGICAAGSFVLVAFSHSVGTSLCAISCCSHLLRPRTLEGKKKQRAQPGSPS

SEQ ID NO: 68152 - protein, 212 aa, Homo sapiens
AIIRELGGIPIVANKINHSNQSIKEKALNALNNLSVNVENQIKIKIYISQVCEDVFSGPLNSAVQLAGLTLLTNMTVTNDHQHMLHSYITDLFQVLLTGNGNTKVQVLKLLLNLSENPAMTEGLLRAQVDSSFLSLYDSHVAKEILLRVLTLFQNIKNCLKIEGHLAVQPTFTEGSLFFLLHGEECAQKIRALVDHHDAEVKEKVVTIIPKI

SEQ ID NO: 68153 - protein, 484 aa, Homo sapiens
MEAEEAQRGASPPISAIEEFSIIPEAPMRSSQVSALGLEAQEDEDPSYKWREEHRLSATQQSELRDVCDYAIETMPSFPKEGSADVEPNQESLVAEACDTPEHWEAVPQSLAGRQARTLAPPELWACPIQSEHLDMAPFSSDLGSEEEEVEFWPGLTSLTLGSGQAEEEEETSSDNSGQTRYYSPCEEHPAETNQNEGAESGTIRQGEELPSEELQESQGLLHPQEVQVLEEQGQQEAGFRGEGTLREDVCADGLLGEEQMIEQVNDEKGEQKQKQEQVQDVMLGRQGERMGLTGEPEGLNDGEWEQEDMERKAQGQGGPEQGEERKRELQVPEENRADSQDEKSQTFLGKSEEVTGKQEDHGIKEKGVPVSGQEAKEPESWDGGRLGAVGRARSREEENEHHGPSMPALIAPEDSPHCDLFPGASYLVTQIPGTQTESRAEELSPAALSPLLEPIRCSHQPISLLGSFLTEESPDKEKLLSVL

SEQ ID NO: 68154 - protein, 143 aa, Homo sapiens
MVPWVRTMGQKLKQRLRLDVGREICRQYPLFCFLLLCLSAASLLLNRYIHILMIFWSFVAGVVTFYCSLGPDSLLPNIFFTIKYKPKQLGLQELFPQGHSCAVCGKVKCKRHRPSLLLENYQPWLDLKISSKVDASLSEGCDR

SEQ ID NO: 68155 - protein, 102 aa, Homo sapiens
MRASPCISQPAASWHPRPSALRPTAGSGPDTRTPGTVEDGSAPCPAFRSPAVSPCGEEPCCFQISPAEETLELGRLVSPGCHKFSAPQECRLDPRARCVVHI

SEQ ID NO: 68156 - protein, 90 aa, Homo sapiens
MQNDAGEFVDLYVPRKCSASNRIIGAKDHASIQMNVAEVDKVTGRFNGQFKTYAICGAIRRMVSVSLGFAHHFGTSWTLPCALECVMVPE

SEQ ID NO: 68157 - protein, 344 aa, Homo sapiens
MEKRLGVKPNPASWILSGYYWQTSAKWLRSLYLFYTCFCFSVLWLSTDASESRCQQGKTQFGVGLRSGGENHLWLLEGTPSLQSCWAACCQDSACHVFWWLEGMCIQADCSRPQSCRAFRTHSSNSMLVFLKKFQTADDLGFLPEDDVPHLLGLGWNWASWRQSPPRAALRPAVSSSDQQSLIRKLQKRGSPSDVVTPIVTQHSKVNDSNELGGLTTSGSAEVHKAITISSPLTTDLTAELSGGPKNVSVQPEISEGLATTPSTQQVKSSEKTQIAVPQPVAPSYSYATPTPQASFQSTSAPYPVIKELVVSAGESVQITLPKNEVQLNAYVLQEPPKAHSRPV

SEQ ID NO: 68158 - protein, 406 aa, Homo sapiens
MAANLSRNGPALQEAYVRVVTEKSPTDWALFTYEGNSNDIRVAGTGEGGLEEMVEELNSGKVMYAFCRVKDPNSGLPKFVLINWGAHVTINARAEEDVEPECIMEKVAKASGANYSFHKESGRFQDVGPQAPVGSVYQKTNAVSEIKRVGKDSFWAKAEKEEENRRLEEKRRAEEAQRQLEQERRERELREAARREQRYQEQGGEASPQSRTWEQQQEVVSRNRNEQESAVHPREIFKQKERAMSTTSISSPQPGKLRSPFLQKQLTQPETHFGREPAAAISRPRADLPAEEPAPSTPPCLVQAEEEAVYEEPPEQETFYEQPPLVQQQGAGSEHIDHHIQGQGLSGQGLCARALYDYQAADDTEISFDPENLITGIEVIDEGWWRGYGPDGHFGMFPANYVELIE

SEQ ID NO: 68159 - protein, 39 aa, Homo sapiens
VAQAVERAKQVTMTELNAIIGIRKFEAPGLEVTCPRPHS

SEQ ID NO: 68160 - protein, 39 aa, Homo sapiens
MQRAVSVVARLGFRLQAFPPALCRPLSCAQWSTPWLCLL

SEQ ID NO: 68161 - protein, 352 aa, Homo sapiens
MFEDPETTRQMQSTRDGRMLFDYLADKHGFRQEYLDTLYRYAKFQYECGNYSGAAEYLYFFRVLVPATDRNALSSLWGKLASEILMQNWDAAMEDLTRLKETIDNNSVSSPLQSLQQRTWLIHWSLFVFFNHPKGRDNIIDLFLYQPQYLNAIQTMCPHILRYLTTAVITNKDVRKRRQVLKDLVKVIQQESYTYKDPITEFVECLYVNFDFDGAQKKLRECESVLVNDFFLVACLEDFIENARLFIFETFCRIHQCISINMLADKLNMTPEEAERWIVNLIRNARLDAKIDSKLGHVVMGNNAVSPYQQVIEKTKSLSFRSQMLAMNIEKKLNQNSRSEAPNWATQDSGFY

SEQ ID NO: 68162 - protein, 41 aa, Homo sapiens
MAQQANVGELLAMLDSPMLGVRDDVTAVFKENLNSAPLGQD

SEQ ID NO: 68163 - protein, 523 aa, Homo sapiens
MQMRRVWRTCRSGPRKRREARYKKSTEDIFPAQLLKLQRHERVWQQEPPVRDHRSWGGSGAGGVAGREWTDQGQVALGGHYMAEGEGYFAMSEDELACSPYIPLGGDFGGGDFGGGDFGGGDFGGGGSFGGHCLDYCESPTAHCNVLNWEQVQRLDGILSETIPIHGRGNFPTLELQPSLIVKVVRRRLAEKRIGVRDVRLNGSAASHVLHQDSGLGYKDLDLIFCADLRGEGEFQTVKDVVLDCLLDFLPEGVNKEKITPLTLKEAYVQKMVKVCNDSDRWSLISLSNNSGKNVELKFVDSLRRQFEFSVDSFQIKLDSLLLFYECSENPMTETFHPTIIGESVYGDFQEAFDHLCNKIIATRNPEEIRGGGLLKYCNLLVRGFRPASDEIKTLQRYMCSRFFIDFSDIGEQQRKLESYLQNHFVGLEDRKYEYLMTLHGVVNESTVCLMGHERRQTLNLITMLAIRVLADQNVIPNVANVTCYYQPAPYVADANFSNYYIAQVQPVFTCQQQTYSTWLPCN

SEQ ID NO: 68164 - protein, 446 aa, Homo sapiens
MAITVSLVNNKRKIVVLAQPTTVKRKRITPYKSIMTDLYYLSQTDGAGDWREKEAKDLTELVQRRITYLQNPKDCSKAKKLVCNINKGCGYGCQLHHVVYCFMIAYGTQRTLILESQNWRYATGGWETVFRPVSETCTDRSGISTGHWSGEVKDKNVQVVELPIVDSLHPRPPYLPLAVPEDLADRLVRVHGDPAVWWVSQFVKYLIRPQPWLEKEIEEATKKLGFKHPVIGVHVRRTDKVGTEAAFHPIEEYMVHVEEHFQLLARRMQVDKKRVYLATDDPSLLKEAKTKYPNYEFISDNSISWSAGLHNRYTENSLRGVILDIHFLSQADFLVCTFSSQVCRVAYEIMQTLHPDASANFHSLDDIYYFGGQNAHNQIAIYAHQPRTADEIPMEPGDIIGVAGNHWDGYSKGVNRKLGRTGLYPSYKVREKIETVKYPTYPEAEK

SEQ ID NO: 68165 - protein, 223 aa, Homo sapiens
MPASSPFLLAPKGPPGNMGGPVREPALSVALWLSWGAALGAVACAMALLTQQTELQSLRREVSRLQGTGGPSQNGEGYPWQSLPEQQHSVLHLVPINATSKDDSDVTEVMWQPALRRGRGLQAQGYGVRIQDAGVYLLYSQVLFQDVTFTMGQVVSREGQGRQETLFRCIRSMPSHPDRAYNSCYSAGVFHLHQGDILSVIIPRARAKLNLSPHGTFLGFVKL

SEQ ID NO: 68166 - protein, 36 aa, Homo sapiens
MAGKKNVLSSLAVYAEDSEPESDGEAGIEAVGSAAG

SEQ ID NO: 68167 - protein, 182 aa, Homo sapiens
MKPGFSPRGGGFGGRGGFGDRGGRGGRGGFGGGRGRGGGFRGRGRGGGGGGGGGGGGGRGGGFHSGGNRGRGRGGKRGNQSGKNVMVEPHRHEGVFICRGKEDALVTKNLVPGESVYGEKRVSISEGDDKIEYRAWNPFRSKLAAAILGGVDQIHIKPGAKVLYLGAASGTTVSHVSDIVGP

SEQ ID NO: 68168 - protein, 1399 aa, Homo sapiens
MDLSALRVEEVQNVINAMQKILECPICLELIKEPVSTKCDHIFCKFCMLKLLNQKKGPSQCPLCKNDITKRSLQESTRFSQLVEELLKIICAFQLDTGLEYANSYNFAKKENNSPEHLKDEVSIIQSMGYRNRAKRLLQSEPENPSLQETSLSVQLSNLGTVRTLRTKQRIQPQKTSVYIELGSDSSEDTVNKATYCSVGDQELLQITPQGTRDEISLDSAKKAACEFSETDVTNTEHHQPSNNDLNTTEKRAAERHPEKYQGSSVSNLHVEPCGTNTHASSLQHENSSLLLTKDRMNVEKAEFCNKSKQPGLARSQHNRWAGSKETCNDRRTPSTEKKVDLNADPLCERKEWNKQKLPCSENPRDTEDVPWITLNSSIQKVNEWFSRSDELLGSDDSHDGESESNAKVADVLDVLNEVDEYSGSSEKIDLLASDPHEALICKSERVHSKSVESNIEDKIFGKTYRKKASLPNLSHVTENLIIGAFVTEPQIIQERPLTNKLKRKRRPTSGLHPEDFIKKADLAVQKTPEMINQGTNQTEQNGQVMNITNSGHENKTKGDSIQNEKNPNPIESLEKESAFKTKAEPISSSISNMELELNIHNSKAPKKNRLRRKSSTRHIHALELVVSRNLSPPNCTELQIDSCSSSEEIKKKKYNQMPVRHSRNLQLMEGKEPATGAKKSNKPNEQTSKRHDSDTFPELKLTNAPGSFTKCSNTSELKEFVNPSLPREEKEEKLETVKVSNNAEDPKDLMLSGERVLQTERSVESSSISLVPGTDYGTQESISLLEVSTLGKAKTEPNKCVSQCAAFENPKGLIHGCSKDNRNDTEGFKYPLGHEVNHSRETSIEMEESELDAQYLQNTFKVSKRQSFAPFSNPGNAEEECATFSAHSGSLKKQSPKVTFECEQKEENQGKNESNIKPVQTVNITAGFPVVGQKDKPVDNAKCSIKGGSRFCLSSQFRGNETGLITPNKHGLLQNPYRIPPLFPIKSFVKTKCKKNLLEENFEEHSMSPEREMGNENIPSTVSTISRNNIRENVFKEASSSNINEVGSSTNEVGSSINEIGSSDENIQAELGRNRGPKLNAMLRLGVLQPEVYKQSLPGSNCKHPEIKKQEYEEVVQTVNTDFSPYLISDNLEQPMGSSHASQVCSETPDDLLDDGEIKEDTSFAENDIKESSAVFSKSVQKGELSRSPSPFTHTHLAQGYRRGAKKLESSEENLSSEDEELPCFQHLLFGKVNNIPSQSTRHSTVATECLSKNTEENLLSLKNSLNDCSNQVILAKASQEHHLSEETKCSASLFSSQCSELEDLTANTNTQDPFLIGSSKQMRHQSESQGVGLSDKELVSDDEERGTGLEENNQEEQSMDSNLGIGTRFLCLPQSIYRSELNVYAFGEHILQISKYS

SEQ ID NO: 68169 - protein, 631 aa, Homo sapiens
MAEETQHNKLAAAKKKLKEYWQKNSPRVPAGANRNRKTNGSIPEKATSGGCQPPRDSATGFHREGPTSSATLKDLESPCQERAVVLDSRSVEISQLKNTIKSLKQQKKQVEHQLEEEKKANNKKQKAKRVLEVQIQTLNIQKEELNTDLYHMKRSLRYFEEKSKDLAVRLQHSLQRKGELESVLSNVMATQKKKANQLSSRSKARTEWKLEQSMREEALLKVQLTQLKESFQQVQLERDEYSEHLKGERARWQQRMRKMSQEICTLKKEKQQDMRRVEELERSLSKLKNQMAEPLPPEPPAVPSEVELQHLRKELERVAGELQAQVKKNQRISLLNQRQEERIQEQEERLRKQEERIQEQHKSLQQLAKPQSVFEEPNNENKNALQLEQQVKELQEKLGEEHLEAASQQNQQLTAQLSLMALPGEGHGGEHLDSEGEEAPQPMPSVPEDLESREAMSSFMDHLKEKADLSELVKKELCFIHHWRDRRHQKTHHLLSEPGGCAKDAALGGGHHQAGAQGGDEGEAAGAAADGIAAYSNYNNGHRKFLAAAHNPADEPGPGAPAPQELGAADKHGDLREVSLTSSAQGEAREDPLLDKPTAQPIVQDHQEHPGLGSNCCVPFLCWAWLPRRRR

SEQ ID NO: 68170 - protein, 521 aa, Homo sapiens
MELEVRRVRQAFLSGRSRPLRFRLQQLEALRRMVQEREKDILTAIAADLCKSEFNVYSQEVITVLGEIDFMLENLPEWVTAKPVKKNVLTMLDEAYIQPQPLGVVLIIGAWNYPFVLTIQPLIGAIAAGNAVIIKPSELSENTAKILAKLLPQYLDQDLYIVINGGVEETTELLKQRFDHIFYTGNTAVGKIVMEAAAKHLTPVTLELGGKSPCYIDKDCDLDIVCRRITWGKYMNCGQTCIAPDYILCEASLQNQIVWKIKETVKEFYGENIKESPDYERIINLRHFKRILSLLEGQKIAFGGETDEATRYIAPTVLTDVDPKTKVMQEEIFGPILPIVPVKNVDEAINFINEREKPLALYVFSHNHKLIKRMIDETSSGGVTGNDVIMHFTLNSFPFGGVGSSGMGAYHGKHSFDTFSHQRPCLLKSLKREGANKLRYPPNSQSKVDWGKFFLLKRFNKEKLGLLLLTFLGIVAAVLVKEVSSVSAWLPIVWDVRSPCAWPPHLGSEARLCLAATTSRK

SEQ ID NO: 68171 - protein, 54 aa, Homo sapiens
MEEEKGYRQYVLCTLSRITTFDFSGVTKADRTTAEVWKRMNIKPKKAWTKQNTL

SEQ ID NO: 68172 - protein, 71 aa, Homo sapiens
MEKTQETVQRILLEPYKYLLQLPESRCDAQAGVQWCSLGSLQPPPPGFKGFSCPSLPSSWDYRLEGWRAVV

SEQ ID NO: 68173 - protein, 149 aa, Homo sapiens
MASPDWGYDDKNGPEQWSKLYPIANGNNQSPVDIKTSETKHDTSLKPISVSYNPATAKEIINVGHSFHVNFEDNDNRSVLKGGPFSDSYRLFQFHFHWGSTNEHGSEHTVDGVKYSAELHVAHWNSAKYSSLAEAASKADGLAVIGVLM

SEQ ID NO: 68174 - protein, 305 aa, Homo sapiens
MQIFVKTLTGKTITLEVEPSDTIENVKAKIQDKEGIPPDQQRLIFAGKQLEDGRTLSDYNIQKESTLHLVLRLRGGMQIFVKTLTGKTITLEVEPSDTIENVKAKIQDKEGIPPDQQRLIFAGKQLEDGRTLSDYNIQKESTLHLVLRLRGGMQIFVKTLTGKTITLEVEPSDTIENVKAKIQDKEGIPPDQQRLIFAGKQLEDGRTLSDYNIQKESTLHLVLRLRGGMQIFVKTLTGKTITLEVEPSDTIENVKAKIQDKEGIPPDQQRLIFAGKQLEDGRTLSDYNIQKESTLHLVLRLRGGV

SEQ ID NO: 68175 - protein, 58 aa, Homo sapiens
MTVLAPAWSPTTYLLLLLLLSSGLSGTQDCSFQHSPISSDFAVKIRELPGLILFSPAV

SEQ ID NO: 68176 - protein, 85 aa, Homo sapiens
MATAMDWLPWSLLLFSLMCETSAFYVPGVAPINFHQNDPVEIKAVKLTSSRTQLPYEYYSLPFCQPSKITYKAENLGRRKERTGS

SEQ ID NO: 68177 - protein, 1106 aa, Homo sapiens
MELEKSGALLESGTYEDNYYGTPKPPAEPAPLLLNVTDQILPGATPSAEGKRKRNKSVSNMEKASIEPPEEEEEERPVVNGNGVVVTPESSEHEDKSAGASGEMPSQPYPAPVYSQPEELKEQMDDTKPTKPEDNEEPDPLPDNWEMAYTEKGEVYFIDHNTKTTSWLDPRLAKKAKPPEECKENELPYGWEKIDDPIYGTYYVDHINRRTQFENPVLEAKRKLQQHNMPHTELGTKPLQAPGFREKPLFTRDASQLKGTFLSTTLKKSNMGFGFTIIGGDEPDEFLQVKSVIPDGPAAQDGKMETGDVIVYINEVCVLGHTHADVVKLFQSVPIGQSVNLVLCRGYPLPFDPEDPANSMVPPLAIMERPPPVMVNGRHNYETYLEYISRTSQSVPDITDRPPHSLHSMPTDGQLDGTYPPPVHDDNVSMASSGATQAELMTLTIVKGAQGFGFTIADSPTGQRVKQILDIQGCPGLCEGDLIVEINQQNVQNLSHTEVVDILKDCPIGSETSLIIHRGGFFSPWKTPKPIMDRWENQGSPQTSLSAPAIPQNLPFPPALHRSSFPDSTEAFDPRKPDPYELYEKSRAIYESRRPDYKELDVHLRRMESGFGFRILGGDEPGQPILIGAVIAMGSADRDGRLHPGDELVYVDGIPVAGKTHRYVIDLMHHAARNGQVNLTVRRKVLCGGEPCPENGRSPGSVSTHHSSPRSDYATYTNSNHAAPSSNASPPEGFASHSLQTSDVVIHRKENEGFGFVIISSLNRPESGSTITVPHKIGRIIDGSPADRCAKLKVGDRILAVNGQSIINMPHADIVKLIKDAGLSVTLRIIPQEELNSPTSAPSSEKQSPMAQQSPLAQQSPLAQPSPATPNSPIAQPAPPQPLQLQGHENSYRSEVKARQDVKPDIRQPPFTDYRQPPLDYRQPPGGDYQQPPPLDYRQPPLLDYRQHSPDTRQYPLSDYRQPQDFDYFTVDMEKGAKGFGFSIRGGREYKMDLYVLRLAEDGPAIRNGRMRVGDQIIEINGESTRDMTHARAIELIKSGGRRVRLLLKRGTGQVPEYGMVPSSLSMCMKSDKHGSPYFYLLGHPKDTTNPPPGVLPLPPPQVCRK

SEQ ID NO: 68178 - protein, 115 aa, Homo sapiens
MGEAPAPEQYLVLEELIDMNQHHLNALGVGHASLDQLCQVTRARGLHSKLTGAGGGGCGITLLKPGLEQPEVEATKQALTSCGFDCLETSIGAPGVSIHSATSLDSRVQQALDGL

SEQ ID NO: 68179 - protein, 2113 aa, Homo sapiens
MTGAGEPRREEPPPQPSAGLRSRESGAPSAGGWERAERGRGAAARPATGPPPRRIGPLYGMWLVTFLLLLDSLHKARPEDVGTSLYFVNDSLQQVTFSSSVGVVVPCPAAGSPSAALRWYLATGDDIYDVPHIRHVHANGTLQLYPFSPSAFNSFIHDNDYFCTAENAAGKIRSPNIRVKAVFREPYTVRVEDQRSMRGNVAVFKCLIPSSVQEYVSVVSWEKDTVSIIPEHRFFITYHGGLYISDVQKEDALSTYRCITKHKYSGETRQSNGARLSVTDPAESIPTILDGFHSQEVWAGHTVELPCTASGYPIPAIRWLKDGRPLPADSRWTKRITGLTISDLRTEDSGTYICEVTNTFGSAEATGILMVIDPLHVTLTPKKLKTGIGSTVILSCALTGSPEFTIRWYRNTELVLPDEAISIRGLSNETLLITSAQKSHSGAYQCFATRKAQTAQDFAIIALEDGTPRIVSSFSEKVVNPGEQFSLMCAAKGAPPPTVTWALDDEPIVRDGSHRTNQYTMSDGTTISHMNVTGPQIRDGGVYRCTARNLVGSAEYQARINVRGPPSIRAMRNITAVAGRDTLINCRVIGYPYYSIKWYKDALLLPDNHRQVVFENGTLKLTDVQKGMDEGEYLCSVLIQPQLSISQSVHVAVKVPPLIQPFEFPPASIGQLLYIPCVVSSGDMPIRITWRKDGQVIISGSGVTIESKEFMSSLQISSVSLKHNGNYTCIASNAAATVSRERQLIVRVPPRFVVQPNNQDGIYGKAGVLNCSVDGYPPPKVMWKHAKGSGNPQQYHPVPLTGRIQILPNSSLLIRHVLEEDIGYYLCQASNGVGTDISKSMFLTVKIPAMITSHPNTTIAIKGHAKELNCTARGERPIIIRWEKGDTVIDPDRVMRYAIATKDNGDEVVSTLKLKPADRGDSVFFSCHAINSYGEDRGLIQLTVQEPPDPPELEIREVKARSMNLRWTQRFDGNSIITGFDIEYKNKSDSWDFKQSTRNISPTINQANIVDLHPASVYSIRMYSFNKIGRSEPSKELTISTEEAAPDGPPMDVTLQPVTSQSIQVTWKAPKKELQNGVIRGYQIGYRENSPGSNGQYSIVEMKATGDSEVYTLDNLKKFAQYGVVVQAFNRAGTGPSSSEINATTLEDVPSQPPENVRALSITSDVAVISWSEPPRSTLNGVLKGYRVIFWSLYVDGEWGEMQNITTTRERVELRGMEKFTNYSVQVLAYTQAGDGVRSSVLYIQTKEDVPGPPAGIKAVPSSASSVVVSWLPPTKPNGVIRKYTIFCSSPGSGQPAPSEYETSPEQLFYRIAHLNRGQQYLLWVAAVTSAGRGNSSEKVTIEPAGKAPAKIISFGGTVTTPWMKDVRLPCNSVGDPAPAVKWTKDSEDSAIPVSMDGHRLIHTNGTLLLRAVKAEDSGYYTCTATNTGGFDTIIVNLLVQVPPDQPRLTVSKTSASSITLTWIPGDNGGSSIRGFVLQYSVDNSEEWKDVFISSSERSFKLDSLKCGTWYKVKLAAKNSVGSGRISEIIEAKTHGREPSFSKDQHLFTHINSTHARLNLQGWNNGGCPITAIVLEYRPKGTWAWQGLRANSSGEVFLTELREATWYELRMRACNSAGCGNETAQFATLDYDGSTIPPIKSAQGEGDDVKKLFTIGCPVILATLGVALLFIVRKKRKEKRLKRLRDAKSLAEMLISKNNRSFDTPVKGPPQGPRLHIDIPRVQLLIEDKEGIKQLGDDKATIPVTDAEFSQAVNPQSFCTGVSLHHPTLIQSTGPLIDMSDIRPGTNPVSRKNVKSAHSTRNRYSSQWTLTKCQASTPARTLTSDWRTVGSQHGVTVTESDSYSASLSQDTDKGRNSMVSTESASSTYEELARAYEHAKLEEQLQHAKFEITECFISDSSSDQMTTGTNENADSMTSMSTPSEPGICRFTASPPKPQDADRGKNVAVPIPHRANKSDYCNLPLYAKSEAFFRKADGREPCPVVPPREASIRNLARTYHTQARHLTLDPASKSLGLPHPGAPAAASTATLPQRTLAMPAPPAGTAPPAPGPTPAEPPTAPSAAPPAPSTEPPRAGGPHTKMGGSRDSLLEMSTSGVGRSQKQGAGAYSKSYTLV

SEQ ID NO: 68180 - protein, 136 aa, Homo sapiens
MSCAGAAAAPRLWRLRPGARRSLSAYGRRTSVRFRSSGMTLDNISRAAVDRIIRVDHAGEYGANRIYAGQMAVLGRTSVGPVIQKMWDQEKDHLKKFNELMVTFRVRPTVLMPLWNVLGFALGTCLSRRAYASLGI

SEQ ID NO: 68181 - protein, 444 aa, Homo sapiens
MSLMVVSMACVGLFLVQRAGPHMGGQDKPFLSAWPSAVVPRGGHVTLRCHYRHRFNNFMLYKEDRIHIPIFHGRIFQESFNMSPVTTAHAGNYTCRGSHPHSPTGWSAPSNPVVIMVTGNHRKPSLLAHPGPLVKSGERVILQCWSDIMFEHFFLHKEGISKDPSRLVGQIHDGVSKANFSIGPMMLALAGTYRCYGSVTHTSYQLSAPSDPLDIVVTGPYEKPSLSAQPGPKVQAGESVTLSCSSRSSYDMYHLSREGGAHERRLPAVRKVNRTFQADFPLGPATHGGTYRCFGSFRHSPYELSDPSDPLLVSVTGNPSSSWPSPTEPSSKSGNPRHLHILIGTSVVIILFILLLFFLLHLWCSNKKNAAVMDQEPAGNRTANSEDSDEQDPEEVTYAQLDHCVFTQRKITRPSQRPKTPPTDTILYTELPNAKPRSKVVSCP

SEQ ID NO: 68182 - protein, 982 aa, Homo sapiens
MVLDDLPNLEDIYTSLCSSTMEDSEMDFDSGLEDDDTKSDSILEDSTIFVAFKGNIDDKDFKWKLDAILKNVPNLLHMESSKLKVQKVEPWNSVRVTFNIPREAAERLRILAQSNNQQLRDLGILSVQIEGEGAINLALAQNRSQDVRMNGPMGAGNSVRMEAGFPMASGPGIIRMNNPATVMIPPGGNVSSSMMAPGPNPELQPRTPRPASQSDAMDPLLSGLHIQQQSHPSGSLAPPHHPMQPVSVNRQMNPANFPQLQQQQQQQQQQQQQQQQQQQQQQQQQLQARPPQQHQQQQPQGIRPQFTAPTQVPVPPGWNQLPSGALQPPPAQGSLGTMTANQGWKKAPLPGPMQQQLQARPSLATVQTPSHPPPPYPFGSQQASQAHTNFPQMSNPGQFTAPQMKSLQGGPSRVPTPLQQPHLTNKSPASSPSSFQQGSPASSPTVNQTQQQMGPRPPQNNPLPQGFQQPVSSPGRNPMVQQGNVPPNFMVMQQQPPNQGPQSLHPGLGGMPKRLPPGFSAGQANPNFMQGQVPSTTATTPGNSGAPQLQANQNVQHAGGQGAGPPQNQMQVSHGPPNMMQPSLMGIHGNMNNQQAGTSGVPQVNLSNMQGQPQQGPPSQLMGMHQQIVPSQGQMVQQQGTLNPQNPMILSRAQLMPQGQMMVNPPSQNLGPSPQRMTPPKQMLSQQGPQMMAPHNQMMGPQGQVLLQQNPMIEQIMTNQMQGNKQQFNTQNQSNVMPGPAQIMRGPTPNMQGNMVQFTGQMSGQMLPQQGPVNNSPSQVMGIQGQVLRPPGPSPHMAQQHGDPATTANNDVSLSQMMPDVSIQQTNMVPPHVQAMQGNSASGNHFSGHGMSFNAPFSGAPNGNQMSCGQNPGFPVNKDVTLTSPLLVNLLQSDISAGHFGVNNKQNNTNANKPKKKKPPRKKKNSQQDLNTPDTRPAGLEEADQPPLPGEQGINLDNSGPKLPEFSNRPPAKMLRVPTTEW

SEQ ID NO: 68183 - protein, 552 aa, Homo sapiens
MGCLWGLALPLFFFCWEVGVSGSSAGPSTRRADTAMTTDDTEVPAMTLAPGHAALETQTLSAETSSRASTPAGPIPEAETRGAKRISPARETRSFTKTSPNFMVLIATSVETSAASGSPEGAGMTTVQTITGSDPEEAIFDTLCTDDSSEEAKTLTMDILTLAHTSTEAKGLSSESSASSDGPHPVITPSRASESSASSDGPHPVITPSRASESSASSDGPHPVITPSWSPGSDVTLLAEALVTVTNIEVINCSITEIETTTSSIPGASDIDLIPTEGVKASSTSDPPALPDSTEAKPHITEVTASAETLSTAGTTESAAPHATVGTPLPTNSATEREVTAPGATTLSGALVTVSRNPLEETSALSVETPSYVKVSGAAPVSIEAGSAVGKTTSFAGSSASSYSPSEAALKNFTPSETPTMDIATKGPFPTSRDPLPSVPPTTTNSSRGTNSTLAKITTSAKTTMKPPTATPTTARTRPTTDVSAGENGGFLLLRLSVASPEDLTDPRVAERLMQQMERSLALSPRLECSGVISAHCKLHLLGSRDSPASAS

SEQ ID NO: 68184 - protein, 746 aa, Homo sapiens
MDHAEENEILAATQRYYVERPIFSHPVLQERLHTKDKVPDSIADKLKQAFTCTPKKIRNIIYMFLPITKWLPAYKFKEYVLGDLVSGISTGVLQLPQGLAFAMLAAVPPIFGLYSSFYPVIMYCFLGTSRHISIGPFAVISLMIGGVAVRLVPDDIVIPGGVNATNGTEARDALRVKVAMSVTLLSGIIQFCLGVCRFGFVAIYLTEPLVRGFTTAAAVHVFTSMLKYLFGVKTKRYSGIFSVVYSTVAVLQNVKNLNVCSLGVGLMVFGLLLGGKEFNERFKEKLPAPIPLEFFAVVMGTGISAGFNLKESYNVDVVGTLPLGLLPPANPDTSLFHLVYVDAIAIAIVGFSVTISMAKTLANKHGYQVDGNQELIALGLCNSIGSLFQTFSISCSLSRSLVQEGTGGKTQLAGCLASLMILLVILATGFLFESLPQAVLSAIVIVNLKGMFMQFSDLPFFWRTSKIELTIWLTTFVSSLFLGLDYGLITAVIIALLTVIYRTQSPSYKVLGKLPETDVYIDIDAYEEVKEIPGIKIFQINAPIYYANSDLYSNALKRKTGVNPAVIMGARRKAMRKYAKEVGNANMANATVVKATQDAEVDGEDATKPEEEDGEVKYPPIVIKSTFPEEMQRFMPPGDNVHTVILDFTQVNFIDSVGVKTLAGIVKEYGDVGIYVYLAGCSAQVVNDLTRNRFFENPALWELLFHSIHDAVLGSQLREALAEQEASAPPSQEDLEPNATPATPEA

SEQ ID NO: 68185 - protein, 76 aa, Homo sapiens
MADSSGQQGKGRRVQPQWSPPAGTQPCRLHLYNSLTRNKEVFIPQDGKKVTWYCCGPTVYDASHMGHASSRGVPRC

SEQ ID NO: 68186 - protein, 50 aa, Homo sapiens
MASGRARCTRKLRNWVVEQVESGQFPGVCWDDTAKTMFRIPWKHAGLGNI

SEQ ID NO: 68187 - protein, 163 aa, Homo sapiens
MLARALLLCAVLALSHTANPCCSHPCQNRGVCMSVGFDQYKCDCTRTGFYGENCSTPEFLTRIKLFLKPTPNTVHYILTHFKGFWNVVNNIPFLRNAIMSYVLTSRSHLIDSPPTYNADYGYKSWEAFSNLSYYTRALPPVPDDCPTPLGVKALHASVFQDRS

SEQ ID NO: 68188 - protein, 117 aa, Homo sapiens
KTCSHYECAFLGGLKTENCIENLEYFQPIYVYNPGEKNQKLEDHSEKNWKLEDHGEKNQKLEDHGVKILEPTQIPGMKIPEPFPLPGIKMIQLNEKPEDKSQGNINNPTPGPVPVPG

SEQ ID NO: 68189 - protein, 1212 aa, Homo sapiens
MPSSLMLEVPALADFNRAWTELTDWLSLLDQVIKSQRVMVGDLEDINEMIIKQKATMQDLEQRRPQLEELITAAQNLKNKTSNQEARTIITDRIERIQNQWDEVQEHLQNRRQQLNEMLKDSTQWLEAKEEAEQVLGQARAKLESWKEGPYTVDAIQKKITETKQLAKDLRQWQTNVDVANDLALKLLRDYSADDTRKVHMITENINASWRSIHKRVSEREAALEETHRLLQQFPLDLEKFLAWLTEAETTANVLQDATRKERLLEDSKGVKELMKQWQDLQGEIEAHTDVYHNLDENSQKILRSLEGSDDAVLLQRRLDNMNFKWSELRKKSLNIRSHLEASSDQWKRLHLSLQELLVWLQLKDDELSRQAPIGGDFPAVQKQNDVHRAFKRELKTKEPVIMSTLETVRIFLTEQPLEGLEKLYQEPRELPPEERAQNVTRLLRKQAEEVNTEWEKLNLHSADWQRKIDETLERLRELQEATDELDLKLRQAEVIKGSWQPVGDLLIDSLQDHLEKVKALRGEIAPLKENVSHVNDLARQLTTLGIQLSPYNLSTLEDLNTRWKLLQVAVEDRVRQLHEAHRDFGPASQHFLSTSVQGPWERAISPNKVPYYINHETQTTCWDHPKMTELYQSLADLNNVRFSAYRTAMKLRRLQKALCLDLLSLSAACDALDQHNLKQNDQPMDILQIINCLTTIYDRLEQEHNNLVNVPLCVDMCLNWLLNVYDTGRTGRIRVLSFKTGIISLCKAHLEDKYRYLFKQVASSTGFCDQRRLGLLLHDSIQIPRQLGEVASFGGSNIEPSVRSCFQFANNKPEIEAALFLDWMRLEPQSMVWLPVLHRVAAAETAKHQAKCNICKECPIIGFRYRSLKHFNYDICQSCFFSGRVAKGHKMHYPMVEYCTPTTSGEDVRDFAKVLKNKFRTKRYFAKHPRMGYLPVQTVLEGDNMETPASSPQLSHDDTHSRIEHYASRLAEMENSNGSYLNDSISPNESIDDEHLLIQHYCQSLNQDSPLSQPRSPAQILISLESEERGELERILADLEEENRNLQAEYDRLKQQHEHKGLSPLPSPPEMMPTSPQSPRDAELIAEAKLLRQHKGRLEARMQILEDHNKQLESQLHRLRQLLEQPQAEAKVNGTTVSSPSTSLQRSDSSQPMLLRVVGSQTSDSMGEEDLLSPPQDTSTGLEEVMEQLNNSFPSSRGRNTPGKPMREDTM

SEQ ID NO: 68190 - protein, 316 aa, Homo sapiens
  MOD_RES (1)..(1): Any amino acid
XWNKKATAVLVIASTDVDKTGASYYGEQTLHYIATNGESAVVQLPKNGPIYDVVWNSSSTEFCAVYGFMPAKATIFNLKCDPVFDFGTGPRNAAYYSPHGHILVLAGFGNLRGQMEVWDVKNYKLISKPVASDSTYFAWCPDGEHILTATCAPRLRVNNGYKIWHYTGSILHKYDVPSNAELWQVSWQPFLDGIFPAKTITYQAVPSEVPNEEPKVATAYRPPALRNKPITNSKLHEEEPPQNMKPQSGNDKPLSKTALKNQRKHEAKKAAKQKLKAIEQLKEQAATGKQLEKNQLEKIQKETALLQELEDLELGI

SEQ ID NO: 68191 - protein, 115 aa, Homo sapiens
MRKRKISVCQQTWALLCKNFLKKWRMKRESLMEWLNSLLLLLCLYIYPHSHQVNDFSSLLTMDLGRVDTFNESRFSVVYTPVTNTTQQIMNKVASTPFLAGKEVLGLPDEESIKE

SEQ ID NO: 68192 - protein, 263 aa, Homo sapiens
MKDVPGFLQQSQNSGPGQPAVWHRLEELYTKKVNPLSLVEIILHVVRQMTDPNVALTFLEKTREKVKSSDEAVILCKTAIGALKLNIGDLQVTKETIEDVEEMLNNLPGVTSVHSRFYDLSSKYYQTIGNHASYYKDALRFLGCVDIKDLPVSEQQERAFTLGLAGLLGEGVFNFGELLMHPVLESLRNTDRQWLIDTLYAFNSGNVERFQTLKTAWGQQPDLAANEAQLLRKIQLLCLMEMTFTRPANHRQLTFEEIAKSAK

SEQ ID NO: 68193 - protein, 374 aa, Homo sapiens
MSEGVDLIDIYADEEFNQDPEFNNTDQIDLYDDVLTATSQPSDDRSSSTEPPPPVRQEPSPKPNNKTPAILYTYSGLRNRRAAVYVGSFSWWTTDQQLIQVIRSIGVYDVVELKFAENRANGQSKGYAEVVVASENSVHKLLELLPGKVLNGEKVDVRPATRQNLSQFEAQARKRIPPRAHSRDSSDSADGRATPSENLVPSSARVDKPPSVLPYFNRPPSALPLMVGPPPDTYMKASAPYNHHGSRDSGPPPSTVSEAEFEDIMKRNRAISSSAISKAVSGASAGDYSDAIETLLTAIAVIKQSRVANDERCRVLISSLKDCLHGIEAKSYSVGASGSSSRKRHRSRERSPSRSRESSRRHRDLLHNEDRHDD

SEQ ID NO: 68194 - protein, 67 aa, Homo sapiens
MFAFLNVVVTLAWPSQLLLPLFSFWRPHYPIMSLCEDMLLCNYRKCRIKLSGYAWVTACSHIFCDQH

SEQ ID NO: 68195 - protein, 225 aa, Homo sapiens
MWFLTTLLLWVPVDGQVVDTTKAVITLQPPWVSVFQEETITLHCEVLHLPGSSSTQWFLNGTATQTSTPSYRITSASVNDSGEYRCQRGLSGRSDPIQLEIHRGWLLLQVSSRVFMEGEPLALRCHAWKDKLVYNVLYYRNGKAFKFFHWNSNLTILKTNISHNGTYHCSGMGKHRYTSAGISQYTVKELFPAPVLNASVTSPLLEGNLVTLSCETKLLLQRPGL

SEQ ID NO: 68196 - protein, 249 aa, Homo sapiens
  MOD_RES (1)..(1): Any amino acid
XLRKAERSWSCSREKKEGYAKDMVTDFDEKHDEYLILLQQRNRILKHLKSKDPVQLRLEHLEQGFSVYVNGANSELKSSPRKAIHSDFSRSASHTEGTHDYGRRTLFREAEEALRRSSRTAPSKVQRRGWHQKSVQIRTEAGPRLHIEPPVDYSDDFELCGDVTLQANNTSEDRPQDTKSPTSTKPCGFNFSLLNACGHSDPSSSVDKERILLTIQDVMELRRSLELSVNLQRKQKDCSSDEYDSIEED

SEQ ID NO: 68197 - protein, 270 aa, Homo sapiens
MKRAGFALARRLAIRGFLYVLLSHWVFVGAPRPPASDSWKKGLVPSAPPASRKMGSKALPAPIPLHPSLQLTNYSFLQAVNTFPATVDHLQGLYGLSAVQTMHMNHWTLGYPNVHEITRSTITEMAAAQGLVDARFPFPALPFTTHLFHPKQGAIAHVLPALHKDRPRFDFANLAVAATQEDPPKMGDLSKLSPGLGSPISGLSKLTPDRKPSRGRLPSKTKKEFICKFCGRHFTKSYNLLIHERTHTDERPYTCDICHKAFRRQDHLRD

SEQ ID NO: 68198 - protein, 116 aa, Homo sapiens
MAEGERKTALEMVQAAGTDRHCVTFVLHEEDHTLGNSLRYMIMKNPEVEFCGYTTTHPSESKINLRIQTRGTLPAVEPFQRGLNELMNVCQHVLDKFEASIKDYKDQKASRNESTF

SEQ ID NO: 68199 - protein, 126 aa, Homo sapiens
MAQRSTVFPSRVTKERRVRTMPRHSQSLTMAPYSSVSLVEQLEDRILCHEKTTAALVEHAFRIKDDIVNSLQKMQNKGGGDRLARLFLEEHIRNITAIVKQLNRDIEVLQEQIRARDNISYGTNSA

SEQ ID NO: 68200 - protein, 92 aa, Homo sapiens
MEGALAANWSAEAANASAAPPGAEGNRTAGPPRRNEALARVEVAVLCLILLLALSGNACVLLALRTTRQKHSRLFFFMKHLSIADLVVAVFQ

SEQ ID NO: 68201 - protein, 79 aa, Homo sapiens
MAAPLIPLSQQIPTGNSLYESYYKQVDPAYTGRVGASEAALFLKKSGLSDIILGKIWDLADPEGFLCCTETGGLCTEWP

SEQ ID NO: 68202 - protein, 114 aa, Homo sapiens
MAGNFWQSSHYLQWILDKQDLLKERQKDLKFLSEEEYWKLQIFFTNVIQALGEHLKLRQQVIATATVYFKRFYARYSLKSIDPVLMAPTCVFLASKVEEFGVVSNTRLIAAATS

SEQ ID NO: 68203 - protein, 100 aa, Homo sapiens
MSSGTELLWPGAALLVLLGVAASLCVRCSRPGAKRSEKIYQQRSLREDQQSFTGSRTYSLVGQAWPGPLADMAPTRKDKLLQFYPSLEDPASSRYQNFSK

SEQ ID NO: 68204 - protein, 169 aa, Homo sapiens
MEEEVRLKKRKRRRNVDKDPAKEDVEKAKKRRGRPPAEKLSPNPPKLTKQMNAIIDTVINYKDSSGRQLSEVFIQLPSRKELPEYYELIRKPVDFKKIKERIRNHKYRSLGDLEKDVMLLCHNAQTFNLEGSQIYEDSIVLQSVFKSARQKIAKEEESEDESNEEEEEE

SEQ ID NO: 68205 - protein, 89 aa, Homo sapiens
MPGVNDCDLLMYLRAARSMAAFAGMCDGGSTEDGCVAASRDDTTLNALNTLHESGYDAGKALQRLVKKPVPKLIEKCWTEDEVKRFVKG

SEQ ID NO: 68206 - protein, 117 aa, Homo sapiens
MKKAFKVMNELRSQNLLCDVTIVAEDMEISAHRVVLAACSPYFHAMFTGEMSESRAKRVRIKEVDGWTLRMLIDYVYTAEIQVTEENVQVLLPAAGLLQLQDVKKTCCEFLESQLHP

SEQ ID NO: 68207 - protein, 94 aa, Homo sapiens
MRCPKSAVTMRNEELLLSNGTANKMNGALDHSDQPDPDAIKMFVGQIPRSWSEKELKELFEPYGAVYQINVLRDRSQNPPQSKDASSHSDETCR

SEQ ID NO: 68208 - protein, 226 aa, Homo sapiens
MPRVYIGRLSYNVREKDIQRFFSGYGRLLEVDLKNGYGFVEFEDSRDADDAVYELNGKELCGERVIVEHARGPRRDRDGYSYGSRSGGGGYSSRRTSGRDKYGPPVRTEYRLIVENLSSRCSWQDLKDFMRQAGEVTYADAHKERTNEGVIEFRSYSDMKRALDKLDGTEINGRNIRLIEDKPRTSHRRSYSGSRSRSRSRRRSRSRSRRSSRSRSRSISKSRSRL

SEQ ID NO: 68209 - protein, 41 aa, Homo sapiens
MIIKEYRIPLPMTVEEYRIAQLYMIQKKSRNETYGEGSGVE

SEQ ID NO: 68210 - protein, 108 aa, Homo sapiens
MQISSEKEEDDNEKRQDPGDNWEEGGGGGGGMEKSSGPWNKTAPVQAPPAPVIETPEPAMTSGVYRPPGARLTTTRKTPQGPPEIYSDTQFPSLQSTAKHVESRKYLK

SEQ ID NO: 68211 - protein, 47 aa, Homo sapiens
  MOD_RES (1)..(1): Any amino acid
XMHPEGNGRSGFLIHGERQKDKLLQKLEPRSWCQIVKRDCPFQQSLF

SEQ ID NO: 68212 - protein, 1066 aa, Homo sapiens
MAASTAQCRVTKAESKAAAGPRAGGARERAPAGAPPPSPPSPGPAAPPAPPPPPPPPPPPPPPPPPPPPPRDGPKAEPEPGPGPASAPAPGLGSEENAMVAMDLGSPSLPKKSLPVPGALEQVASRLSSKVAAEVPHGSKQELQDLKAQSLTTCEVCGACFETRKGLSSHARSHLRQLGVAESESSGAPIDLLYELVKQKGLPDAHLGLPPGLAKKSSSLKEVVAGAPRPGLLSLAKPLDAPAVNKAIKSPPGFSAKGLGHPPSSPLLKKTPLALAGSPTPKNPEDKSPQLSLSPRPASPKAQWPQSEDEGPLNLTLDSDGGRELDCQLCGAWFETRKGLSSHARAHLRHLGVSDPDAKGSPIDVLHGLIRRDGVQIRLPPRRGALAHPGRPPPTSAALSLLPPPPPAKKAKLKAAGMASPWGKQDLSAAAAAGIFWASDVEPSPLNLSSGPEPARDIRCEFCGEFFENRKGLSSHARSHLRQMGVTEWYVNGSPIDTLREILKRRTQSRPGGPPNPPGPSPKALAKMMGGAGPGSSLEARSPSDLHISPLAKKLPPPPGSPLGHSPTASPPPTARKMFPGLAAPSLPKKLKPEQIRVEIKREMLPGALHGELHPSEGPWGAPREDMTPLNLSSRAEPVRDIRCEFCGEFFENRKGLSSHARSHLRQMGVTEWSVNGSPIDTLREILKKKSKPCLIKKEPPAGDLAPALAEDGPPTVAPGPVQSPLPLSPLAGRPGKPGAGPAQVPRELSLTPITGAKPSATGYLGSVAAKRPLQEDRLLPAEVKAKTYIQTELPFKAKTLHEKTSHSSTEACCELCGLYFENRKALASHARAHLRQFGVTEWCVNGSPIETLSEWIKHRPQKVGAYRSYIQGGRPFTKKFRSAGHGRDSDKRPSLGLAPGGLAVVGRSAGGEPGPEAGRAADGGERPLAASPPGTVKAEEHQRQNINKFERRQARPPDASAARGGEDTNDLQQKLEEVRQPPPRVRPVPSLVPRPPQTSLVKFVGNIYTLKCRFCEVEFQGPLSIQEEWVRHLQRHILEMNFSKADPPPEESQAPQAQTAAAEAP

SEQ ID NO: 68213 - protein, 549 aa, Homo sapiens
MTKHPPNRRGISFEVGAQLEARDRLKNWYPAHIEDIDYEEGKVLIHFKRWNHRYDEWFCWDSPYLRPLEKIQLRKEGLHEEDGSSEFQINEQVLACWSDCRFYPAKVTAVNKDGTYTVKFYDGVVQTVKHIHVKAFSKDQNIVGNARPKETDHKSLSSSPDKREKFKEQRKATVNVKKDKEDKPLKTEKRPKQPDKEGKLICSEKGKVSEKSLPKNEKEDKENISENDREYSGDAQVDKKPENDIVKSPQENLREPKRKRGRPPSIAPTAVDSNSQTLQPITLELRRRKISKGCEVPLKRPRLDKNSSQEKSKNYSENTDKDLSRRRSSRLSTNGTHEILDPDLVVSDLVDTDPLQDTLSSTKESEEGQLKSALEAGQVSSALTCHSFGDGSGAAGLELNCPSMGENTMKTEPTSPLVELQEISTVEVTNTFKKTDDFGSSNAPAVDLDHKFRCKVVDCLKFFRKAKLLHYHMKYFHGMEKSLEPEESPGKRHVQTRGPSASDKPSQETLTRKRVSASSPTTKDKEKNKEKKFKEFVRVKPKKKKKKKK

SEQ ID NO: 68214 - protein, 67 aa, Homo sapiens
MRMESRRQATVSWDSGGSDEAPPKPSRPGYPSPRSSEGFYPSPQHMVQTNHYQVSGYPGSHGITAMA

SEQ ID NO: 68215 - protein, 574 aa, Homo sapiens
MALGTSSPSPPAPPSSPQHIYTNTRTLGPPEPEGHAGGGYPTYTNVEVVNDGAESAAFKQLFRTWSEKRRRNQKLGGRDKSIHVKLDVGKLHTQPKLAAQLRMVDDGSGKVEVWCIQDLHRQPVDPKRHGQLCAGNCYLVLYTYQRLGRVQYILYLWQGHQATADEIEALNSNAEELDVMYGGVLVQEHVTMGSEPPHFLAIFQGQLVIFQERAGHHGKGQSASTTRLFQVQGTDSHNTRTMEVPARASSLNSSDIFLLVTASVCYLWFGKGCNGDQREMARVVVTVISRKNEETVLEGQEPPHFWEALGGRAPYPSNKRLPEEVPSFQPRLFECSSHMGCLVLAEVGFFSQEDLDKYDIMLLDTWQEIFLWLGEAASEWKEAVAWGQEYLKTHPAGRSPATPIVLVKQGHEPPTFIGWFFTWDPYKWTSHPSHKEVVDGSPAAASTISEITAEVNNLRLSRWPGNGRAGAVALQALKGSQDSSENDLVRSPKSAGSRTSSSVSSTSATINGGLRREQLMHQAVEDLPEGVDPARREFYLSDSDFQDIFGKSKEEFYSMATWRQRQEKKQLGFF

SEQ ID NO: 68216 - protein, 79 aa, Homo sapiens
  MOD_RES (1)..(1): Any amino acid
XAAVRGSASTRTGLGSAEGHVREAAVRGPARTGRSPGPSTRMWGRSREDRALAAAEGPLAPLLHRLLPSPRPGICGGAA

SEQ ID NO: 68217 - protein, 183 aa, Homo sapiens
MSNAKERKHAKKMRNQPTNVTLSSGFVADRGVKHHSGGEKPFQAQKQEPHPGTSRQRQTRVNPHSLPDPEVNEQSSSKGMFRKKGGWKAGPEGTSQEIPKYITASTFAQARAAEISAMLKAVTQKSSNSLVFQTLPRHMRRRAMSHNVKRLPRRLQEIAQKEAEKAVHQKKEHSKNKCHKARR

SEQ ID NO: 68218 - protein, 460 aa, Homo sapiens
MTETEIVTSLCPMYGSRFGYALSNGTVGVYDKTSRYWRIKSKNHAMSIHAFDLNSDGVNELITGWSNGKVDARSDRTGEVIFKDNFSSAIAGVVEGDYRMDGHIQLICCSVDGEIRGYLPGTAEMRGNLMDTSAEQDLIRELSQKKQNLLLELRNYEENAKAELASPLNEADGHRGIIPANTRLHTTLSVSLGNETQTAHTELRISTSNDTIIRAVLIFAEGIFTGESHVVHPSIHNLSSSICIPIVPPKDVPVDLHLKAFVGYRSSTQFHVFESTRQLPRFSMYALTSLDPASEPISYVNFTIAERAQRVVVWLGQNFLLPEDTHIQNAPFQVCFTSLRNGGHLHIKIKLSGEITINTDDIDLAGDIIQSMASFFAIEDLQVEADFPVYFEELRKVLVKVDEYHSVHQKLSADMADHSNLIRSLLVGAEDARLMRDMCSVVQHIFRADSSCLTETIGKQ

SEQ ID NO: 68219 - protein, 393 aa, Homo sapiens
MAQPPRLSRSGASSLWDPASPAPTSGPRPRLWEGQDVLARWTDGLLYLGTIKKVDSAREVCLVQFEDDSQFLVLWKDISPAALPGEELLCCVCRSETVVPGNRLVSCEKCRHAYHQDCHVPRAPAPGEGEGTSWVCRQCVFAIATKRGGALKKGPYARAMLGMKLSLPYGLKGLDWDAGHLSNRQQSYCYCGGPGEWNLKMLQCRSCLQWFHEACTQCLSKPLLYGDRFYEFECCVCRGGPEKVRRLQLRWVDVAHLVLYHLSVCCKKKYFDFDREILPFTSENWDSLLLGELSDTPKGERSSRLLSALNSHKDRFISGREIKKRKCLFGLHARMPPPVEPPTGDGALTSFPSGQGPGGGVSRPLGKRRRPEPEPLRRRQKGKVEELGPPSAP

SEQ ID NO: 68220 - protein, 54 aa, Homo sapiens
MKVVNLKQAILQAWKERWSDYQWAINMKKFFPKGATWDILNLADALLEQAMIGP

SEQ ID NO: 68221 - protein, 159 aa, Homo sapiens
MRCSPGGVWLALAASLLHVSLQGEFQRKLYKELVKNYNPLERPVANDSQPLTVYFSLSLLQIMDVDEKNQVLTTNIWLQMSWTDHYLQWNVSEYPGVKTVRFPDGQIWKPDILLYNSYDQQQEVLAYGMHCWSPQFGPTSSSMFPVVHWRVLWQRWLQC

SEQ ID NO: 68222 - protein, 113 aa, Homo sapiens
YIPLIVDICCKLVEERGLEYTGIYRVPGNNAAISSMQEELNKGMADIDIQDDKWRDLNVISSLLKSFFRKLPEPLFTNDKYADFIEANRKEDPLDRLKTLKRLFLSAHLKTVA

SEQ ID NO: 68223 - protein, 162 aa, Homo sapiens
MGQDGCVDTSYLIHIIEEQSCTMTQQPLRGVTSLRFNQDQSCFCCAMETGVRIYNVEPLMEKGHLDHEQVGSMGLVEMLHRSNLLALVGGGSSPKFSEISAVLIWDDAREGKDSKEKLVLEFTFTKPVLSVRMRHDKIVIVLKNRIYVYSFPDNPRKLFEFD

SEQ ID NO: 68224 - protein, 287 aa, Homo sapiens
  MOD_RES (1)..(1): Any amino acid
XTVCWLAGGWVFVFKTLALQQKAGDRLQVSTLTTRANLWLLGPFFFASSKESFSTIIGVGVGAGAYILARYALNHPDTVEGLVLINIDPNAKGWMDWAAHKLTGLTSSIPEMILGHLFSQEELSGNSELIQKYRNIITHAPNLDNIELYWNSYNNRRDLNFERGGDITLRCPVMLVVGDQAPHEDAVVECNSKLDPTQTSFLKMADSGGQPQLTQPGKLTEAFKYFLQGMGYMASSCMTRLSRSRTASLTSAASVDGNRSRSRTLSQSSESGTLSSGPPGHTMEVSC

SEQ ID NO: 68225 - protein, 129 aa, Homo sapiens
MAVSTVFSTSSLMLALSRHSLLSPLLSVTSFRRFYRGDSPTDSQKDMIEIPLPPWQERTDESIETKRARLLYESRKRGMLENCILLSLFAKEHLQHMTEKQLNLYDRLINEPSNDWDIYYWATGWSAMA

SEQ ID NO: 68226 - protein, 145 aa, Homo sapiens
MNPIRSTAPVAFISSFSSSSLHFPEPKNVKGVHGDLSPQGSRPRAPSGHLAPSPPAFDGELDLQRYSNGPAVSAGSLGMGAVSWSESRAGERRFPCPVCGKRFRFNSILALHLRAHPGAQAFQCPHCGHRAAQRALLRSHLRTHQ

SEQ ID NO: 68227 - protein, 456 aa, Homo sapiens
MSDVTIVKEGWVQKRGEYIKNWRPRYFLLKTDGSFIGYKEKPQDVDLPYPLNNFSVAKCQLMKTERPKPNTFIIRCLQWTTVIERTFHVDTPEEREEWTEAIQAVADRLQRQEEERMNCSPTSQIDNIGEEEMDASTTHHKRKTMNDFDYLKLLGKGTFGKVILVREKASGKYYAMKILKKEVIIAKDEVAHTLTESRVLKNTRHPFLTLFFHLSRERVFSEDRTRFYGAEIVSALDYLHSGKIVYRDLKLENLMLDKDGHIKITDFGLCKEGITDAATMKTFCGTPEYLAPEVLEDNDYGRAVDWWGLGVVMYEMMCGRLPFYNQDHEKLFELILMEDIKFPRTLSSDAKSLLSGLLIKDPNKRLGGGPDDAKEIMRHSFFSGVNWQDVYDKKLVPPFKPQVTSETDTRYFDEEFTAQTITITPPEKYDEDGMDCMDNERRPHFPQFSYSASGRE

SEQ ID NO: 68228 - protein, 299 aa, Homo sapiens
METESGNQEKVMEEESTEKKKEVEKKKRSRVKQVLADIAKQVDFWFGDANLHKDRFLREQIEKSRDGYVDISLLVSFNKMKKLTTDGKLIARALRSSAVVELDLEGTRIRRKKPLGERPKDEDERTVYVELLPKNVNHSWIERVFGKCGNVVYISIPHYKSTGDPKGFAFVEFETKEQAAKAIEFLNNPPEEAPRKPGIFPKTVKNKPIPALRVVEEKKKKKKKKGRMKKEDNIQAKEENMDTSNTSISKMKRSRPTSEGSDIESTEPQKQCSKKKKKRDRVEASSLPEVRTGKRKRSS

SEQ ID NO: 68229 - protein, 78 aa, Homo sapiens
SSSSSSSVHEPKMDALIIPVTMEVPCDSRGQRMWWAFLASSMVTFFGGLFIILLWRTLKYLWTVCCHCGGKTKSGTYI

SEQ ID NO: 68230 - protein, 134 aa, Homo sapiens
MATLVELPDSVLLEIFSYLPVRDRIRISRVCHRWKRLVDDRWLWRHVDLTLYTVRAAGRAGLGRGRGARTPKTTSPTLGLCVGARAGDLEPGDPGPISASSLTSSSSTSGPQFPHPCNGDKGQYLPHGAIMGLH

SEQ ID NO: 68231 - protein, 174 aa, Homo sapiens
DAEMEFNCEMKWKGKDLFDLVCRTLGLRETWFFGLQYTIKDTVAWLKMDKKVLDHDVSKEEPVTFHFLAKFYPENAEEELVQEITQHLFFLQVKKQILDEKIYCPPEASVLLASYAVQAKYGDYDPSVHKRGFLAQEELLPKRMQLSIIDSQRGGWSRVYSAWGIELFAVARGG

SEQ ID NO: 68232 - protein, 226 aa, Homo sapiens
MDPLFQQTHKQVHEIQSCMGRLETADKQSVHIVENEIQASIDQIFSRLERLEILSSKEPPNKRQNARLRVDQLKYDVQHLQTALRNFQHRRHAREQQERQREELLSRTFTTNDSDTTIPMDESLQFNSSLQKVHNGMDDLILDGHNILDGLRTQRLTLKGTQKKILDIANMLGLSNTVMRLIEKRAFQDKYFMIDKEHMFLTRECALFPTHSHHWRSLSFGEVGTG

SEQ ID NO: 68233 - protein, 577 aa, Homo sapiens
MDGEATVKPGEQKEVVRRGREVDYSRLIAGTLPQSHVTSRRAGWKMPLFLILCLLQGSSFALPQKRPHPRWLWEGSLPSRTHLRAMGTLRPSSPLCWREESSFAAPNSLKGSRLVSGEPGGAVTIQCHYAPSSVNRHQRKYWCRLGPPRWICQTIVSTNQYTHHRYRDRVALTDFPQRGLFVVRLSQLSPDDIGCYLCGIGSENNMLFLSMNLTISAGPASTLPTATPAAGELTMRSYGTASPVANRWTPGTTQTLGQGTAWDTVASTPGTSKTTASAEGRRTPGATRPAAPGTGSWAEGSVKAPAPIPESPPSKSRSMSNTTEGVWEGTRSSVTNRARASKDRREMTTTKADRPREDIEGVRIALDAAKKVLGTIGPPALVSETLAWEILPQATPVSKQQSQGSIGETTPAAGMWTLGTPAADVWILGTPAADVWTSMEAASGEGSAAGDLDAATGDRGPQATLSQTPAVGPWGPPGKESSVKRTFPEDESSSRTLAPVSTMLALFMLMALVLLQRKLWRRRTSQEAERVTLIQMTHFLEVNPQADQLPHVERKMLQDDSLPAGASLTAPERNPGP

SEQ ID NO: 68234 - protein, 158 aa, Homo sapiens
MIWRSRAGAELFSLMALWEWIALSLHCWVLAVAAVSDQHATSPFDWLLSDKGPFHRSQEYTDFVDRSRQGFSTRYKIYREFGRWKVNNLAVERRNFLGSPLPLAPEFFRNIRLLGRRPTLQQITENLIKKYGTHFLLSATLGGEESLTIFVDKRKLSK

SEQ ID NO: 68235 - protein, 127 aa, Homo sapiens
MSRPKTQNQVTHTQVKNTRRKPITVLKRKKMRTTCQSKILIRISIEKWGLVTMKKKKAVGRNKRVKRETELRTEVVADLERGMAIIVIVINQNTKQIFMKEKGVKRETEAEVQRSPKIKKNLSIDER

SEQ ID NO: 68236 - protein, 95 aa, Homo sapiens
MRFRYKCEGRSAGSIPGERSTDTTKTHPTIKINGYTGPGTVRISLVTKDPPHRPHPHELVGKDCRDGFYEAELCPDRCIHSFQNLGIQCVKKRDL

SEQ ID NO: 68237 - protein, 1166 aa, Homo sapiens
MSLKPQQQQQQQQQQQQQQQQQQQQQQQPPPAAANVRKPGGSGLLASPAAAPSPSSSSVSSSSATAPSSVVAATSGGGRPGLGRGRNSNKGLPQSTISFDGIYANMRMVHILTSVVGSKCEVQVKNGGIYEGVFKTYSPKCDLVLDAAHEKSTESSSGPKREEIMESILFKCSDFVVVQFKDMDSSYAKRDAFTDSAISAKVNGEHKEKDLEPWDAGELTANEELEALENDVSNGWDPNDMFRYNEENYGVVSTYDSSLSSYTVPLERDNSEEFLKREARANQLAEEIESSAQYKARVALENDDRSEEEKYTAVQRNSSEREGHSINTRENKYIPPGQRNREVISWGSGRQNSPRMGQPGSGSMPSRSTSHTSDFNPNSGSDQRVVNGGVPWPSPCPSPSSRPPSRYQSGPNSLPPRAATPTRPPSRPPSRPSRPPSHPSAHGSPAPVSTMPKRMSSEGPPRMSPKAQRHPRNHRVSAGRGSISSGLEFVSHNPPSEAATPPVARTSPSGGTWSSVVSGVPRLSPKTHRPRSPRQNSIGNTPSGPVLASPQAGIIPTEAVAMPIPAASPTPASPASNRAVTPSSEAKDSRLQDQRQNSPAGNKENIKPNETSPSFSKAENKGISPVVSEHRKQIDDLKKFKNDFRLQPSSTSESMDQLLNKNREGEKSRDLIKDKIEPSAKDSFIENSSSNCTSGSSKPNSPSISPSILSNTEHKRGPEVTSQGVQTSSPACKQEKDDKEEKKDAAEQVRKSTLNPNAKEFNPRSFSQPKPSTTPTSPRPQAQPSPSMVGHQQPTPVYTQPVCFAPNMMYPVPVSPGVQPLYPIPMTPMPVNQAKTYRAGKVKYLELELLRYVPNMPQQRQDQHHQSAMMHPASAAGPPIAATPPAYSTQYVAYSPQQFPNQPLVQHVPHYQSQHPHVYSPVIQGNARMMAPPTHAQPGLVSSSATQYGAHEQTHAMYACPKLPYNKETSPSFYFAISTGSLAQQYAHPNATLHPHTPHPQPSATPTGQQQSQHGGSHPAPSPVQHHQHQAAQALHLASPQQQSAIYHAGLAPTPPSMTPASNTQSPQNSFPAAQQTVFTIHPSHVQPAYTNPPHMAHVPQAHVQSGMVPSHPTAHAPMMLMTTQPPGGPQAALAQSALQPIPVSTTAHFPYMTHPSVQAHHQQQL

SEQ ID NO: 68238 - protein, 2173 aa, Homo sapiens
MVNENTRMYIPEENHQGSNYGSPRPAHANMNANAAAGLAPEHIPTPGAALSWQAAIDAARQAKLMGSAGNATISTVSSTQRKRQQYGKPKKQGSTTATRPPRALLCLTLKNPIRRACISIVEWKPFEIIILLTIFANCVALAIYIPFPEDDSNATNSNLERVEYLFLIIFTVEAFLKVIAYGLLFHPNAYLRNGWNLLDFIIVVVGLFSAILEQATKADGANALGGKGAGFDVKALRAFRVLRPLRLVSGVPSLQVVLNSIIKAMVPLLHIALLVLFVIIIYAIIGLELFMGKMHKTCYNQEGIADVPAEDDPSPCALETGHGRQCQNGTVCKPGWDGPKHGITNFDNFAFAMLTVFQCITMEGWTDVLYWMQDAMGYELPWVYFVSLVIFGSFFVLNLVLGVLSGEFSKEREKAKARGDFQKLREKQQLEEDLKGYLDWITQAEDIDPENEDEGMDEEKPRNMSMPTSETESVNTENVAGGDIEGENCGARLAHRISKSKFSRYWRRWNRFCRRKCRAAVKSNVFYWLVIFLVFLNTLTIASEHYNQPNWLTEVQDTANKALLALFTAEMLLKMYSLGLQAYFVSLFNRFDCFVVCGGILETILVETKIMSPLGISVLRCVRLLRIFKITRYWNSLSNLVASLLNSVRSIASLLLLLFLFIIIFSLLGMQLFGGKFNFDEMQTRRSTFDNFPQSLLTVFQILTGEDWNSVMYDGIMAYGGPSFPGMLVCIYFIILFICGNYILLNVFLAIAVDNLADAESLTSAQKEEEEEKERKKLARTASPEKKQELVEKPAVGESKEEKIELKSITADGESPPATKINMDDLQPNENEDKSPYPNPETTGEEDEEEPEMPVGPRPRPLSELHLKEKAVPMPEASAFFIFSSNNRFRLQCHRIVNDTIFTNLILFFILLSSISLAAEDPVQHTSFRNHILFYFDIVFTTIFTIEIALKMTAYGAFLHKGSFCRNYFNILDLLVVSVSLISFGIQSSAINVVKILRVLRVLRPLRAINRAKGLKHVVQCVFVAIRTIGNIVIVTTLLQFMFACIGVQLFKGKLYTCSDSSKQTEAECKGNYITYKDGEVDHPIIQPRSWENSKFDFDNVLAAMMALFTVSTFEGWPELLYRSIDSHTEDKGPIYNYRVEISIFFIIYIIIIAFFMMNIFVGFVIVTFQEQGEQEYKNCELDKNQRQCVEYALKARPLRRYIPKNQHQYKVWYVVNSTYFEYLMFVLILLNTICLAMQHYGQSCLFKIAMNILNMLFTGLFTVEMILKLIAFKPKGYFSDPWNVFDFLIVIGSIIDVILSETNPAEHTQCSPSMNAEENSRISITFFRLFRVMRLVKLLSRGEGIRTLLWTFIKSFQALPYVALLIVMLFFIYAVIGMQVFGKIALNDTTEINRNNNFQTFPQAVLLLFRCATGEAWQDIMLACMPGKKCAPESEPSNSTEGETPCGSSFAVFYFISFYMLCAFLIINLFVAVIMDNFDYLTRDWSILGPHHLDEFKRIWAEYDPEAKGRIKHLDVVTLLRRIQPPLGFGKLCPHRVACKRLVSMNMPLNSDGTVMFNATLFALVRTALRIKTEGNLEQANEELRAIIKKIWKRTSMKLLDQVVPPAGDDEVTVGKFYATFLIQEYFRKFKKRKEQGLVGKPSQRNALSLQAGLRTLHDIGPEIRRAISGDLTAEEELDKAMKEAVSAASEDDIFRRAGGLFGNHVSYYQSDGRSAFPQTFTTQRPLHINKAGSSQGDTESPSHEKLVDSTFTPSSYSSTGSNANINNANNTALGRLPRPAGYPSTVSTVEGHGPPLSPAIRVQEVAWKLSSNRERHVPMCEDLELRRDSGSAGTQAHCLLLRRANPSRCHSRESQAAMAGQEETSQDETYEVKMNHDTEACSEPSLLSTEMLSYQDDENRQLTLPEEDKRDIRQSPKRGFLRSASLGRRASFHLECLKRQKDRGGDISQKTVLPLHLVHHQALAVAGLSPLLQRSHSPASFPRPFATPPATPGSRGWPPQPVPTLRLEGVESSEKLNSSFPSIHCGSWAETTPGGGGSSAARRVRPVSLMVPSQAGAPGRQFHGSASSLVEAVLISEGLGQFAQDPKFIEVTTQELADACDMTIEEMESAADNILSGGAPQSPNGALLPFVNCRDAGQDRAGGEEDAGCVRARGRPSEEELQDSRVYVSSL

SEQ ID NO: 68239 - protein, 136 aa, Homo sapiens
MFSTYFMEKWAPRQDDMLFYVRRKLAYSGSESGADGRKAAEPEVEVEVYRRDSKKLPGLGDPDIDWEESVCLNLILQKLDYMVTCAVCTRADGGDIHIHKKKSQQVFASPSKHPMDSKGEESKISYPNIFFMIDSF

SEQ ID NO: 68240 - protein, 339 aa, Homo sapiens
MVLADLGRKITSALRSLSNATIINEEVLNAMLKEVCTALLEADVNIKLVKQLRENVKSAIDLEEMASGLNKRKMIQHAVFKELVKLVDPGVKAWTPTKGKQNVIMFVGLQGSGKTTTCSKLAYYYQRKGWKTCLICADTFRAGAFDQLKQNATKARIPFYGSYTEMDPVIIASEGVEKFKNENFEIIIVDTSGRHKQEDSLFEEMLQVANAIQPDNIVYVMDASIGQACEAQAKAFKDKVDVASVIVTKLDGHAKGGGALSAVAATKSPIIFIGTGEHIDDFEPFKTQPFISKLLGMGDIEGLIDKVNELKLDDNEALIEKLKHGDDPWFWDRFYEQRK

SEQ ID NO: 68241 - protein, 160 aa, Homo sapiens
MTLTLSVLICLGLSVGPRTCVQAGTLPKPTLWAEPASVIARGKPVTLWCQGPLETEEYRLDKEGLPWARKRQNPLEPGAKAKFHIPSTVYDSAGRYRCYYETPAGWSEPSDPLELVATGFYAEPTLLALPSPVVASGGNVTLQCDTLDGLLTFVLVEEEQ

SEQ ID NO: 68242 - protein, 76 aa, Homo sapiens
MGLKMSCLKGFQMCVSSSSSSHDEAPVLNDKHLDVPDIIITPPTPTGMMLPRDLGSTGWTNQDANPRQLWNTNICQ

SEQ ID NO: 68243 - protein, 2168 aa, Homo sapiens
MLRAFVQPGTPAYQPLPSHLSANTEVKFKGTLVHEAQLNYFYISPGGSNYGSPRPAHANMNANAAAGLAPEHIPTPGAALSWQAAIDAARQAKLMGSAGNATISTVSSTQRKRQQYGKPKKQGSTTATRPPRALLCLTLKNPIRRACISIVEWKPFEIIILLTIFANCVALAIYIPFPEDDSNATNSNLERVEYLFLIIFTVEAFLKVIAYGLLFHPNAYLRNGWNLLDFIIVVVGLFSAILEQATKADGANALGGKGAGFDVKALRAFRVLRPLRLVSGVPSLQVVLNSIIKAMVPLLHIALLVLFVIIIYAIIGLELFMGKMHKTCYNQEGIADVPAEDDPSPCALETGHGRQCQNGTVCKPGWDGPKHGITNFDNFAFAMLTVFQCITMEGWTDVLYWMQDAMGYELPWVYFVSLVIFGSFFVLNLVLGVLSGEFSKEREKAKARGDFQKLREKQQLEEDLKGYLDWITQAEDIDPENEDEGMDEEKPRNMSMPTSETESVNTENVAGGDIEGENCGARLAHRISKSKFSRYWRRWNRFCRRKCRAAVKSNVFYWLVIFLVFLNTLTIASEHYNQPNWLTEVQDTANKALLALFTAEMLLKMYSLGLQAYFVSLFNRFDCFVVCGGILETILVETKIMSPLGISVLRCVRLLRIFKITRYWNSLSNLVASLLNSVRSIASLLLLLFLFIIIFSLLGMQLFGGKFNFDEMQTRRSTFDNFPQSLLTVFQILTGEDWNSVMYDGIMAYGGPSFPGMLVCIYFIILFICGNYILLNVFLAIAVDNLADAESLTSAQKEEEEEKERKKLARTASPEKKQELVEKPAVGESKEEKIELKSITADGESPPATKINMDDLQPNENEDKSPYPNPETTGEEDEEEPEMPVGPRPRPLSELHLKEKAVPMPEASAFFIFSSNNRFRLQCHRIVNDTIFTNLILFFILLSSISLAAEDPVQHTSFRNHILGNADYVFTSIFTLEIILKMTAYGAFLHKGSFCRNYFNILDLLVVSVSLISFGIQSSAINVVKILRVLRVLRPLRAINRAKGLKHVVQCVFVAIRTIGNIVIVTTLLQFMFACIGVQLFKGKLYTCSDSSKQTEAECKGNYITYKDGEVDHPIIQPRSWENSKFDFDNVLAAMMALFTVSTFEGWPELLYRSIDSHTEDKGPIYNYRVEISIFFIIYIIIIAFFMMNIFVGFVIVTFQEQGEQEYKNCELDKNQRQCVEYALKARPLRRYIPKNQHQYKVWYVVNSTYFEYLMFVLILLNTICLAMQHYGQSCLFKIAMNILNMLFTGLFTVEMILKLIAFKPKGYFSDPWNVFDFLIVIGSIIDVILSETNPAEHTQCSPSMNAEENSRISITFFRLFRVMRLVKLLSRGEGIRTLLWTFIKSFQALPYVALLIVMLFFIYAVIGMQVFGKIALNDTTEINRNNNFQTFPQAVLLLFRCATGEAWQDIMLACMPGKKCAPESEPSNSTEGETPCGSSFAVFYFISFYMLCAFLIINLFVAVIMDNFDYLTRDWSILGPHHLDEFKRIWAEYDPEAKGRIKHLDVVTLLRRIQPPLGFGKLCPHRVACKRLVSMNMPLNSDGTVMFNATLFALVRTALRIKTEGNLEQANEELRAIIKKIWKRTSMKLLDQVVPPAGDDEVTVGKFYATFLIQEYFRKFKKRKEQGLVGKPSQRNALSLQAGLRTLHDIGPEIRRAISGDLTAEEELDKAMKEAVSAASEDDIFRRAGGLFGNHVSYYQSDGRSAFPQTFTTQRPLHINKAGSSQGDTESPSHEKLVDSTFTPSSYSSTGSNANINNANNTALGRLPRPAGYPSTVSTVEGHGPPLSPAIRVQEVAWKLSSNRCHSRESQAAMAGQEETSQDETYEVKMNHDTEACSEPSLLSTEMLSYQDDENRQLTLPEEDKRDIRQSPKRGFLRSASLGRRASFHLECLKRQKDRGGDISQKTVLPLHLVHHQALAVAGLSPLLQRSHSPASFPRPFATPPATPGSRGWPPQPVPTLRLEGVESSEKLNSSFPSIHCGSWAETTPGGGGSSAARRVRPVSLMVPSQAGAPGRQFHGSASSLVEAVLISEGLGQFAQDPKFIEVTTQELADACDMTIEEMESAADNILSGGAPQSPNGALLPFVNCRDAGQDRAGGEEDAGCVRARGRPSEEELQDSRVYVSSL

SEQ ID NO: 68244 - protein, 48 aa, Homo sapiens
MFQGQRGWFCGSVSQDLRQFWGRKLSGSSGLGGEGSILLSLMLWVQGA

SEQ ID NO: 68245 - protein, 553 aa, Homo sapiens
MGELCRRDSALTALDEETLWEMMESHRHRIVRCICPSRLTPYLRQAKVLCQLDEEEVLHSPRLTNSAMRAGHLLDLLKTRGKNGAIAFLESLKFHNPDVYTLVTGLQPDVDFSNFSGLMETSKLTECLAGAIGSLQEELNQEKGQKEVLLRRCQQLQEHLGLAETRAEGLHQLEADHSRMKREVSAHFHEVLRLKDEMLSLSLHYSNALQEKELAASRCRSLQEELYLLKQELQRANMVSSCELELQEQSLRTASDQESGDEELNRLKEENEKLRSLTFSLAEKDILEQSLDEARGSRQELVERIHSLRERAVAAERQREQYWEEKEQTLLQFQKSKMACQLYREKVNALQAQVCELQKERDQAYSARDSAQREISQSLVEKDSLRRQVFELTDQVCELRTQLRQLQAEPPGVLKQEARTREPCPREKQRLVRMHAICPRDDSDCSLVSSTESQLLSDLSATSSRELVDSFRSSSPAPPSQQSLYKRVAEDFGEEPWSFSSCLEIPEGDPGALPGAKAGDPHLDYELLDTADLPQLESSLQPVSPGRLDVSER

SEQ ID NO: 68246 - protein, 511 aa, Homo sapiens
MANPKEKTAMCLVNELARFNRVQPQYKLLNERGPAHSKMFSVQLSLGEQTWESEGSSIKKAQQAVANKALTESTLPKPVQKPPKSNVNNNPGSITPTVELNGLAMKRGEPAIYRPLDPKPFPNYRANYNFRGMYNQRYHCPVPKIFYVQLTVGNNEFFGEGKTRQAARHNAAMKALQALQNEPIPERSPQNGESGKDVDDDKDANKSEISLVFEIALKRNMPVSFEVIKESGPPHMKSFVTRVSVGEFSAEGEGNSKKLSKKRAATTVLQELKKLPPLPVVEKPKLFFKKRPKTIVKAGPEYGQGMNPISRLAQIQQAKKEKEPDYVLLSERGMPRRREFVMQVKVGNEVATGTGPNKKIAKKNAAEAMLLQLGYKASTNLQDQLEKTGENKGWSGPKPGFPEPTNNTPKGILHLSPDVYQEMEASRHKVISGTTLGYLSPKDMNQPSSSFFSISPTSNSSATIARELLMNGTSSTAEAIGLKGSSPTPPCSPVQPSKQLEYLARIQGFQV

SEQ ID NO: 68247 - protein, 880 aa, Homo sapiens
MADDDVLFEDVYELCEVIGKGPFSVVRRCINRETGQQFAVKIVDVAKFTSSPGLSTEDLKREASICHMLKHPHIVELLETYSSDGMLYMVFEFMDGADLCFEIVKRADAGFVYSEAVASHYMRQILEALRYCHDNNIIHRDVKPHCVLLASKENSAPVKLGGFGVAIQLGESGLVAGGRVGTPHFMAPEVVKREPYGKPVDVWGCGVILFILLSGCLPFYGTKERLFEGIIKGKYKMNPRQWSHISESAKDLVRRMLMLDPAERITVYEALNHPWLKERDRYAYKIHLPETVEQLRKFNARRKLKGAVLAAVSSHKFNSFYGDPPEELPDFSEDPTSSGAVSQVLDSLEEIHALTDCSEKDLDFLHSVFQDQHLHTLLDLYDKINTKSSPQIRNPPSDAVQRAKEVLEEISCYPENNDAKELKRILTQPHFMALLQTHDVVAHEVYSDEALRVTPPPTSPYLNGDSPESANGDMDMENVTRVRLVQFQKNTDEPMGITLKMNELNHCIVARIMHGGMIHRQGTLHVGDEIREINGISVANQTVEQLQKMLREMRGSITFKIVPSYRTQSSSCEIYVRAQFEYDPAKDDLIPCKEAGIRFRVGDIIQIISKDDHNWWQGKLENSKNGTAGLIPSPELQEWRVACIAMEKTKQEQQASCTWFGKKKKQYKDKYLAKHNADLVTYEEVVKLPAFKRKTLVLLGAHGVGRRHIKNTLITKHPDRFAYPIPHTTRPPKKDEENGKNYYFVSHDQMMQDISNNEYLEYGSHEDAMYGTKLETIRKIHEQGLIAILDVEPQALKVLRTAEFAPFVVFIAAPTITPGLNEDESLQRLQKESDILQRTYAHYFDLTIINNEIDETIRHLEEAVELVCTAPQWVPVSWVY

SEQ ID NO: 68248 - protein, 192 aa, Homo sapiens
MVAAGICRSDEHVVSGNLVTPLPVILGHEAAGIVESVGEGVTTVKPGDKVIPLFTPQCGKCRICKNPESNYCLKNDLGNPRGTLQDGTRRFTCSGKPIHHFVGVSTFSQYTVVDENAVAKIDAASPLEKVCLIGCGFSTGYGSAVKVAKVTPGSTCAVFGLGGVGLSVVMGCKAAGAARIIAVDINKDKFAK

SEQ ID NO: 68249 - protein, 134 aa, Homo sapiens
MAEAHQAVAFQFTVTPDGIDLRLSHEALRQIYLSGLHSWKKKFIRFKNGIITGVYPASPSSWLIVVVGVMTTMYAKIDPSLGIIAKINRTLETANCMSSQTKNVVSGVLFGTGLWVALIVTMRYSLKVLLSYHG

SEQ ID NO: 68250 - protein, 119 aa, Homo sapiens
MSHQTGIQGNSARRDSQGRGFRESRESREGCRTGRAGVGPGAPEVGLAGRAGPRRLSALLLPGRCRPASSSSPVPAAVTLQIDPKFGGAKEIGFRGGLVEGGVPSTVPDSRPTFPLLVT

SEQ ID NO: 68251 - protein, 154 aa, Homo sapiens
MESAGLEQLLRELLLPDTERIRRATEQLQIVLRAPAALPALCDLLASAADPQTTEHPLATAGGGATGEPQVPDPDGPAERNRALCEPQPGPALSHHFSKGRLGGLATAFAAASAQYPQPPQPRERDGAFAAKCGGDLPARGLPTPPPGASSASE

SEQ ID NO: 68252 - protein, 72 aa, Homo sapiens
MEVAVPVKQEAEGLALDSPWHRFRRFHLGDAPGPREALGLLRALCRDWLRPEVHTKEQMLELLVLEQFLSAL

SEQ ID NO: 68253 - protein, 117 aa, Homo sapiens
MFVLDEADEMLSRGFKDQIYDIFQKLNSNTQVVLLSATMPSDVLEVTKKFMRDPIRILVKKEELTLEGIRQFYINVEREEWKLDTLCDLYETLTITQAVIFINTRRKVDWLTEKMHA

SEQ ID NO: 68254 - protein, 51 aa, Homo sapiens
  MOD_RES (1)..(1): Any amino acid
XMTDSSHIPVSDMVMYGYSSSRPQRWLKASLPSWRSRSGYGWSRGWGGCTA

SEQ ID NO: 68255 - protein, 78 aa, Homo sapiens
MVAKQRIRMANEKHSKNITQRGNVAKTSRNAPEEKASVGPWLLALFIFVVCGSGKWLGGSHQVESWVERIWDDVVTGQ

SEQ ID NO: 68256 - protein, 19 aa, Homo sapiens
LYVFTIATEPLRIIFLIAG

SEQ ID NO: 68257 - protein, 71 aa, Homo sapiens
MFPLISSHHLWWGGLRRTVCLNLPVLTLQHFQHMHIKVGDRAELRRAFTQTDVATFSELTGDVNPLHLNED

SEQ ID NO: 68258 - protein, 623 aa, Homo sapiens
MAAAGLVAVAAAAEYSGTVASGGNLPGVHCGPSSGAGPGFGPGSWSRSLDRALEEAAVTGVLSLSGRKLREFPRGAANHDLTDTTRAELAELPLIRLDFSCNKITTIPVCYRNLRHLQTITLDNNPLQSPPAQICIKGKVHIFKYLNIQACKIAPDLPDYDRRPLGFGSCHEELYSSRPYGALDSGFNSVDSGDKRWSGNEPTDEFSDLPLRVAEITKEQRLRRESQYQENRGSLVVTNGGVEHDLDQIDYIDSCTAEEEEAEGSPVKPVAIREFQKTEDMRRYLHQNRVPAEPSSLLSLSASHNQLSHTDLELHQRREQLVERTRREAQLAALQYEEEKIRTKQIQRDAVLDFVKQKASQSPQKQHPLLDGVDGECPFPSRRSQHTDDSALCMSLSGLNQVGCAATLPHSSAFTPLKSDDRPNALLSSPATETVHHSPAYSFPAAIQRNQPQRPESFLFRAGVRAETNKGHASPLPPSAAPTTDSTDSITGQNSRQREEELELIDQLRKHIEYRLKVSLPCDLGAALTDGVVLCHLANHVRPRSVPSIHVPSPAVPKLTMAKCRRNVENFLEACRKIGVPQEQLCLPLHILEEKGLSQVAVTVQALLELAPPKQQQHQLSAV

SEQ ID NO: 68259 - protein, 155 aa, Homo sapiens
MQISQVPRSKALEVTKLAIEAGFRHIDSAHLYNNEEQVGLAIRSKIADGSVKREDIFYTSKLWSTFHRPELVRPALENSLKKAQLDYVDLYLIHSPMSLKPGEELSPTDENGKVIFDIVDLCTTWEAMEKCKDAGLAKSIGVSNFNRRQLEMILN

SEQ ID NO: 68260 - protein, 85 aa, Homo sapiens
MDASERGRLLDKLADLVERDRAVLATMESLNGGKPFLQAFYVDLQGVIKTFRYYAGWADKIHGMTIPVDGDYFTFTRHEPIGVCG

SEQ ID NO: 68261 - protein, 89 aa, Homo sapiens
MNKPITPSTYVRCLNVGLIRKLSDFIDPQEGWKKLAVAIKKPSGDDRYNQFHIRRFEALLQTGKSPTSELLFDWGTTNCTVGDLVDLLI

SEQ ID NO: 68262 - protein, 135 aa, Homo sapiens
MFSPPVSSGKNGPTSLASGHFTGSNVEDRSSSGSWGNGGHPSPSRNYGDGTPYDHMTSRDLGSHDNLSPPFVNSRIQSKTERGSYSSYGRESNLQGCHQQSLLGGDMDMGNPGTLSPTKPGSQYYQYSSNNPRRR

SEQ ID NO: 68263 - protein, 186 aa, Homo sapiens
MASADELTFHEFEEATNLLADTPDAATTSRSDQLTPQGHVAVAVGSGGSYGAEDEVEEESDKAAVLDRIKGSLLPRPGHNFVRHHLRNRPDLYGPFWICATLAFVLAVTGNLTLVLAQRRDPSIHYSPQFHKVTVAGISIYCYAWLVPLALWGFLRWRKGVQERMGPYTFLETVCIYGYSLFVFIP

SEQ ID NO: 68264 - protein, 458 aa, Homo sapiens; identical to SEQ ID NO: 27970

SEQ ID NO: 68265 - protein, 123 aa, Homo sapiens
MEELTIWEQHTATLSKQLFLPLILSQDPRRGFGIAISGGRDRPGGSMVVSDVVPGGPAEGRLQTGDHIVMVNGVSMENATSAFAIQILKTCTKMANITVKRPRRIHLPATKASPSSPGRQDSD

SEQ ID NO: 68266 - protein, 177 aa, Homo sapiens
MAAGSRTSLLLAFGLLCLSWLQEGSAFPTIPLSRLFDNAMLRARRLYQLAYDTYQEFNLELLRISLLLIQSWLEPVQLLRSVFANSLVYGASDSNVYRHLKDLEEGIQTLMWRLEDGSPRTGQIFNQSYSKFDTKSHNDDALLKNYGLLYCFRKDMDKVETFLRIVQCRSVEGSCGF

SEQ ID NO: 68267 - protein, 378 aa, Homo sapiens
MGAFLDKPKTEKHNAHGAGNGLRYGLSSMQGWRVEMEDAHTAVVGIPHGLEDWSFFAVYDGHAGSRVANYCSTHLLEHITTNEDFRAAGKSGSALELSVENVKNGIRTGFLKIDEYMRNFSDLRNGMDRSGSTAVGVMISPKHIYFINCGDSRAVLYRNGQVCFSTQDHKPCNPREKERIQNAGGSVMIQRVNGSLAVSRALGDYDYKCVDGKGPTEQLVSPEPEVYEILRAEEDEFIILACDGIWDVMSNEELCEYVKSRLEVSDDLENVCNWVVDTCLHKGSRDNMSIVLVCFSNAPKVSDEAVKKDSELDKHLESRVEEIMEKSGEEGMPDLAHVMRILSAENIPNLPPGGGLAGKRNVIEAVYSRLNPHRESDG

SEQ ID NO: 68268 - protein, 57 aa, Homo sapiens
MLENLALISSLGCWCGSKDEEAPCKQRISVQRESQSRTPRAGVSPKKAHPCEMCGLI

SEQ ID NO: 68269 - protein, 184 aa, Homo sapiens
MRGQGRKESLSDSRDLDGSYDQLTDSVDDEFELSTVCHRPEGLEQLQEQTKFTRKELQVLYRGFKNECPSGIVNEENFKQIYSQFFPQGDSSTYATFLFNAFDTNHDGSVSFEEMLDIMKSIYDMMGKYTYPALREEAPREHVESFFQKMDRNKDGVVTIEEFIESCQKDENIMRSMQLFDNVI

SEQ ID NO: 68270 - protein, 180 aa, Homo sapiens
MPVPASWPHPPCPFLLLTLLLGLTGVAGEDELQVIQPEKSVSVAAGESATLRCAMTSLIPVGPIMWFRGAGAGRELIYNQKEGHFPRVTTVSELTKRNNLDFSISISNITPADAGTYYCVKFRKGSPDDVEFKSGAGTELSVREAALAPTAPLLVALLLGPKLLLVVGVSAIYICWKQKA

SEQ ID NO: 68271 - protein, 166 aa, Homo sapiens
  MOD_RES (1)..(1): Any amino acid
XVDVYQGWCGPCKPVVSLFQKMRIEVGLDLLHFALAEADRLDVLEKYRGKCEPTFLFYAIKDEALSDEDECVSHGKNNGEDEDMVSSERTCTLAIIKPDAVAHGKTDEIIMKIQEAGFEILTNEERTMTEAEVRLFYQHKAGESPSSVRHRNALQCRPWKPGQRRC

SEQ ID NO: 68272 - protein, 133 aa, Homo sapiens
MRKYPNPMNPSVLGVDVLQRRVDGRGRLHSLRLLSTEWGLPSLVRAILGTSRTLTYIREHSVVDPVEKKMELCSTNITLTNLVSVNERLVYTPHPENPEMTVLTQEAIITVKGISLGSYLESLMANTISSNAK

SEQ ID NO: 68273 - protein, 177 aa, Homo sapiens
MRGGGQAHLNPFNKQSGPRQHEQGPGEEVPDVTPEEALPELPPGEPEFRCPERVMDLGLSEDHFSRPVGLFLASDVQQLRQAIEECKQVILELPEQSEKQKDAVVRLIHLRLKLQELKDPNEDEPNIRVLLEHRFYKEKSKSVKQTCDKCNTIIWGLIQTWYTCTGCYYRCHSKCLN

SEQ ID NO: 68274 - protein, 48 aa, Homo sapiens
MYDNLYLHGIEDSEALTKQLGVGRISKTEIGLLSDPNGFSGFLHKQAV

SEQ ID NO: 68275 - protein, 20 aa, Homo sapiens
VEEFPFDSEGPTEPTSTFSI

SEQ ID NO: 68276 - protein, 131 aa, Homo sapiens
MALRGVSVRLLSRGPGLHVLRTWVSSAAQTEKGGRTQSQLAKSSRPEFDWQDPLVLEEQLTTDEILIRDTFRTYCQERLMPRILLANRNEVFHREIISEMGELGVLGPTIKGSSDSPASTPLVAGITGYGC

SEQ ID NO: 68277 - protein, 168 aa, Homo sapiens
MQKSEGSGGTQLKNRATGNYDQRTSSSTQLKHRNAVQGSKSSLSTSSPESARKLHPRPSDKLNPKTINPGLRETKHPYTFVSKEGFRELLLVKGAPEKAIPLLPRLIPVLKAALVHSDDEVFERGLNALVQLSVVVGPSLNDHLKHLLTSGSLSIIKSKIPTYCSICC

SEQ ID NO: 68278 - protein, 243 aa, Homo sapiens
MWRVCARRAQNVAPWAGLEARWTALQEVPGTPRVTSRSGPAPARRNSVTTGYGGVRALCGWTPSSGATPRNRLLLQLLGSPGRRYYSLPPHQKVPLPSLSPTMQAGTIARWEKKEGDKINEGDLIAEVETDKATVGFESLEECYMAKILVAEGTRDVPIGAIICITVGKPEDIEAFKNYTLDSSAAPTPQAAPAPTPAATASPPTPSAQAPGSSYPPHMQVLKYRKKVIWQKSWSLKAQEMSL

SEQ ID NO: 68279 - protein, 119 aa, Homo sapiens
  MOD_RES (1)..(1): Any amino acid
XQAGSSRPWQEVLKDMVGLDALDAQPLLKYFQPVTQWLQEQNQQNGEVLGWPEYQWHPPLPDNYPEGIGDSHPWDKQPGNNQQPDNHPPGDGPPDISPEPKWDHAGEGQGARGGRGGAG

SEQ ID NO: 68280 - protein, 124 aa, Homo sapiens
MDFSRNLYDIGEQLDSEDLASLKFLSLDYIPQRKQEPIKDALMLFQRLQEKRMLEESNLSFLKELLFRINRLDLLITYLNTRKEEMERELQTPGRAQISAYRVMLYQISEEVSRSELRSFKFLL

SEQ ID NO: 68281 - protein, 197 aa, Homo sapiens
MWFMYLLSWLSLFIQVAFITLAVAAGLYYLAELIEEYTVATSRIIKYMIWFSTAVLIGLYVFERFPTSMIGVGLFTNLVYFGLLQTFPFIMLTSPNFILSCGLVVVNHYLAFQFFAEEYYPFSEVLAYFTFCLWIIPFAFFVSLSAGENVLPSTMQPGGLGLGRSTGHGDSCTDFYKDPPSVTTIWKTPGLEDSQRR

SEQ ID NO: 68282 - protein, 163 aa, Homo sapiens
MTESASSTSGQEFDVFSVMDWKDGVGTLPGSDLKFRVNEFGALEVITDENEMENVKKATATTTWMVPTAQEAYTGDLAKSLPLFFSSTPMVVTNTYMLMTPKSTSPAPTSPPSSRPVFPPAYWTSPPGCPTVFSEKTGMPFRLKDPVKVEGLQFCENCCQYGN

SEQ ID NO: 68283 - protein, 124 aa, Homo sapiens
MSVACVLKRKAVLWQDSFSPHLKHHPQEPANPNMPVVLTSGTGSQAQPQPAANQALAAGTHSSPVPGSIGVAGRSQDDAMVDYFFQRQHGEQLGGGGSGGGGYNNSKHRWPTGDNIHAEHQEVL

SEQ ID NO: 68284 - protein, 151 aa, Homo sapiens
TTALCAARTASCTSHCATQGALQPRRRMWTARRCVRDPQRSFALGIQWIVVRILGGIPGPIAFGWVIDKACLLWQDQCGQQGSCLVYQNSAMSRYILIMGLLYKVLGVLFFAIACFLYKPLSESSDGLETCLPSQSSAPDSATDSQLQSSV

SEQ ID NO: 68285 - protein, 93 aa, Homo sapiens
MSGCGLFLRTTAAARACRGLVVSTANRRLLRTSPPVRAFAKELFLGKIKKKLAKMNLMKSISSWDPWKNSSLKRWTPEKLTRKGKSQMKLWRN

SEQ ID NO: 68286 - protein, 176 aa, Homo sapiens
MQMPQGNPLLLSHTLQELLARDTVQVELIPEKKGLFLKHVEYEVSSQRFKSSVYRRYNDFVVFQEMLLHKFPYRMVPALPPKRMLGADREFIEARRRALKRFVNLVARHPLFSEDVVLKLFLSFSGSDVQNKLKESAQCVGDEFLNCKLATRAKDFLPADIQAQFAISRELIRNIY

SEQ ID NO: 68287 - protein, 92 aa, Homo sapiens
MAENGKNCDQRRVAMNKEHHNGNFTDPSSVNEKKRREREERQNIVLWRQPLITLQYFSLEILVILKEWTSKLWHRQSIVVSFLLLLAVLIAT

SEQ ID NO: 68288 - protein, 132 aa, Homo sapiens
MGPEALSSLLLLLLVASGDADMKGHFDPAKCRYALGMQDRTIPDSDISASSSWSDSTAARHSRLESSDGDGAWCPAGSVFPKEEEYLQVDLQRLHLVALVGTQGRHAGGLGKEFSRSYRLRYSRDGRRWMGW

SEQ ID NO: 68289 - protein, 1042 aa, Homo sapiens
MLCWGYWSLGQPGISTNLQGIVAEPQVCGFISDRSVKEVACGGNHSVFLLEDGEVYTCGLNTKGQLGHEREGNKPEQIGALADQHIIHVACGESHSLALSDRGQLFSWGAGSDGQLGLMTTEDSVAVPRLIQKLNQQTILQVSCGNWHCLALAADGQFFTWGKNSHGQLGLGKEFPSQASPQRVRSLEGIPLAQVAAGGAHSFALSLSGAVFGWGMNNAGQLGLSDEKDRESPCHVKLLRTQKVVYISCGEEHTAVLTKSGGVFTFGAGSCGQLGHDSMNDEVNPRRVLELMGSEVTQIACGRQHTLAFVPSSGLIYAFGCGARGQLGTGHTCNVKCPSPVKGYWAAHSGQLSARADRFKYHIVKQIFSGGDQTFVLCSKYENYSPAVDFRTMNQAHYTSLINDETIAVWRQKLSEHNNANTINGVVQILSSAACWNGSFLEKKIDEHFKTSPKIPGIDLNSTRVLFEKLMNSQHSMILEQILNSFESCLIPQLSSSPPDVEAMRIYLILPEFPLLQDSKYYITLTIPLAMAILRLDTNPSKVLDNWWSQVCPKYFMKLVNLYKGAVLYLLRGRKTFLIPVLFNNYITAALKLLEKLYKVNLKVKHVEYDTFYIPEISNLVDIQEDYLMWFLHQAGMDTVTLCSYPFIFDAQAKTKMLQTDAELQMQVAVNGANLQNVFMLLTLEPLLARSPFLVLHVRRNNLVGDALRELSIHSDIDLKKPLKVIFDGEEAVDAGGVTKEFFLLLLKELLNPIYGMFTYYQDSNLLWFSDTCFVEHNWFHLIGITCGLAIYNSTVVDLHFPLALYKKLLNVKPGLEDLKELSPTEGRSLQELLDYPGEDVEETFCLNFTICRESYGVIEQKKLIPGGDNVTVCKDNRQEFVDAYVNYVFQISVHEWYTAFSSGFLKVCGGKVLELFQPSELRAMMVGNSNYNWEELEETAIYKGDYSATHPTVKLFWETFHEFPLEKKKKFLLFLTGSDRIPIYGMASLQIVIQSTASGEEYLPVAHTCYNLLDLPKYSSKEILSARLTQALDNYEGFSLA

SEQ ID NO: 68290 - protein, 489 aa, Homo sapiens
MDECGSRIRRRVSLPKRNRPSLGCIFGAPTAAELVPGDEGKEEEEMVAENRRRKTAGVLPVEVQPLLLSDSPECLVLGGGDTNPDLLRHMPTDRGVGDQPNDSEVDMFGDYDSFTENSFIAQVDDLEQKYMQLPEHKKHATDFATENLCSESIKNKLSITTIGNLTELQTDKHTENQSGYEGVTIEPGADLLYDVPSSQAIYFENLQNSSNDLGDHSMKERDWKSSSHNTVNEELPHNCIEQPQQNDESSSKVRTSSDMNRRKSIKDHLKNAMTGNAKAQTPIFSRSKQLKDTLLSEEINVAKKTVESSSNDLGPFYSLPSKVRDLYAQFKGIEKLYEWQHTCLTLNSVQERKNLIYSLPTSGGKTLVAEILMLQELLCCRKDVLMILPYVAIVQEKISGLSSFGIELGFFVEEYAGSKGRFPPTKRREKKSLYIATIEKGHSLVNSLIETGRIDSLGLVVVDELHMIGEGSRGATLEMTLAKILYTSS

SEQ ID NO: 68291 - protein, 190 aa, Homo sapiens
MAAAGAPDGMEEPGMDTEAETVATEAPARPVNCLEAEAAAGAAAEDSGAARGSLQPAPAQPPGDPAAQASVSNGEDAGGGAGRELVDLKIIWNKTKHDVKFPLDSTGSELKQKIHSITGLPPAMQKVMYKGLVPEDKTLREIKVTSGAKIMVVGSTINDVLAVNTPKDAAQQDAKAEENKKEPLCRQKGP

SEQ ID NO: 68292 - protein, 142 aa, Homo sapiens
MYRTKVGLKDRQQLYKLIISQLLYDGYISIANGLINEIKPQSVCAPSEQLLHLIKLGMENDDTAVQYAIGRSDTVAPGTGIDLEFDADVQTMSPEASEYETCYVTSHKGPCRVATYSRDGQLIATGSADASIKILDTERMLA

SEQ ID NO: 68293 - protein, 57 aa, Homo sapiens
MFHGLGTYTFPNGAKYTGNFNENRVEGEGEYTDIQGLEWSGNFHFTAAPDLKLKLHM

SEQ ID NO: 68294 - protein, 289 aa, Homo sapiens
MFRAAAPGQLRRAASLLRFQSTLVIAEHANDSLAPITLNTITAATRLGGEVSCLVAGTKCDKVAQDLCKVAGIAKVLVAQHDVYKGLLPEELTPLILATQKQFNYTHICAGASAFGKNLLPRVAAKLEVAPISDIIAIKSPDTFVRTIYAGNALCTVKCDEKVKVFSVRGTSFDAAATSGGSASSEKASSTSPVEISEWLDQKLTKSDRPELTGAKVVVSGDGVSLLLPRLECNGTISAHRHLHLPGSSDSPASASRVAGITGRGLKSGENFKLLYDLADQLHAAVGAS

SEQ ID NO: 68295 - protein, 122 aa, Homo sapiens
MQVAAPCVPPSNHELVPITTENAPKNVVDKGEGASRGGNTRKSLEDNGSTRVTPSVQPHLQPIRNMSVSRTMEDSCELDLVYVTERIIAVSFPSTANEENFRSNLREVAQMLKSKHGGNYLV

SEQ ID NO: 68296 - protein, 25 aa, Homo sapiens
NDGLYYYEQDLWMEEDENKHTAIKI

SEQ ID NO: 68297 - protein, 200 aa, Homo sapiens
MMAADIPRVTTPLSSLVQVPQEEDRQEEEVTTMILEDDSWVQEAVLQEDGPESEPFPQSAGKGGPQEEVTRGPQGALGRLRELCRRWLRPEVHTKEQMLTMLPKEIQAWLQEHRPESSEEAAALVEDLTQTLQDSDFEIQSENGENCNQDMFENESRKIFSEMPEGESAQHSDGESDFERDAGIQRLQGHSPESVRSTET

SEQ ID NO: 68298 - protein, 239 aa, Homo sapiens
NLPRRPRRLSSRLSTATPCARSLGPSRPSPTLPPVTASMTICYINSKWMYGPPSLCLGFASYEYCIFNPRLFEKNLLVSGPAWFKTRVVQGPTAYVFFSYEVESEKWYLSTDFPSTSIKTEPVTDEPPPGLVPSVTLTITAISTPLEKEEPPLEMNTGVDSSCQTIIPKIKLEPHEVDQFLNFSPKEGLSALPVSLWVMDMVSGSTEREYGERAGMSLYHRCCSWLYEIALFLKNKNFA

SEQ ID NO: 68299 - protein, 76 aa, Homo sapiens
MPRGSRARGSKRKRSWNTECPSFPGERPLQVRRAGLRTAGAAASLSEAWLRCGEGFQNTSGNPKPPHLKAPVGLQT

SEQ ID NO: 68300 - protein, 75 aa, Homo sapiens
MMKGEFYVIEYAACDATYNEIVTFERLRPVNQNKTVKKNTFFKCTVDVPEDLREACANENAHKDFKKAVGACRIF

SEQ ID NO: 68301 - protein, 164 aa, Homo sapiens
MNYRRRKDGDKFIYHLAPVEKSHGRLQNRTSRSQKKKSKSPERSKYCINAKNYEQPTISSKSHSPSPYTKRRMCELSEDTRRRLAHLNLGPYEFKKETDKPPFVIRHVDPPSPRADTLLGSSGRDCERDGWSRVHNEYNRSDVLLSVHHTRRSFSSWLLPTQGL

SEQ ID NO: 68302 - protein, 52 aa, Homo sapiens
MESMFSSPAEAALQRETGVPGLLTPLPDLDGVYELERVAGFVRDLGCCLAVP

SEQ ID NO: 68303 - protein, 94 aa, Homo sapiens
MAEFLDDQETRLCDNCKKEIPVFNFTIHEIHCQRNIGMCPTCKEPFPKSDMETHMAAEHCQVTCKCNKKLEKRLLKKHEVLKTELEAGRGGSSL

SEQ ID NO: 68304 - protein, 173 aa, Homo sapiens
MGSNSEVARLLASSDPLAQIAEDKPYAELWMGTHPRGDAKILDNRISQKTLSQWIAENQDSLGSKVKDTFNGNLPFLFKVLSVETPLSIQAHPNKELAEKLHLQAPQHYPDANHKPEMAIALTPFQGLCGFRPVEEIVTFLKKVPEFQFLIGDEAATHLKQTMSHDSQAVASS

SEQ ID NO: 68305 - protein, 184 aa, Homo sapiens
MNIRNARPEDLMNMQHCNLLCLPENYQMKYYFYHGLSWPQLSYIAEDENGKIVGYVLAKMEEDPDDVPHGHITSLAVKRSHRRLGLAQKLMDQASRAMIENFNAKYVSLHVRKSNRAALHLYSNTLNFQISEVEPKYYADGEDAYAMKRDLTQMADERQGQAPFVWKLRPCLFAPASPWVPGGS

SEQ ID NO: 68306 - protein, 445 aa, Homo sapiens
MNKGISSIPINLRVYSPHVLNLTLIDLPGITKVPVGDQPPDIEYQIREMIMQFITRENCLILAVTPANTDLANSDALKLAKEVDPQGLRTIGVITKLDLMDEGTDARDVLENKLLPLRRGYVGVVNRSQKDIDGKKDIKAAMLAERKFFLSHPAYRHIADRMGTPHLQKVLNQQLTNHIRDTLPNFRNKLQGQLLSIEHEVEAYKNFKPEDPTRKTKALLQMVQQFAVDFEKRIEGSGDQVDTLELSGGAKINRIFHERFPFEIVKMEFNEKELRREISYAIKNIHGIRTGLFTPDMAFEAIVKKQIVKLKGPSLKSVDLVIQELINTVKKCTKKLANFPRLCEETERIVANHIREREGKTKDQVLLLIDIQVSYINTNHEDFIGFANAQQRSSQVHKKTTVGNQVIRKGWLTISNIGIMKGGSKGYWFVLTAESLSWYKDDEEK

SEQ ID NO: 68307 - protein, 135 aa, Homo sapiens
EDINVAALGKQQPENISNPLYESTTSAPPEPSYDPFTMKKLQPSWDDLSWATQLQAGETKTGGPTPSPSCLPTQGSSTNKHAQHIRVHSAQGESCLRPVATRKIQLGLNTQNALPPYNPLFSRTLKNGSLRAMTP

SEQ ID NO: 68308 - protein, 236 aa, Homo sapiens
MAAGTSSYWEDLRKQARQLENELDLKLVSFSKLCTSYSHSSTRDGRRDRYSSDTTPLLNGSSQDRMFETMAIEIEQLLARLTGVNDKMAEYTNSAGVPSLNAALMHTLQRHRDILQDYTHEFHKTKANFMAIRERENLMGSVRKDIDGSGVNNRRTELFLKEHDHLRNIAMATKENMTSQRGMLKSIHSKMNTLANRFPAVNSLIQRINLRKRRDSLILGGVIGICTILLLLYAFH

SEQ ID NO: 68309 - protein, 78 aa, Homo sapiens
MNMLGGGGSAGRKPLKSGMKELAVFREKVTEQHRQMGKGGKHHLGLEEPKKLRPPPARTPCQQELDQVLERISTMRLP

SEQ ID NO: 68310 - protein, 94 aa, Homo sapiens
MIQAIQVLRFHLLELEKVHELCDNFCHRYISCLKGKMPIDLVIDERDGSSKSDHEELSGSSTNLADHNPSSWRDHDDATSTHSAGTPGPSSGGH

SEQ ID NO: 68311 - protein, 160 aa, Homo sapiens
MALVRGGWLWRQSSILRRWKRNWFALWLDGTLGYYHDETAQDEEDRVLIHFNVRDIKIGPECHDVQPPEGRSRDGLLTVNLREGGRLHLCAETKDDALAWKTALLEANSTPAPAGATVPPRSRRVCSKVRCVTRSWSPCKVERRIWVRVYSPYQDYYEVV

SEQ ID NO: 68312 - protein, 136 aa, Homo sapiens
MASVRIREAKEGDCGDILRLIRELAEFEKLSDQVKISEEALRADGFGDNPFYHCLVAEILPAPGKLLGQGIGSKIIKKVAEVALDKGCSQFRLAVLDWNQRAMDLYKALGAQDLTEAEGWHFFCFQGEATRKLAGK

SEQ ID NO: 68313 - protein, 50 aa, Homo sapiens
FFDSIEKGFCQDESIYKTEPRPEAKTMPNSSTPTSQINTIDTNWSLHLKI

SEQ ID NO: 68314 - protein, 82 aa, Homo sapiens
  MOD_RES (1)..(1): Any amino acid
XCCRRPPLGLYARMRRLPGPEVSGRSVAAASGPGAWGTDHYCLELLRKRDYEGYLCSLLLPAESRSSVFALRAFNVELAQAG

SEQ ID NO: 68315 - protein, 84 aa, Homo sapiens
FLPVYHPSPEESRDPTLYANNVQRVMAQALGIPATECEFVGSLPVIVVGRLKVALEPQLWELGKVLRKAGIPRVWWTSEMWPLH

SEQ ID NO: 68316 - protein, 173 aa, Homo sapiens
MAAEPNKTEIQTLFKRLRAVPTNKACFDCGAKNPSWASITYGVFLCIDCSGVHRSLGVHLSFIRSTELDSNWNWFQLRCMQTAFFRQHGCTANDANTKYNSRAAQMYREKIRQLGSAALARHGTDLWIDNMSSAVPNHSPEKKDSDFFTEHTQPPAWDAPATEPSGTQQPAPS

SEQ ID NO: 68317 - protein, 187 aa, Homo sapiens
MVSSLGSGMMRYIAFDFHKECKNMRWDRLSILLDQVAEMQDELSYFLVDSAGQVVANQEGVFRSNCMDCLDRTNVIQSLLARRSLQAQLQRLGVLHVGQKLEEQDEFEKIYKNAWADNANACAKQYAGTGALKTDFTRTGKRTHLGLIMDGWNSMIRYYKNNFSDGFRQDSIDLFLGNYSVDELESH

SEQ ID NO: 68318 - protein, 175 aa, Homo sapiens
MGLDLRPHNHLQHYDMLKDMWVSLAPMPTPRYAATSFLRGSKIYVLGGRQSKYAVNAFEVFDIETRSWTKFPNIPYKRAFSSFVTLDNHLYSLGGLRQGRLYRQPKFLRTMDVFDMEQGGWLKMERSFFLKKRRADFVAGSLSGRVIVAGGLGNQPTVLETAEAFHPGKNKWEIL

SEQ ID NO: 68319 - protein, 218 aa, Homo sapiens
  MOD_RES (1)..(1): Any amino acid
XLSEFKEFSQSFDAAMKGLALSNSDVIRQVHNSFARQQMFEFDTKTSAKEEDAFHFVSYVPVNGRLYELDGLREGPIDLGACNQDDWISAVRPVIEKRIQKYSEGEIRFNLMAIVSDRKMIYEQKIAELQRQLAEEEPMDTDQGNSMLSAIQSEVAKNQMLIEEEVQKLKRYKIENIRRKHNYLPFIMELLKTLAEHQQLIPLVEKFEKHFEKTLLGK

SEQ ID NO: 68320 - protein, 229 aa, Homo sapiens
MVQKEMVPAKPPKGLVGRVVSWYLENYLANLFAGAWEPQPEGPLPLDIPQASPQQVQRCVEILSRAKRPLMVLGSQALLTPTSADKLRAAVETLGVPCFLGGMARGLLGRNHPLHIRENRSAALKKADVIVLAGTVCDFRLSYGRVLSHSSKIIIVNRNREEMLLNSDIFWKPQEAVQGDVGSFVLKLVEGLQGQTWAPDWVEELREADRQKEQTFREKAAMPVAQHLN

SEQ ID NO: 68321 - protein, 416 aa, Homo sapiens
MEESQSLNEPSPKQSEEIPEVTSEPVKGSLNRAQSAQSINSTEMPAREDCLKRVSSEPVLSVQEKGVLLKRKLSLLEQDVIVNEDGRNKLKKQGETPNEVCMFSLAYGDIPEELIDVSDFECSLCMRLFFEPVTTPCGHSFCKNCLERCLDHAPYCPLCKESLKEYLADRRYCVTQLLEELIVKYLPDELSERKKIYDEETAELSHLTKNVPIFVCTMAYPTVPCPLHVFEPRYRLMIRRSIQTGTKQFGMCVSDTQNSFADYGCMLQIRNVHFLPDGRSVVDTVGGKRFRVLKRGMKDGYCTADIEYLEDVKVENEDEIKNLRELHDLVYSQACSWFQNLRDRFRSQILQHFGSMPEREENLQAAPNGPAWCWWLLAVLPVDPRYQLSVLSMKSLKERLTKIQHILTYFSRDQSK

SEQ ID NO: 68322 - protein, 146 aa, Homo sapiens
  MOD_RES (1)..(1): Any amino acid
XIEPDTDAPQEMGDENAEITEEMMDQANDKKVAAIEALNDGELQKAIDLFTDAIKLNPRLAILYAKRASVFVKLQKPNAAIRDCDRAIEINPDSAQPYKWRGKAHRLLGHWEEAAHDLALACKLDYDEDASAMLKEVQPRVCTTTL

SEQ ID NO: 68323 - protein, 140 aa, Homo sapiens
MAVDIQPACLGLYCGKTLLFKNGSTEIYGECGVCPRGQRTNAQKYCQPCTESPELYDWLYLGFMAMLPLVLHWFFIEWYSGKKSSSALFQHITALFECSMAAIITLLIYHCIYLLRILLGINDAAPTSSGEEDCMWVREI

SEQ ID NO: 68324 - protein, 48 aa, Homo sapiens
  MOD_RES (1)..(1): Any amino acid
XPNCTKDSTSGSGEGGKGYTKDQVDGVLSLERKRRVVQGVVEIRKEEH

SEQ ID NO: 68325 - protein, 152 aa, Homo sapiens
  MOD_RES (1)..(1): Any amino acid
XPQQLLQEVLLLPPPCELQVLVGGRHPRVRGAAHRLERRHDEGAAPGHPRQDHPGEAGPSGDSSVPDDGSAVPGEDVLPRVFPQRAAKHLPGAGAPHPERHHRKPHRLSAPLWSSAQWKSAVQGLLNYINNWHKPRSSAFSWPGTHRATPAL

SEQ ID NO: 68326 - protein, 104 aa, Homo sapiens
STPQQPSPESTPQQPSPESTPQHSSLETTSRQPAFQALPAPEIRRSSCCLLSPDANVKAAPQSRKAENLQENPPVIVTRVLQALGTVAVALGALGAAYYITESL

SEQ ID NO: 68327 - protein, 383 aa, Homo sapiens
MQRLQVVLGHLRGPADSGWMPQAAPCLSGAPQASAADVVVVHGRRTAICRAGRGGFKDTTPDELLSAVMTAVLKDVNLRPEQLGDICVGNVLQPGAGAIMARIAQFLRVESMSLADRGNPGNITSRLMEKEKARDCLIPMGITSENVAERFGISREKQDTFALASQQKAARAQSKGCFQAEIVPVTTTVHDDKGTKRSITVTQDEGIRPSTTMEGLAKLKPAFKKDGSTTAGNSSQVSDGAAAILLARRSKAEELGLPILGVLRSYAVVGVPPDIMGIGPAYAIPVALQKAGLTVSDVDIFEINEAFASQAAYCVEKLRLPPEKVNPLGGAVALGHPLGCTGARQVITLLNELKRRGKRAYGVVSMCIGTGMGAAAVFEYPGN

SEQ ID NO: 68328 - protein, 53 aa, Homo sapiens
MSWLFPLTKSASSSAAGSPGGLTSLQQQKQRLIESLRNSHSRYKLCWLSRFCD

SEQ ID NO: 68329 - protein, 209 aa, Homo sapiens
  MOD_RES (1)..(1): Any amino acid
XFLRNVVSGEHYRFVSMWMARTSYLAAFAIMVIFTLSVSMLLRYSHHQIFVFIAPLLTVILALVGMEAIMSEFFNDTTTAFYIILIVWLADQYDAICCHTSTSKRHWLRFFYLYHFAFYAYHYRFNGQYSSLALVTSWLFIQHSMIYFFHHYELPAILQQVRIQEMLLQAPPLGPGTPTALPDDMNNNSGAPATAPDSAGQPPALGPVS

SEQ ID NO: 68330 - protein, 122 aa, Homo sapiens
MGPLTFTDVAIEFSLEEWQCLDTAQQNLYRNVMLENYRNLVFLGIAVSKPDLITCLEKEKEPCKMKRHEMVDEPPDGVSLLLPRLECSGTISAHYNFPLPGSSDSPASASSVVGITGWGTSG

SEQ ID NO: 68331 - protein, 49 aa, Homo sapiens
MSGASSSEQNNNSYETKTPNLRMSEKKCSWASYMTNSPTLIVMIGLPAR

SEQ ID NO: 68332 - protein, 138 aa, Homo sapiens
MLFNQLIEMALLSLGYSHSSAAQAKGLIQVGKWNPVPLSYVTDAPDATVADMLQDVYHVVTLKIQLHSCPKLEDLPPEQWSHTTVRNALKDLLKDMNQSSLAKECPLSQHPEISNMLDNLFINGKINFKKKLPRAPEA

SEQ ID NO: 68333 - protein, 1556 aa, Homo sapiens
MWGYLCSLCRPPGSERRTQEAQGAGGDPQAARTPRKGVSPADSCAAPRAGLLLGGSACTQAAAQRQLLHAELKLVLQQKGERTQEPGVQVPPSNAMEARSRSAEELRRAELVEIIVETEAQTGVSGINVAGGGKEGIFVRELREDSPAARSLSLQEGDQLLSARVFFENFKYEDALRLLQCAEPYKVSFCLKRTVPTGDLALRPGTVSGYEIKGPRAKVAKLNIQSLSPVKKKKMVPGALGVPADLAPVDVEFSFPKFSRLRRGLKAEAVKGPVPAAPARRRLQLPRLRVREVAEEAQAARLAAAAPPPRKAKVEAEVAAGARFTAPQVELVGPRLPGAEVGVPQVSAPKAAPSAEAAGGFALHLPTLGLGAPAPPAVEAPAVGIQVPQVELPALPSLPTLPTLPCLETREGAVSVVVPTLDVAAPTVGVDLALPGAEVEARGEAPEVALKMPRLSFPRFGARAKEVAEAKVAKVSPEARVKGPRLRMPTFGLSLLEPRPAAPEVVESKLKLPTIKMPSLGIGVSGPEVKVPKGPEVKLPKAPEVKLPKVPEAALPEVRLPEVELPKVSEMKLPKVPEMAVPEVRLPEVELPKVSEMKLPKVPEMAVPEVRLPEVQLLKVSEMKLPKVPEMAVPEVRLPEVQLPKVSEMKLPEVSEVAVPEVRLPEVQLPKVPEMKVPEMKLPKVPEMKLPEMKLPEVQLPKVPEMAVPDVHLPEVQLPKVPEMKLPEMKLPEVKLPKVPEMAVPDVHLPEVQLPKVPEMKLPKMPEMAVPEVRLPEVQLPKVSEMKLPKVPEMAVPDVHLPEVQLPKVCEMKVPDMKLPEIKLPKVPEMAVPDVHLPEVQLPKVSEIRLPEMQVPKVPDVHLPKAPEVKLPRAPEVQLKATKAEQAEGMEFGFKMPKMTMPKLGRAESPSRGKPGEAGAEVSGKLVTLPCLQPEVDGEAHVGVPSLTLPSVELDLPGALGLQGQVPAAKMGKGERVEGPEVAAGVREVGFRVPSVEIVTPQLPAVEIEEGRLEMIETKVKPSSKFSLPKFGLSGPKVAKAEAEGAGRATKLKVSKFAISLPKARVGAEAEAKGAGEAGLLPALDLSIPQLSLDAHLPSGKVEVAGADLKFKGPRFALPKFGVRGRDTEAAELVPGVAELEGKGWGWDGRVKMPKLKMPSFGLARGKEAEVQGDRASPGEKAESTAVQLKIPEVELVTLGAQEEGRAEGAVAVSGMQLSGLKVSTAGQVVTEGHDAGLRMPPLGISLPQVELTGFGEAGTPGQQAQSTVPSAEGTAGYRVQVPQVTLSLPGAQVAGGELLVGEGVFKMPTVTVPQLELDVGLSREAQAGEAATGEGGLRLKLPTLGARARVGGEGAEEQPPGAERTFCLSLPDVELSPSGGNHAEYQVAEGEGEAGHKLKVRLPRFGLVRAKEGAEEGEKAKSPKLRLPRVGFSQSEMVTGEGSPSPEEEEEEEEEGSGEGASGRRGRVRVRLPRVGLAAPSKASRGQEGDAAPKSPVREKSPKFRFPRVSLSPKARSGSGDQEEGGLRVRLPSVGFSETGAPGPARMEGAQAAAV

SEQ ID NO: 68334 - protein, 151 aa, Homo sapiens
MEAAAQFFVESPDVVYGPEAIEAQYEYRTTRVSREGGVLKVHPTSTRFTFRTARQVPRLGVMLVGWGGNNGSTLTAAVLANRLRLSWPTRSGRKEANYYGSLTQAGTVSLGLDAEGQEVFVPFSAVLPMVAPNDLVFDAGADPQGHPRLPV

SEQ ID NO: 68335 - protein, 99 aa, Homo sapiens
MAFSACFGGIIFNILVGVGLGCLLQISRSHTEVKLEPDGLLVWVLAGALGLSLVFSLVSVPLQCFQLSRVYGFCLLLFYLNFLVVALLTEFGVIHLKSM

SEQ ID NO: 68336 - protein, 282 aa, Homo sapiens
MSDIEEVVEEYEEEEQEEQEEAAEEDAEAEAETEETRAEEDEEEEEAKEAEDGPMEESKPKPRSFMPNLVPPKIPDGERVDFDDIHRKRMEKDLNELQALIEAHFENRKKEEEELVSLKDRIERRRAERAEQQRIRNEREKERQNRLAEERARREEEENRRKAEDEARKKKALSNMMHFGGYIQKAQTERKSGKRQTEREKKKKILAERRKVLAIDHLNEDQLREKAKELWQSIYNLEAEKFDLQEKFKQQKYEINVLRNRINDNQKVSKTRGKAKVTGRWK

SEQ ID NO: 68337 - protein, 144 aa, Homo sapiens
MKAQTALSFFLILITSLSGSQGIFPLAFFIYVPMNEQIVIGRLDEDIILPSSFERGSEVVIHWKYQDSYKVHSYYKGSDHLESQDPRYANRTSLFYNEIQNGNASLFFRRVSLLDEGIYTCYVGTAIQVITNKVVLKVGVFLTP

SEQ ID NO: 68338 - protein, 568 aa, Homo sapiens
MPAMLPTGSHSAVLPPSHCSTAPPSTSQEPSSSADPKLCLSPPTSDSRQERNVQFGLAYQEGRLQKLLKMNGPEDLPKSYDYDLIIIGGGSGGLAAAKEAAQYGKKVMVLDFVTPTPLGTRWGLGGTCVNVGCIPKKLMHQAALLGQALQDSRNYGWKVEETVKHDWDRMIEAVQNHIGSLNWGYRVALREKKVVYENAYGQFIGPHRIKATNNKGKEKIYSAERFLIATGERPRYLGIPGDKEYCISSDDLFSLPYCPGKTLVVGASYVALECAGFLAGIGLDVTVMVRSILLRGFDQDMANKIGEHMEEHGIKFIRQFVPIKVEQIEAGTPGRLRVVAQSTNSEEIIEGEYNTVMLAIGRDACTRKIGLETVGVKINEKTGKIPVTDEEQTNVPYIYAIGDILEDKVELTPVAIQAGRLLAQRLYAGSTVKCDYENVPTTVFTPLEYGACGLSEEKAVEKFGEENIEVYHSYFWPLEWTIPSRDNNKCYAKIICNTKDNERVVGFHVLGPNAGEVTQGFAAALKCGLTKKQLDSTIGIHPVCAEVFTTLSVTKRSGASILQAGCCG

SEQ ID NO: 68339 - protein, 186 aa, Homo sapiens
LSDAATKQEGMEGLLGTLVQLLGSDDINVVTCAAGILSNLTCNNYKNKMMVCQVGGIEALVRTVLRAGDREDITEPAICALRHLTSRHQEAEMAQNAVRLHYGLPVVVKLLHPPSHWPLIKATVGLIRNLALCPANHAPLREQGAIPRLVQLLVRAHQDTQRRTSMGGTQQQFVLLYSPIENIQRV

SEQ ID NO: 68340 - protein, 228 aa, Homo sapiens
  MOD_RES (1)..(1): Any amino acid
XARPAMAPDPVAAETAAQGPTPRYFTWDEVAQRSGCEERWLVIDRKVYNISEFTRRHPGGSRVISHYAGQDATDPFVAFHINKGLVKKYMNSLLIGELSPEQPSFEPTKNKELTDEFRELRATVERMGLMKANHVFFLLYLLHILLLDGAAWLTLWVFGTSFLPFLLCAVLLSAVQHFGRPRWPDHLISVQDQPGQRGETSTKNTKRPGTVAHACNTSTLGGQDGQII

SEQ ID NO: 68341 - protein, 144 aa, Homo sapiens
MGTDGYMPRELASMSLVLHGNNLLVFGGTGIPFGESNGNDVHVCNVKYKRWALLSCRGKKPSRIYGQAMAIINGSLYVFGGTTGYIYSTDLHKLDLNTREWTQLKPNNLSCDLPEERYRHEIAHDGQRIYILGGGTSWTAYSLN

SEQ ID NO: 68342 - protein, 78 aa, Homo sapiens
MAETNNECSIKVLCRFRPLNQAEILRGDKFIPIFQGDDSVVIGGKLHDPQLMGIIPRIARDIFNHIYSMDENLEFHIK

SEQ ID NO: 68343 - protein, 258 aa, Homo sapiens
MSSVCLSMEGGAAAATPTALPYYVAFSQLLGLTLVAMTGAWLGLYRGGIAWESDLQFNAHPLCMVIGLIFLQGNALLVYRVFRNEAKRTTKVLHGLLHIFALVIALVGLVAVFDYHRKKGYADLYSLHSWCGILVFVLYFVQWLVGFSFFLFPGASFSLRSRYRPQHIFFGATIFLLSVGTALLGLKEALLFNLGGKYSAFEPEGVLANVLGLLLACFGGAVLYILTRADWKRPSQAEEQALSMDFKTLTEGDSPGSQ

SEQ ID NO: 68344 - protein, 205 aa, Homo sapiens
MCTALSPKVRSGPGLSDMHQYSQWLASRHEANLLPMKEDLALWLTNLLGKEITAETFMEKLDNGALLCQLAETMQEKFKESMDANKPTKNLPLKKIPCKTSAPSGSFFARDNTANFLSWCRDLGVDETCLFESEGLVLHKQPREVCLCLLELGRIAARYGVEPPGLIKLEKEIEQEETLSAPSPSPSPSSKSSGKKSTGNLLDDA

SEQ ID NO: 68345 - protein, 85 aa, Homo sapiens
MNLLPCNPHGNGLLYAGFNQDHGCFACGMENGFRVYNTDPLKEKEKQEFLEGGVGHVEMLFRCNYLALVGGGKKPKYPPNKGTEK

SEQ ID NO: 68346 - protein, 319 aa, Homo sapiens
MSVCYRPPGNETLLSWKTSRATGTAFLLLAALLGLPGNGFVVWSLAGWRPARGRPLAATLVLHLALADGAVLLLTPLFVAFLTRQAWPLGQAGCKAVYYVCALSMYASVLLTGLLSLQRCLAVTRPFLAPRLRSPALARRLLLAVWLAALLLAVPAAVYRHLWRDRVCQLCHPSPVHAAAHLSLETLTAFVLPFGLMLGCYSVTLARLRGARWGSGRHGARVGRLVSAIVLAFGLLWAPYHAVNLLQAVAALAPPEGALAKLGGAGQAARAGTTALAFFSSSVNPVLYVFTAGDLLPRAGPRFLTRLFEGSGEARGGGR

SEQ ID NO: 68347 - protein, 207 aa, Homo sapiens
MGPVPTSFGKRRGGPQTLPASPGGMDDKEYVGFATLPNQVHRKSVKKGFDFTLMVAGESGLGKSTLVNSLFLTDLYRDRKLLGAEERIMQTVEITKHAVDIEEKGVRLRLTIVDTPGFGDAVNNTECWKPVAEYIDQQFEQYFRDESGLNRKNIQDNRVHCCLYFISPFGHGLRPLDVEFMKALHQRVNIVPILAKADTLTPPEVDH

SEQ ID NO: 68348 - protein, 679 aa, Homo sapiens
MDEEIVSEKQAEESHRQDSANLLIFILLLTLTILTIWLFKHRRARFLHETGLAMIYGLLVGLVLRYGIHVPSDVNNVTLSCEVQSSPTTLLVNVSGKFYEYMLKGEISSHELNNVQDNEMLRKVTFDPEVFFNILLPPIIFYAGYSLKRRHFFRNLGSILAYAFLGTAISCFVIGSIMYGCVTLMKVTGQLAGDFYFTDCLLFGAIVSATDPVTVLAIFHELQVDVELYALLFGESVLNDAVAIVLSSSIVAYQPAGDNSHTFDVTAMFKSIGIFLGIFSGSFAMGAATGVVTALVTKFTKLREFQLLETGLFFLMSWSTFLLAEAWGFTGVVAVLFCGITQAHYTYNNLSTESQHRTKQLFELLNFLAENFIFSYMGLTLFTFQNHVFNPTFVVGAFVAIFLGRAANIYPLSLLLNLGRRSKIGSNFQHMMMFAGLRGAMAFALAIRDTATYARQMMFSTTLLIVFFTVWVFGGGTTAMLSCLHIRYCARLWGYRDELRHGLYPQGTHSLFGETDRVGVDSDQEHLGVPENERRTTKAESAWLFRMWYNFDHNYLKPLLTHSGPPLTTTLPACCGPIARCLTSPQAYENQEQLKDDDSDLILNDGDISLTYGDSTVNTEPATSSAPRRFMGNSSEDALDRELAFGDHELVIRGTRLVLPMDDSEPPLNLLDNTRHGPA

SEQ ID NO: 68349 - protein, 959 aa, Homo sapiens
METESEQNSNSTNGSSSSGGSSRPQIAQMSLYERQAVQATIAASRQASSPNTSTTQQQTTTTQASINLATTSAAQLISRSQSVSSPSATTLTQSVLLGNTTSPPLNQSQAQMYLRVNRTLGRNVPLASQLILMPNGAVAAVQQEVPSAQSPGVHADADQVQNLAVRNQQASAQGPQMQGSTQKAIPPGASPVSSLSQASSQALAVAQASSGATNQSLNLSQAGGGSGNSIPGSMGPGGGGQAHGGLGQLPSSGMGGGSCPRKGTGVVQPLPAAQTVTVSQGSQTEAESAAAKKAEADGSGQQNVGMNLTRTATPAPSQTLISSATYTQIQPHSLIQQQQQIHLQQKQVVIQQQIAIHHQQQFQHRQSQLLHTATHLQLAQQQQQQQQQQQQQQQPQATTLTAPQPPQVPPTQQVPPSQSQQQAQTLVVQPMLQSSPLSLPPDAAPKPPIPIQSKPPVAPIKPPQLGAAKMSAAQQPPPHIPVQVVGTRQPGTAQAQALGLAQLAAAVPTSRGMPGTVQSGQAHLASSPPSSQAPGALQECPPTLAPGMTLAPVQGTAHVVKGGATTSSPVVAQVPAAFYMQSVHLPGKPQTLAVKRKADSEEERDDVSTLGSMLPAKASPVAESPKVMDEKSSLGEKAESVANVNANTPSSELVALTPAPSVPPPTLAMVSRQMGDSKPPQAIVKPQILTHIIEGFVIQEGAEPFPVGCSQLLKESEKPLQTGLPTGLTENQSGGPLGVDSPSAELDKKANLLKCEYCGKYAPAEQFRGSKRFCSMTCAKRYNVSCSHQFRLKRKKMKEFQEANYARVRRRGPRRSSSDIARAKIQGKCHRGQEDSSRGSDNSSYDEALSPTSPGPLSVRAGHGERDLGNPNTAPPTPELHGINPVFLSSNPSRWSVEEVYEFIASLQGCQEIAEEFRSQEIDGQALLLLKEEHLMSAMNIKLGPALKICAKINVLKET

SEQ ID NO: 68350 - protein, 1128 aa, Homo sapiens
LVLKVVTVTRNLDPDDTARKKAPPPPKRAPTTALTLRSKSMTSELEELDKPEEIVPASKPSRAAENMAVEPRVATIKQRPSSRCFPAGSDMNSVYERQGIAVMTPTVPGSPKAPFLGIPRGTMRRQKSIDSRIFLSGITEEERQFLAPPMLKFTRSLSMPDTSEDIPPPPQSVPPSPPPPSPTTYNCPKSPTPRVYGTIKPAFNQNSAAKVSPATRSDTVATMMREKGMYFRRELDRYSLDSEDLYSRNAGPQANFRNKRGQMPENPYSEVGKIASKAVYVPAKPARRKGMLVKQSNVEDSPEKTCSIPIPTIIVKEPSTSSSGKSSQGSSMEIDPQAPEPPSQLRPDESLTVSSPFAAAIAGAVRDREKRLEARRNSPAFLSTDLGDEDVGLGPPAPRTRPSMFPEEGDFADEDSAEQLSSPMPSATPREPENHFVGGAEASAPGEAGRPLNSTSKAQGPESSPAVPSASSGTAGPGNYVHPLTGRLLDPSSPLALALSARDRAMKESQQGPKGEAPKADLNKPLYIDTKMRPSLDAGFPTVTRQNTRGPLRRQETENKYETDLGRDRKGDDKKNMLIDIMDTSQQKSAGLLMVHTVDATKLDNALQEEDEKAEVEMKPDSSPSEVPEGVSETEGALQISAAPEPTTVPGRTIVAVGSMEEAVILPFRIPPPPLASVDLDEDFIFTEPLPPPLEFANSFDIPDDRAASVPALSDLVKQKKSDTPQSPSLNSSQPTNSADSKKPASLSNCLPASFLPPPESFDAVADSGIEEVDSRSSSDHHLETTSTISTVSSISTLSSEGGENVDTCTVYADGQAFMVDKPPVPPKPKMKPIIHKSNALYQDALVEEDVDSFVIPPPAPPPPPGSAQPGMAKVLQPRTSKLWGDVTEIKSPILSGPKANVISELNSILQQMNREKLAKPGEGLDSPMGAKSASLAPRSPEIMSTISGTRSTTVTFTVRPGTSQPITLQSRPPDYESRTSGTRRAPSPVVSPTEMNKETLPAPLSAATASPSPALSDVFSLPSQPPSGDLFGLNPAGRSRSPSPSILQQPISNKPFTTKPVHLWTKPDVADWLESLNLGEHKEAFMDNEIDGSHLPNLQKEDLIDLGVTRVGHRMNIERALKQLLDR

SEQ ID NO: 68351 - protein, 66 aa, Homo sapiens
MTLQWAAVATFLYAEIGLILIFCLPFIPPQRWQKIFSFNVWGKIATFWNKAFLTIIILLIVLFLEF

SEQ ID NO: 68352 - protein, 192 aa, Homo sapiens
MSAEVKVTGQNQEQFLLLAKSAKGAALATLIHQVLEAPGVYVFGELLDMPNVRELAESDFASTFRLLTVFAYGTYADYLAEARNLPPLTEAQKNKLRHLSVVTLAAKVKCIPYAVLLEALALRNVRQLEDLVIEAVYADVLRGSLDQRNQRLEVDYSIGRDIQRQDLSAIARTLQEWCVGCEVVLSGIEEQV

SEQ ID NO: 68353 - protein, 118 aa, Homo sapiens
MASPDWGYDDKNGPEQWSKLYPIANGNNQSPVDIKTSETKHDTSLKPISVSYNPATAKEIINVGHSFHVNFEDNDNRSVLKGGPFSDSYRLFQFHFHWGSTNEHGSEHTVDGVKYSAE

SEQ ID NO: 68354 - protein, 174 aa, Homo sapiens
MYSPIIYQALCEHVQTQMSLMNDLTSKNIPNGIPAVPCHAPSHSESQATPHSSYGLCTSTPVWSLQRPPCPPKVHSEVQTDGNSQFASQETHLDSQTHRSPTQSQPAFLATNEEKCAREQIREATSERKDLNIHVRDTKTVKDVQKAKNVNKTAEKVRIIKYLLGELKALVAEQ

SEQ ID NO: 68355 - protein, 604 aa, Homo sapiens
MKWVTFISLLFLFSSAYSRGVFRRDAHKSEVAHRFKDLGEENFKALVLIAFAQYLQQCPFEDHVKLVNEVTEFAKTCVADESAENCDKSLHTLFGDKLCTVATLRETYGEMADCCAKQEPERNECFLQHKDDNPNLPRLVRPEVDVMCTAFHDNEETFLKKYLYEIARRHPYFYAPELLFFAKRYKAAFTECCQAADKAACLLPKLDELRDEGKASSAKQRLKCASLQKFGERAFKAWAVARLSQRFPKAEFAEVSKLVTDLTKVHTECCHGDLLECADDRADLAKYICENQDSISSKLKECCEKPLLEKSHCIAEVENDEMPADLPSLAADFVESKDVCKNYAEAKDVFLGMFLYEYARRHPDYSVVLLLRLAKTYETTLEKCCAAADPHECYAKVFDEFKPLVEEPQNLIKQNCELFEQLGEYKFQNALLVRYTKKVPQVSTPTLVEVSRNLGKVGSKCCKHPEAKRMPCAEDYLSVVLNQLCVLHEKTPVSDRVTKCCTESLVNRRPCFSALEVDETYVPKEFNAETFTFHADICTLSEKERQIKKQTALVELVKHKPKATKEQLKAVMDDFAAFVEKCCKADDKETCFAEEPTMRIRERK

SEQ ID NO: 68356 - protein, 105 aa, Homo sapiens
MNMIWRNSISCLRLGKVPHRYQSGYHPVAPLGSRILTDPAKVFEHNMWDHMQWSKEEEAAARKKVKENSAVRVLLEEQVKYEREASKYWDTFYKIHKNKFFKDRN

SEQ ID NO: 68357 - protein, 130 aa, Homo sapiens
GQTGSGKTHVFDLLNRKTKLRVLEDGKQQVQVVGLQEREVKCVEDVLKLIDIGNSCRVKELTVDPTAAGDVRPIMHHPPNQIDDLETQWGVGSSPQRDDLKLLCEQNEEEVSPQLFTFHEAVSQMVEMEE

SEQ ID NO: 68358 - protein, 524 aa, Homo sapiens
MESPSAPPHRWCIPWQRLLLTASLLTFWNPPTTAKLTIESTPFNVAEGKEVLLLVHNLPQHLFGYSWYKGERVDGNRQIIGYVIGTQQATPGPAYSGREIIYPNASLLIQNIIQNDTGFYTLHVIKSDLVNEEATGQFRVYPEPPKPFITSNNSNPVEDEDAVALTCEPEIQNTTYLWWVNNQSLPVSPRLQLSNDNRTLTLLSVTRNDVGPYECGIQNELSVDHSDPVILNVLYGPDDPTISPSYTYYRPGVNLSLSCHAASNPPAQYSWLIDGNIQQHTQELFISNITEKNSGLYTCQANNSASGHSRTTVKTITVSAELPKPSISSNNSKPVEDKDAVAFTCEPEAQNTTYLWWVNGQSLPVSPRLQLSNGNRTLTLFNVTRNDARAYVCGIQNSVSANRSDPVTLDVLYGPDTPIISPPDSSYLSGANLNLSCHSASNPSPQYSWRINGIPQQHTQVLFIAKITPNNNGTYACFVSNLATGRNNSIVKSITVSASGTSPGLSAGATVGIMIGVLVGVALI

SEQ ID NO: 68359 - protein, 73 aa, Homo sapiens
MSTVEEDSDTVTVETVNSVTLTQDTEGNLILHCPQNEADEIDSEDSIEPPHKRLCLSSEDDQSIDDSTPCISV

SEQ ID NO: 68360 - protein, 243 aa, Homo sapiens
MAEGSRGGPTCSGVGGRQDPVSGSGGCNFPEYELPELNTRAFHVGAFGELWRGRLRGAGDLSLREPPASALPGSQAADSDREDAAVARDLDCSLEAAAELRAVCGLDKLKCLEDGEDPEVIPENTDLVTLGVRKRFLEHREETITIDRACRQETFVYEMESHAIGKKPENSADMIEEGELILSVNILYPVIFHKDLYKSAFFYFEGTFYNDKRYPECRDLSRTIIEWSESHDRGYGKFQTARM

SEQ ID NO: 68361 - protein, 58 aa, Homo sapiens
MLQGLLPVSLLLSVAVSAIKELPGVKKYEVVYPIRLHPLHKREAKEPEQQFLSSMKIS

SEQ ID NO: 68362 - protein, 192 aa, Homo sapiens
MATGALLPCSRPCPMSRLDFLKASHFSLGPDLRLHEGTMRTTSHRDFAYPAATREPPSLQPPPALLFPMDPRWDREERVSEAHRAFPPPSTPPWELLQAQARERTLAMQAGNLHLHEDAHAGIGLSNAHAAYGWPELPARTRERIRGARLIFDRDSLPPGDRDKLRIPPTTHQALFPPHDARPQPRAPSCHL

SEQ ID NO: 68363 - protein, 50 aa, Homo sapiens
VMDVVNYFRTVGFEEQASAFQEQDKVTDRDKYLECTPIESWSGQIKGLLL

SEQ ID NO: 68364 - protein, 81 aa, Homo sapiens
VMHALRQTWHTTCFVCAACKKPFGNSLFHMEDGEPYCEKDYINLFSTKCHGCDFPVEAGDKFIEALGHTWHDTCFICAVCL

SEQ ID NO: 68365 - protein, 165 aa, Homo sapiens
MHQLFRLVLGQKDLSRAGDLFSLDDSEIEDSLTEALEQIKIISSSSDYQTNNNDQAVVEICITRITTAIRETESIEKHAKALVGLWDSCLEHNLRPFGKDEDTPHAKIASDIMSCILQNYNRPPVMALAIPIAVKFLHRGNKELCRNMSNYLSLAAITKADLLAD

SEQ ID NO: 68366 - protein, 172 aa, Homo sapiens
MSVEHADIWVKSYSLYSRERYICNSGFKRKAGTSSLTECVLNKATNVAHWTTPSLKCIKPAASSPSSNNTAATTAAIVPGSQLMPSKSPSTGTTEISSHESSHGTPSQTTAKNWELTASASHQPPGVYPQGHSDTTVAISTSTVLLCGLSAVSLLACYLKSRQTPPLASVEM

SEQ ID NO: 68367 - protein, 124 aa, Homo sapiens
MINAQELLTLEDVTVEFTWEEWQLLGPFQKDLYRDVMLEIYSNLLSMGYQVSKPDALSKLERGEEPWTMEDERHSRICPENNEVDDHLQDHLENQRMLKSVEQYHEHNAFGNTASQTKSLCLFR

SEQ ID NO: 68368 - protein, 462 aa, Homo sapiens
MGRKKIQITRIMDERNRQVTFTKRKFGLMKKAYELSVLCDCEIALIIFNSTNKLFQYASTDMDKVLLKYTEYNEPHESRTNSDIVETLRKKGLNGCDSPDPDADDSVGHSPESEDKYRKINEDIDLMISRQRLCAVPPPNFEMPVSIPVSSHNSLVYSNPVSSLGNPNLLPLAHPSLQRNSMSPGVTHRPPSAGGLMGGDLTSGAGTSAGNGYGNPRNSPGLLVSPGNLNKNMQAKSPPPMNLGMNNRKPDLRVLIPPGSKNTMPSVNQRINNSQSAQSLATPVVSVATPTLPGQGMGGYPSAISTTYGTEYSLSSADLSSLSGFNTASALHLGSVTGWQQQHLHNMPPSALSQLGACTSTHLSQSSNLSLPSTQSLNIKSEPVSPPRDRTTTPSRYPQHTRHEAGRSPVDSLSSCSSSYDGSDREDHRNEFHSPIGLTRPSPDERESPSVKRMRLSEGWAT

SEQ ID NO: 68369 - protein, 1121 aa, Homo sapiens
MAEQEASGLQVLLHTLQSSSDKESILTILKVLGDLLSVGTDRRIHYMISKGGSEALLQTLVDTARTAPPDYDILLPLFRLLAKVGLRDKKIGRKALELEALDVTLILARKNLSHGQNLLHCLWALRVFASSVSMGAMLGINGAMELLFKVITPYTRKRTQAIRAATEVLAALLKSKSNGRRAVNRGYVTSLLGLHQDWHSHDTANAYVQIRRGLLLCLRHIAALRSGREAFLAAQGMEILFSTTQNCLDDKSMEPVISVVLQILRQCYPTSPLPLVTASSAYAFPVPGCITTEPPHDLPEEDFEDDGDDEVDKDSDTEDGKVEDDDLETDVNKLSSKPGLDRPEEELMQYEVMCLELSYSFEELQSKLGDDLNSEKTQYANHHHIPAAASSKQHCYSKDQSSCGQEREYAVQTSLLCRVKTGRSTVHLGSKKNPGVNLYQNVQSNSLRRDSSESEIPDIQASPKADAWDVDAIFCPRMSASFSNSTRTREVVKVIDKLLQTHLKRVPFHDPYLYMAKARRTSSVVDFKMMAFPDVWGHCPPPTTQPMLERKCGVQRIRIFEDIRRLIQPSDVINKVVFSLDEPWPLQDNASNCLRFFSKFESGNLRKAIQVREFEYDLLVNADVNSTQHQQWFYFKVSGMQAAIPYHFNIINCEKPNSQFNYGMQPTLYSVKEALLGKPTWIRTGHEICYYKNHYRQSTAVAGGASGKCYYTLTFAVTFPHSEDVCYLAYHYPYTYTALMTHLDILEKSVNLKEVYFRQDVLCQTLGGNPCPLVTITAMPESNSDEHLEQFRHRPYQVITARVHPGESNASWVMKGTLEFLVSSDPVARLLRENFIFKIIPMLNPDGVINGNHRCSLSGEDLNRQWLSPSAHLQPTIYHAKGLLYHLSSIGRSPVVFCDFHGHSQKKNVFLYGCSIKETLWQAACTVGTSTILEEVNYRTLPKILDKLAPAFTMSSCSFLVEKSRASTARVVVWREMGVSRSYTMESSYCGCNQGPYQGLQFGTRELEEMGAMFCLGLLILELKSASCSHQLLAQAATLLSAEEDALDQHLQRCSSSSGSVPSELEDEPACLEEIDYSTDNSSDQEGSLSELDRRIQECAFNKFEGEEEEEAPGQGGEAIP

SEQ ID NO: 68370 - protein, 133 aa, Homo sapiens
SEEGAVGYSSDSETLDLEEAEGAVGYQPEYSKFCRMSYQDPAQLSCLPYLEHVGHNHTYNMAPSALDSADLPPPSALKKGSKEKQADFLDKQMSRDEHRARAMKIPFTNDKIINLPVEELCGAKADRGEGMDL

SEQ ID NO: 68371 - protein, 788 aa, Homo sapiens
MAVLLLLLRALRRGPGPGPRPLWGPGPAWSPGFPARPGRGRPYMASRPPGDLAEAGGRALQSLQLRLLTPTFEGINGLLLKQHLVQNPVRLWQLLGGTFYFNTSRLKQKNKEKDKSKGKAPEEDEEERRRRERDDQMYRERLRTLLVIAVVMSLLNALSTSGGSISWNDFVHEMLAKGEVQRVQVVPESDVVEVYLHPGAVVFGRPRLALMYRMQVANIDKFEEKLRAAEDELNIEAKDRIPVSYKRTGFFGNALYSVGMTAVGLAILWYVFRLAGMTGREGGFSAFNQLKMARFTIVDGKMGKGVSFKDVAGMHEAKLEVREFVDYLKLGAKVPKGALLLGPPGCGKTLLAKAVATEAQVPFLAMAGPEFVEVIGGLGAARVRSLFKEARARAPCIVYIDEIDAVGKKRSTTMSGFSNTEEEQTLNQLLVEMDGMGTTDHVIVLASTNRADILDGALMRPGRLDRHVFIDLPTLQERREIFEQHLKSLKLTQSSTFYSQRLAELTPGFSGADIANICNEAALHAAREGHTSVHTLNFEYAVERVLAGTAKKSKILSKEEQKVVAFHESGHALVGWMLEHTEAVMKVSITPRTNAALGFAQMLPRDQHLFTKEQLFERMCMALGGRASEALSFNEVTSGAQDDLRKVTRIAYSMVKQFGMAPGIGPISFPEAQEGLMGIGRRPFSQGLQQMMDHEARLLVAKAYRHTEKVLQDNLDKLQALANALLEKEVINYEDIEALIGPPPHGPKKMIAPQRWIDAQREKQDLGEEETEETQQPPLGGEEPTWPK

SEQ ID NO: 68372 - protein, 69 aa, Homo sapiens
  MOD_RES (1)..(1): Any amino acid
XEGMEMKGPLREPCALTLAQRNGQYELIIQLHEKEQHVQDIIPINSHFRCVQEAEETLLIDIASNSLIR

SEQ ID NO: 68373 - protein, 243 aa, Homo sapiens
MVPWVRTMGQKLKQRLRLDVGREICRQYPLFCFLLLCLSAASLLLNRYIHILMIFWSFVAGVVTFYCSLGPDSLLPNIFFTIKYKPKQLGLQELFPQGHSCAVCGKVKCKRHRPSLLLENYQPWLDLKISSKVDASLSEVLELVLENFVYPWYRDVTDDESFVDELRITLRFFASVLIRRIHKSFALSPRLEYSGMISAHCNLRLPGSSDSPASASRVAGTTGICHHARLIFCIFSRDRVSPC

SEQ ID NO: 68374 - protein, 133 aa, Homo sapiens
MLQTKDLIWTLFFLGTAAKPKITYVENQTAMELEEQVTLTCEASGDPIPSITWRTSTRNISSEEKTLDGHMVVRSHARVSSLTLKSIQYTDAGEYICTASNTIGQDSQSMYLEVQYAPKLQGPVAVYTWEGNQ

SEQ ID NO: 68375 - protein, 95 aa, Homo sapiens
MGAGEERREGTDSPSPESGTDAAGGAASGSDSADKKAQGPKGGGNAVKVRHILCEKHGKIMEAMEKLKSGMRFNEVAAQYSEDKARQGVCCSYYL

SEQ ID NO: 68376 - protein, 76 aa, Homo sapiens
MEPSSLELPADTVQRIAAELKCHPTDERVALHLDEEDKLRHFRECFYIPKIQDLPPEQPMVMKWGSVLGLQEMRVL

SEQ ID NO: 68377 - protein, 158 aa, Homo sapiens
MWALCSLLRSAAGRTMSQGRTISQAPARRERPRKDPLRHLRTREKRGPSGCSGGPNTVYLQVVAAGSRDSGAALYVFSEFNRYLFNCGEGVQRLMQEHKLKVARLDNIFLTRMHWSNVGGLSGMILTLKETGLPKCVLSGPPQLLCGPTLPQNTRMKP

SEQ ID NO: 68378 - protein, 109 aa, Homo sapiens
MYHQPSAPAGIGGPYMFQWNDDRCNMKNNFICKYSDEKPAVPSREAEGEETELTTPVLPEETQEEDAKKTFKESREAALNLAYILIPSIPLLLLLVVTTVVCWVWICRK

SEQ ID NO: 68379 - protein, 155 aa, Homo sapiens
MSEEQFGGDGAAAAATAAVGGSAGEQEGAMVAATQGAAAAAGSGAGTGGGTASGGTEGGSAESEGAKIDASKNEEDEGKMFIGGLSWDTTKKDLKDYFSKFGEVVDCTLKLDPITGRSRGFGFVLFKESESVDKVMDQKEHKLNGKVIDPKRAKA

SEQ ID NO: 68380 - protein, 1508 aa, Homo sapiens
MEPTAKGRTEESFSYVIRAPSSEGFDIMNVDVKIDTSWIFQDMEDSAEERECLQEEAAGRPDMDMGALRRQLESSEQKLSAAEDKYVTSESGLRSRIQELELSERKLLRKVDQLSTHVAQERSAWLQAQEKLAALQGELASQIREESVARRQQWRLRRLQERLRRKDEALGQQAAALERCRRTQRRQLGLVREQERVLREQVQRLERNVRRLCRAAGLLLAQWDTAAPGSQGATEAAAELRALQARAERSEREREEAARSLQEHRATERQLRGQLEELRCCIYGLKLSEIGLQGQVEDLAQQNQCLREELGAQAPIGHCSLDALGCVQGDSLPLPREEALDPCRSQDWRNSLRSNDAPRQRAPAGQSPEGPCTWSRIRPGRASSVLAPGPETTSELPRDLAGSNREQLTLAEPSLDEQILLLVCGCPPEECLDESLLRMDLAWISENLAADPAAEAFLLVQTSALPLWGPAGDSASWRPLLLQEVPSDGQKIQEELATRSPPPPKATGHPGWDCHQTRGRGASLFHEAPYISNHPFLKKHPKDLKDTWNNGGGSLAGRTEEGKARGTLGRKGKNLGDKYQLSQESHQNLSLENGAGAAEDVQDQNGASETKAATCRPGSWQEFLMPLLQGEASVSKEGPESLSRRERVEGYVWGLRGGLSSENEEVAPPATFSRAHETKEPWPTDSQLLAGKVRATGRTARGKEENQVWLGNALLLQGGSLEDKGLEEEDEMPHQEASGLGCRGAPEEPDSQEHESKEMLFFAGETGLPLFPRFALSVEGAEPTDHGHPQAVSKGHNRCALTIDELAQDVEACFQQLSTLQPGSRGWQCSASACRGENWSFAQKWHSGWERAHSQQVWGNWGICSNEEAKSKESGEGDKPGKTTALGTSEVPGNPGTLPHWDEASPNPPQGPAEPWGALERVRSRFHQLISGLKKQRSQILHDNTKLHGDQERFHERVCALEREREREVTKISRLERDNHRLVGDISQLKKELDQYLQAISDLEDCNGKSYCKILELEEENETLKGNLGQLQKATSESVRKSKDTMEQVTLENWKLQTLISELGVSYKELIKDIVLGIEDMIRALSGENEHLLRRVHVLEREVTLQRSTDQGRLVRGREHLQGKAKMHALDKEVQVTPLTGQLLSRACGPPLEEEMSLAAGQTGPSTGTGNSRRGADSPPPSLVWRNTGVANALQGNVSGAEVKEAHLEKEEKRPRCSVAQGQALSSLSNGPMLRDSEAEVTEEDPRLRAQQLHHRVLTLQCQLRDQGAAHQASLDEATRLQEELQAKLEELQKKQHEAKLAVTPLKAKIASLVRKCRERNRLITHLLQELHRHGLGNLLLSELAQNMLNDVALAEYTATFLAPGVPETSHHLDVKSEMTAALRAQTYLLNPEMDSVLQSSLSSESWPIPEPEWPAQTAQLDSLKLPLSLVSTLDPGTCLAAVTVEPGLPAQRLQEKGGMPCPALQVDNVPAPSELLSPARILAFHQELRQSICSNSQVHKSPLELEM

SEQ ID NO: 68381 - protein, 286 aa, Homo sapiens
MAPAGVSLRATILCLLAWAGLAAGDRVYIHPFHLVIHNESTCEQLAKANAGKPKDPTFIPAPIQAKTSPVDEKALQDQLVLVAAKLDTEDKLRAAMVGMLANFLGFRIYGMHSELWGVVHGATVLSPTAVFGTLASLYLGALDHTADRLQAILGVPWKDKNCTSRLDAHKVLSALQAVQGLLVAQGRADSQAQLLLSTVVGVFTAPGLHLKQPFVQGLALYTPVVLPRSLDFTELDVAAEKIDRFMQAVTGWKTGCSLMGASVDSTLAFNTYVHFQGSCSVTQAAV

SEQ ID NO: 68382 - protein, 409 aa, Homo sapiens
  MOD_RES (1)..(1): Any amino acid
XVVTDDDGQAPEAKDGSSFSGRVFRVTFLMLAVSLTVPLLGAMMLLESPIDPQPLSFKEPPLLLGVLHPNTKLRQAERLFENQLVGPESIAHIGDVMFTGTADGRVVKLENGEIETIARFGSGPCKTRDDEPVCGRPLGIRAGPNGTLFVADAYKGLFEVNPWKREVKLLLSSETPIEGKNMSFVNDLTVTQDGRKIYFTDSSSKWQRRDYLLLVMEGTDDGRLLEYDTVTREVKVLLDQLRFPNGVQLSPAEDFVLVAETTMARIRRVYVSGLMKGGADLFVENMPGFPDNIRPSSSGGYWVGMSTIRPNPGFSMLDFLSERPWIKRMIFKGSCAGCDLLFSQETVMKFVPRYSLVLELSDSGAFRRSLHDPDGLVATYISEVHEHDGHLYLGSFRSPFLCRLSLQAV

SEQ ID NO: 68383 - protein, 35 aa, Homo sapiens
MLDDNNHLIQCIMDSQNKGKTSECSQVSPNYSRVA

SEQ ID NO: 68384 - protein, 402 aa, Homo sapiens
MAKTPSDHLLSTLEELVPYDFEKFKFKLQNTSVQKEHSRIPRSQIQRARPVKMATLLVTYYGEEYAVQLTLQVLRAINQRLLAEELHRAAIQGRPPDTAASPRCHAQEGDPVDGTCVRDSCSFPEAVSGHPQASGSRSPGCPRCQDSHERKSPGSLSPQPLPQCKRHLKQVQLLFCEDHDEPICLICSLSQEHQGHRVRPIEEVALEHKKKIQKQLEHLKKLRKSGEEQRSYGEEKAVSFLKQTEALKQRVQRKLEQVYYFLEQQEHFFVASLEDVGQMVGQIRKAYDTRVSQDIALLDALIGELEAKECQSEWELLQDIGDILHRAKTVPVPEKWTTPQEIKQKIQLLHQKSEFVEKSTKYFSETLRSEMEMFNGESSGNGVCWPGVVAVFPCAVDLRGPI

SEQ ID NO: 68385 - protein, 32 aa, Homo sapiens
MVESIKHCIVLLQIAKDQSNAEKHADGMIVSL

SEQ ID NO: 68386 - protein, 1781 aa, Homo sapiens
  MOD_RES (1)..(1): Any amino acid
XPTSKDSGLKEKFKILLGLGTPRPNPRSAEGKQTEFIITAEILRELSMECGLNNRIRMIGQICEVAKTKKFEEHAVEALWKAVADLLQPERPLEARHAVLALLKAIVQGQGERLGVLRALFFKVIKDYPSNEDLHERLEVFKALTDNGRHITYLEEELADFVLQWMDVGLSSEFLLVLVNLVKFNSCYLDEYIARMVQMICLLCVRTASSVDIEVSLQVLDAVVCYNCLPAESLPLFIVTLCRTINVKELCEPCWKLMRNLLGTHLGHSAIYNMCHLMEDRAYMEDAPLLRGAVFFVGMALWGAHRLYSLRNSPTSVLPSFYQAMACPNEVVSYEIVLSITRLIKKYRKELQVVAWDILLNIIERLLQQLQTLDSPELRTIVHDLLTTVEELCDQNEFHGSQERYFELVERCADQRPESSLLNLISYRAQSIHPAKDGWIQNLQALMERFFRSESRGAVRIKVLDVLSFVLLINRQFYEEELINSVVISQLSHIPEDKDHQVRKLATQLLVDLAEGCHTHHFNSLLDIIEKVMARSLSPPPELEERDVAAYSASLEDVKTAVLGLLVILQTKLYTLPASHATRVYEMLVSHIQLHYKHSYTLPIASSIRLQAFDFLLLLRADSLHRLGLPNKDGVVRFSPYCVCDYMEPERGSEKKTSGPLSPPTGPPGPAPAGPAVRLGSVPYSLLFRVLLQCLKQESDWKVLKLVLGRLPESLRYKVLIFTSPCSVDQLCSALCSMLSGPKTLERLRGAPEGFSRTDLHLAVVPVLTALISYHNYLDKTKQREMVYCLEQGLIHRCASQCVVALSICSVEMPDIIIKALPVLVVKLTHISATASMAVPLLEFLSTLARLPHLYRNFAAEQYASVFAISLPYTNPSKFNQYIVCLAHHVIAMWFIRCRLPFRKDFVPFITKGLRSNVLLSFDDTPEKDSFRARSTSLNERPKSLRIARPPKQGLNNSPPVKEFKESSAAEAFRCRSISVSEHVVRRIQTSLTSASLGSADENSVAQADDSLKNLHLELTETCLDMMARYVFSNFTAVPKRSPVGEFLLAGGRTKTWLVGNKLVTVTTSVGTGTRSLLGLDSGELQSGPESSSSPGVHVRQTKEAPAKLESQAGQQVSRGARDRVRSMSGGHGLRVGALDVPASQFLGSATSPGPRTAPAAKPEKASAGTRVPVQEKTNLAAYVPLLTQGWAEILVRRPTGNTSWLMSLENPLSPFSSDINNMPLQELSNALMAAERFKEHRDTALYKSLSVPAASTAKPPPLPRSNTDSAVVMEEGSPGEVPVLVEPPGLEDVEAALGMDRRTDAYSRSSSVSSQEEKSLHAEELVGRGIPIERVVSSEGGRPSVDLSFQPSQPLSKSSSSPELQTLQDILGDPGDKADVGRLSPEVKARSQSGTLDGESAAWSASGEDSRGQPEGPLPSSSPRSPSGLRPRGYTISDSAPSRRGKRVERDALKSRATASNAEKVPGINPSFVFLQLYHSPFFGDESNKPILLPNESQSFERSVQLLDQIPSYDTHKIAVLYVGEGQSNSELAILSNEHGSYRYTEFLTGLGRLIELKDCQPDKVYLGGLDVCGEDGQFTYCWHDDIMQAVFHIATLMPTKDVDKHRCDKKRHLGNDFVSIVYNDSGEDFKLGTIKGQFNFVHVIVTPLDYECNLVSLQCRKDMEGLVDTSVAKIVSDRNLPFVARQMALHANMASQVHHSRSNPTDIYPSKWIARLRHIKRLRQRICEEAAYSNPSLPLVHPPSHSKAPAQTPAEPTPGYEVGQRKRLISSVEDFTEFV

SEQ ID NO: 68387 - protein, 133 aa, Homo sapiens
MNVTSLFSFTSPAVKRLLGWKQGDEEEKWAEKAVDALVKKLKKKKGAMEELEKALSCPGQPSNCVTIPRSLDGRLQVSHRKGLPHVIYCRVWRWPDLQSHHELKPLECCEFPFGSKQKEVCINPYHYKRVESP

SEQ ID NO: 68388 - protein, 187 aa, Homo sapiens
MNAEPLAGRERSSPLQWRVKRSCPSCGSELGVEEKRGKGNPISIQLFPPELVEHIISFLPVRDLVALGQTCRYFHEVCDGEGVWRRICRRLSPRLQDQGSGVRPWKRAAILNYTKGLYFQAFGGRRRCLSKSVAPLLAHGYRRFLPTKDHVFILDYVGTLFFLKNALVSTLGQMQWKRACRYVVLCR

SEQ ID NO: 68389 - protein, 43 aa, Homo sapiens
MANMNSDSRHLGTSEVDHERDPGPMNIQFEPSDLRSKRQGLTL

SEQ ID NO: 68390 - protein, 17 aa, Homo sapiens
MDEGMEISSEGNSLIKA

SEQ ID NO: 68391 - protein, 96 aa, Homo sapiens
MTSSRLWFSLLLAAAFAGRATALWPWPQNFQTSDQRYVLYPNNFQFQYDVSSAAQPGCSVLDEAFQRYRDLLFGSGSWPRPYLTEMGVLLCCPGWS

SEQ ID NO: 68392 - protein, 585 aa, Homo sapiens
MATKARVMYDFAAEPGNNELTVNEGEIITITNPDVGGGWLEGRNIKGERGLVPTDYVEILPSDGKDQFSCGNSVADQAFLDSLSASTAQASSSAASNNHQVGSGNDPWSAWSASKSGNWESSEGWGAQPEGAGAQRNTNTPNNWDTAFGHPQAYQGPDWDGPKSSSYFKDSESADAGGAQRGNSRASSSSMKIPLNKFPGFAKPGTEQYLLAKQLAKPKEKIPIIVGDYGPMWVYPTSTFDCVVADPRKGSKMYGLKSYIEYQLTPTNTNRSVNHRYKHFDWLYERLLVKFGSAIPIPSLPDKQVTGRFEEEFIKMRMERLQAWMTRMCRHPVISESEVFQQFLNFRDEKEWKTGKRKAERDELAGVMIFSTMEPEAPDLDLVEIEQKCEAVGKFTKAMDDGVKELLTVGQEHWKRCTGPLPKEYQKIGKALQSLATVFSSSGYQGETDLNDAITEAGKTYEEIASLVAEQPKKDLHFLMECNHEYKGFLGCFPDIIGTHKGAIEKVKESDKLVATSKITLQDKQNMVKRVSIMSYALQAEMNHFHSNRIYDYNSVIRLYLEQQVQFYETIAEKLRQALSRFPVM

SEQ ID NO: 68393 - protein, 117 aa, Homo sapiens
MMLRVLVGAVLPAMLLAAPPPINKLALFPDKSAWCEAKNITQIVGHSGCEAKSIQNRACLGQCFSYSVPNTFPQSTESLVHCDSCMPAQSMWEIVTLECPGHEEVPRVDKLVEKILH

SEQ ID NO: 68394 - protein, 85 aa, Homo sapiens
MEKEETTRELLLPNWQGSGSHGLTIAQRDDGVFVQEVTQNSPAARTGVVKEGDQIVGATIYFDNLQSGEVTQLLNTMGHHTVGLK

SEQ ID NO: 68395 - protein, 170 aa, Homo sapiens
MASELCKTISVARLEKHKNLFLNYRNLHHFPLELLKDEGLQYLERLYMKRNSLTSLPENLAQKLPNLVELYLHSNNIVVVPEAIGSLVKLQCLDLSDNALEIVCPEIGRLRALRHLRLANNQLQFLPPEVGDLKELQTLDISTNRLLTLPERLHMCLSLQYLTVDRNRLW

SEQ ID NO: 68396 - protein, 583 aa, Homo sapiens
MTSQSSVISNSCVTMERLSHMMERKAWCSQESALSEEEEDTTRPLETVTFKDVAVDLTQEEWEQMKPAQRNLYRDVMLENYSNLVTVGCQVTKPDVIFKLEQEEEPWVMEEEMFGRHCPEPRRGENCCASEVMAEGLKFKDVVIYFSQKEWECLHSAQKDLYRDVMLENYGNLVLLGLSDTKPNVISLLEQKKEPWMVKRKETKEWCPDWEFGRETKNLSPKENIYEIRSPQQEKARVIREIRCQVERQQGHQEGHFRPAVIPFTSMQCTAHREYQWLHTGEKSCECRKCKNAFRYQSCPIQHEIIHNKEKEPECGECRKIFNSGSDLIKHQTLHESKKHSENNKCAFNHDSGITQPQSINTGEKPHKCKECGKAFRSSSQISQHQRMHLGEKPYKCRECGKAFPSTAQLNLHQRIHTDEKYYESKACGKAFTRPSHLFRHQRIHTGEKPHKCKECGKAFRYDTQLSLHQIIHTGERRYECRECGKVYSCASQLSLHQRIHTGEKPHECKECGKAFISDSHLIRHQSVHTGEKPCKCKECGKSFRRGSELTRHQRAHTGEKPYECKECEKAFTCSTELVRHQK

SEQ ID NO: 68397 - protein, 54 aa, Homo sapiens
MASALWTVLPSRMSLRSLKWSLLLLSLLSFFVMWYLSLPHYNVIERVNWMYFYE

SEQ ID NO: 68398 - protein, 76 aa, Homo sapiens
MAAQSAPKVVLKSTTKMSLNERFTNMLKNKQPTPVNIRASMQQQQQLASARNRRLAQQMENRPSVQAALKLKQVGV

SEQ ID NO: 68399 - protein, 137 aa, Homo sapiens
MMLSCLFLLKALLALGSLESWITAGEHAKEGECPPHKNPCKELCQGDELCPAEQKCCTTGCGRICRDIPKGRGGDCPKVLVGLCIVGCVMDENCQAGEKCCKSGCGRFCVPPVLPPKLTMNPNWTVRSDSELEIPVP

SEQ ID NO: 68400 - protein, 89 aa, Homo sapiens
MEPRGEFQSPRGLALKKGCAAACFKHSRVDPEELFTKLDRIGKGSFGEVYKGIDNHTKEVVAIKIIDLEEAEDEIEDIQQEITVLSQCD

SEQ ID NO: 68401 - protein, 192 aa, Homo sapiens
  MOD_RES (1)..(1): Any amino acid
XMTERGSVARPTQGPETPRSPEGTTEAATQDGKEQPELPCAMAMGTPSTTERISTSGQIRSVIRRSWESGHAHPMSREPSPRRRLDPATLSRTPSQEQLIAELQGRLGIQPEAEEPAEAAGPSAQDWLTEGVIITVQPRGKRAGGQLVEKVARRCPWLGLGQSQAPGVRVLPWPQCWPEGRSGERVGVSCLL

SEQ ID NO: 68402 - protein, 465 aa, Homo sapiens
MDSPGYNCFVDKDKMDAAIQDLGPKELSCTELQELKQLARQGYWAQSHALRGKVYQRLIRDIPCRTVTPDASVYSDIVGKIVGKHSSSCLPLPEFVDNTQVPSYCLNARGEGAVRKILLCLANQFPDISFCPALPAVVALLLHYSIDEAECFEKACRILACNDPGRRLIDQSFLAFESSCMTFGDLVNKYCQAAHKLMVAVSEDVLQVYADWQRWLFGELPLCYFARVFDVFLVEGYKVLYRVALAILKFFHKVRAGQPLESDSVKQDIRTFVRDIAKTVSPEKLLEKAFAIRLFSRKEIQLLQMANEKALKQKGITVKQKRQFVHLAVHAENFRSEIVSVREMRDIWSWVPERFALCQPLLLFSSLQHGYSLARFYFQCEGHEPTLLLIKTTQKEVCGAYLSTDWSERNKFGGKLGFFGTGECFVFRLQPEVQRYEWVVIKHPELTKPPPLMAAEPTAPLSHSA

SEQ ID NO: 68403 - protein, 213 aa, Homo sapiens
MLMPKKNRIAIYELLFKEGVMVAKKDVHMPKHPELADKNVPNLHVMKAMQSLKSRGYVKEQFAWRHFYWYLTNEGIQYLRDYLHLPPEIVPATLRRSRPETGRPRPKGLEGERPARLTRGEADRDTYRRSAVPPGADKKAEAGAGSATEFQFVSIFLFVFHEPSLVLASVWLLCKLWGCHIVWVGPVNQFPPPTFFQIPNFTLSCSMQTFVNT

SEQ ID NO: 68404 - protein, 396 aa, Homo sapiens
MLSSFPVVLLETMSHYTDEPRFTIEQIDLLQRLRRTGMTKHEILHALETLDRLDQEHSDKFGRRSSYGGSSYGNSTNNVPASSSTATASTQTQHSGMSPSPSNSYDTSPQPCTTNQNGRENNERLSTSNGKMSPTRYHANSMGQRSYSFEASEEDLDVDDKVEELMRRDSSVIKEEIKAFLANRRISQAVVAQVTGISQSRISHWLLQQGSDLSEQKKRAFYRWYQLEKTNPGATLSMRPAPIPIEDPEWRQTPPPVSATSGTFRLRRGSRFTWRKECLAVMESYFNENQYPDEAKREEIANACNAVIQKPGKKLSDLERVTSLKVYNWFANRRKEIKRRANIEAAILESHGIDVQSPGGHSNSDDVDGNDYSEQVSPCAAGRGSWCLSRGYSGTA

SEQ ID NO: 68405 - protein, 158 aa, Homo sapiens
MSCVHYKFSSKLNYDTVTFDGLHISLCDLKKQIMGREKLKAADCDLQITNAQTKEEYTDDNALIPKNSSVIVRRIPIGGVKSTSKTYVISRTEPAMATTKAIDDSSASISLAQLTKTANLAEANASEEDKIKAMMSQSGHEYDPINYMKKPLGPPPPS

SEQ ID NO: 68406 - protein, 481 aa, Homo sapiens
MAFSKLLEQAGGVGLFQTLQVLTFILPCLMIPSQMLLENFSAAIPGHRCWTHMLDNGSAVSTNMTPKALLTISIPPGPNQGPHQCRRFRQPQWQLLDPNATATSWSEADTEPCVDGWVYDRSVFTSTIVAKWDLVCSSQGLKPLSQSIFMSGILVGSFIWGLLSYRFGRKPMLSWCCLQLAVAGTSTIFAPTFVIYCGLRFVAAFGMAGIFLSSLTLMVEWTTTSRRAVTMTVVGCAFSAGQAALGGLAFALRDWRTLQLAASVPFFAISLISWWLPESARWLIIKGKPDQALQELRKVARINGHKEAKNLTIEVLMSSVKEEVASAKEPRSVLDLFCVPVLRWRSCAMLVVNFSLLISYYGLVFDLQSLGRDIFLLQALFGAVDFLGRATTALLLSFLGRRTIQAGSQAMAGLAILANMLVPQDLQTLRVVFAVLGKGCFGISLTCLTIYKAELFPTPVRKSTAAQGNRQEAVTVESTSL

SEQ ID NO: 68407 - protein, 1323 aa, Homo sapiens
MSFLEEARAAGRAVVLALVLLLLPAVPVGASVPPRPLLPLQPGMPHVCAEQELTLVGRRQPCVQALSHTVPVWKAGCGWQAWCVGHERRTVYYMGYRQVYTTEARTVLRCCRGWMQQPDEEGCLSDVGECANANGGCAGRCRDTVGGFYCRWPPPSHQLQGDGETCQDVDECRTHNGGCQHRCVNTPGSYLCECKPGFRLHTDSRTCLAINSCALGNGGCQHHCVQLTITRHRCQCRPGFQLQEDGRHCVRRSPCANRNGSCMHRCQVVRGLARCECHVGYQLAADGKACEDVDECAAGLAQCAHGCLNTQGSFKCVCHAGYELGADGRQCYRIEMEIVNSCEANNGGCSHGCSHTSAGPLCTCPRGYELDTDQRTCIDVDDCADSPCCQQVCTNNPGGYECGCYAGYRLSADGCGCEDVDECASSRGGCEHHCTNLAGSFQCSCEAGYRLHEDRRGCSPLEEPMVDLDGELPFVRPLPHIAVLQDELPQLFQDDDVGADEEEAELRGEHTLTEKFVCLDDSFGHDCSLTCDDCRNGGTCLLGLDGCDCPEGWTGLICNETCPPDTFGKNCSFSCSCQNGGTCDSVTGACRCPPGVSGTNCEDGCPKGYYGKHCRKKCNCANRGRCHRLYGACLCDPGLYGRFCHLTCPPWAFGPGCSEECQCVQPHTQSCDKRDGSCSCKAGFRGERCQAECELGYFGPGCWQACTCPVGVACDSVSGECGKRCPAGFQGEDCGQECPVGTFGVNCSSSCSCGGAPCHGVTGQCRCPPGRTGEDCEADCPEGRWGLGCQEICPACQHAARCDPETGACLCLPGFVGSRCQDVCPAGWYGPSCQTRCSCANDGHCHPATGHCSCAPGWTGFSCQRACDTGHWGPDCSHPCNCSAGHGSCDAISGLCLCEAGYVGPRCEQQCPQGHFGPGCEQRCQCQHGAACDHVSGACTCPAGWRGTFCEHACPAGFFGLDCRSACNCTAGAACDAVNGSCLCPAGRRGPRCAETCPAHTYGHNCSQACACFNGASCDPVHGQCHCAPGWMGPSCLQACPAGLYGDNCRHSCLCQNGGTCDPVSGHCACPEGWAGLACEKECLPRDVRAGCRHSGGCLNGGLCDPHTGRCLCPAGWTGDKCQSPCAKGTFGPHCEGRCACRWGGPCHLATGACLCPPGWRGAPGVRMPACGAGLERPVPSAAAARLALPATTSLGPAAVPLASLAPAASRPAHPAALGRTVRRCASVPVRTRPATLPPGPAHVLLATTAPAASNDVRPGGMGQAVNSCVGVSTGAPVMRPRGPAAAPLGSSGRTATSPVRRAASAPTAPTCVGVGRGRPATL

SEQ ID NO: 68408 - protein, 563 aa, Homo sapiens
MTVLEITLAVILTLLGLAILAILLTRWARRKQSEMYISRYSSEQSARLLDYEDGRGSRHAYSTQSDTSYDNRERSKRDYTPSTNSLVSMASKFSLGQTELILLLMCFILALSRSSIGSIKCLQTTEEPPSRTAGAMMQFTAPIPGATGPFKLSQKTIVQTLGPIVQYPGSNAGPPSAPRGPPMAPIIISQRTARIPQVHTMDSSGKITLTPVVILTGYMDEELAKKSCSKIQILKCGGTARSQNSREENKEALKNDIIFTNSVESLKSAHIKEPEREGKGTDLEKDKIGMEVKVDSDAGIPKRQETQLKISEMSVPQGQGAQIKKSVSDVPRGQESQVKKSESGVPKGQEAQVTKSGLVVLKGQEAQVEKSEMGVPRRQESQVKKSQSGVSKGQEAQVKQRESVVLKGQEAQVEKSELKVPKGQEGQVEKTEADVPKEQEVQEKKSEAGVLKGPESQVKNTEVSVPETLESQVKKSESGVLKGQEAQEKKESFEDKGNNDKEKERDAEKDPNKKEKGDKNTKGDKGKDKVKGKRESEINGEKSKGSKRAKANTGRKYNKKVEE

SEQ ID NO: 68409 - protein, 166 aa, Homo sapiens
MGRGARVPSEAPGAGVERRWLGAALVALCLLPALVLLARLGAPAVPAWSAAQSIFRGSFWSWGPSPMPPTHAFFPEGRRRCAGPLGGPPHPGPGPTGPPQTPLHADSSQAALGPLQPHLQDPLLPAEPAEPAGDAAGPSCRLPHVERRVPLQLPRGGPRAAQRPPD

SEQ ID NO: 68410 - protein, 89 aa, Homo sapiens
IDVSQSVEPTHPHGLEFLFRDCRNVSQFFQKGGVKEALSERELFNAVSGLNITADNEADFLAEVTATPCKDDGDARISANSCLSMGLSC

SEQ ID NO: 68411 - protein, 280 aa, Homo sapiens
MVFCLSSEEPRRPLRSDMVHFQASEVQQLLHNKFVVILGDSIQRAVYKDLVLLLQKDSLLTAAQLKAKGELSFEQDQLVAGGQLGELHNGTQYREVRQFCSGSGHHLVRFYFLTRVYSEYLEDVLEELTYGPAPDLVIINSCLWDLSRYGRCSMESYRENLERVFVRMDQVLPDSCLLVWNMAMPLGERITGGFLLPELQPLAGSLRRDVVEGNFYSATLAGDHCFDVLDLHFHFRHAVQHRHRDGVHWDQHAHRHLSHLLLTHVADAWGVELPKRGYPP

SEQ ID NO: 68412 - protein, 156 aa, Homo sapiens
MASNDKGMAPSLGSPWASQMGPWDAILKAVKDQLPSLDSDSPLSDYGEEELFIFQRNQTSLIPDLSEELAEDPADGDKSRAWVAAAEESLPEPVLVPAELATEPGCRQNTRTKDASSQEGRDPGRPFESSGEVSALLGMAEEPPRWLEGDLGSLSF

SEQ ID NO: 68413 - protein, 92 aa, Homo sapiens
MGAPATRRCVEWLLGLYFLSHIPITLFMDLQAVLPRELYPVEFRNLLKWYAKEFKDPLLQEPPAWFKSFLFCELVFQLPFFPIATYAFLKGW

SEQ ID NO: 68414 - protein, 324 aa, Homo sapiens
  MOD_RES (1)..(1): Any amino acid
XLVGQARGALEEKDFQKAEGLLLRAQRPGLALNYYKEAGLWSDALRICKDYVPSQLEALQEEYEREATKKGARGVEGFVEQARHWEQAGEYSRAVDCYLKVRDSGNSGLAEKCWMKAAELSIKFLPPQRNMEVVLAVGPQLIGIGKHSAAAELYLNLDLVKEAIDAFIEGEEWNKAKRVAKELDPRYEDYVDQHYKEFLKNQGKVDSLVGVDVIAALDLYVEQGQWDKCIETATKQNYKILHKYVALYATHLIREGSSAQALALYVQHGAPANPQNFNIYKRIFTDMVSSPGTNCAEAYHSWADLRDVLFNLAVLSPSSSVKTW

SEQ ID NO: 68415 - protein, 144 aa, Homo sapiens
MTPPRLFWVWLLVAGTQGSGPIMLDEVQCTGTEASLADCKSLGWLKSNCRHERDAGVVCTNETRSTHTLDLSRELSEALGQIFDSQRGCDLSISVNVQGEDALGFCGHTVILTANLEAQALWKEPGSNVTMSVDAECVPMVRDL

SEQ ID NO: 68416 - protein, 132 aa, Homo sapiens
  MOD_RES (1)..(1): Any amino acid
XGVAAEPGTPFSIGRFATLTLQERRDRGAEKEHKRYHSLGNISRGGSGGSGSGGEKPSGPVPRSRLDPAKVLGTALCPRIHEVPLLEPLVCKKIAQERLTVLLFLEDCIITACQEGLICTWARPGKARSPSW

SEQ ID NO: 68417 - protein, 1132 aa, Homo sapiens
MGLLQLLAFSFLALCRARVRAQEPEFSYGCAEGSCYPATGDLLIGRAQKLSVTSTCGLHKPEPYCIVSHLQEDKKCFICNSQDPYHETLNPDSHLIENVVTTFAPNRLKIWWQSENGVENVTIQLDLEAEFHFTHLIMTFKTFRPAAMLIERSSDFGKTWGVYRYFAYDCEASFPGISTGPMKKVDDIICDSRYSDIEPSTEGEVIFRALDPAFKIEDPYSPRIQNLLKITNLRIKFVKLHTLGDNLLDSRMEIREKYYYAVYDMVVRGNCFCYGHASECAPVDGFNEEVEGMVHGHCMCRHNTKGLNCELCMDFYHDLPWRPAEGRNSNACKKCNCNEHSISCHFDMAVYLATGNVSGGVCDDCQHNTMGRNCEQCKPFYYQHPERDIRDPNFCERCTCDPAGSQNEGICDSYTDFSTGLIAGQCRCKLNVEGEHCDVCKEGFYDLSSEDPFGCKSCACNPLGTIPGGNPCDSETGHCYCKRLVTGQHCDQCLPEHWGLSNDLDGCRPCDCDLGGALNNSCFAESGQCSCRPHMIGRQCNEVEPGYYFATLDHYLYEAEEANLGPGVSIVERQYIQDRIPSWTGAGFVRVPEGAYLEFFIDNIPYSMEYDILIRYEPQLPDHWEKAVITVQRPGRIPTSSRCGNTIPDDDNQVVSLSPGSRYVVLPRPVCFEKGTNYTVRLELPQYTSSDSDVESPYTLIDSLVLMPYCKSLDIFTVGGSGDGVVTNSAWETFQRYRCLENSRSVVKTPMTDVCRNIIFSISALLHQTGLACECDPQGSLSSVCDPNGGQCQCRPNVVGRTCNRCAPGTFGFGPSGCKPCECHLQGSVNAFCNPVTGQCHCFQGVYARQCDRCLPGHWGFPSCQPCQCNGHADDCDPVTGECLNCQDYTMGHNCERCLAGYYGDPIIGSGDHCRPCPCPDGPDSGRQFARSCYQDPVTLQLACVCDPGYIGSRCDDCASGYFGNPSEVGGSCQPCQCHNNIDTTDPEACDKETGRCLKCLYHTEGEHCQFCRFGYYGDALQQDCRKCVCNYLGTVQEHCNGSDCQCDKATGQCLCLPNVIGQNCDRCAPNTWQLASGTGCDPCNCNAAHSFGPSCNEFTGQCQCMPGFGGRTCSECQELFWGDPDVECRGN

SEQ ID NO: 68418 - protein, 418 aa, Homo sapiens
NSTNLSPSTQFPADADAVATEPATAVLASQPQSKEHFRSLEERKKQHKEGLYLSDTLPRKKTTSSISPHFSSATMGRSITPKAHLPLGQSNSCGSVLPPSLAAMAKDSESRRMLRGRMNSSAGYNHQQMSEGHRQKSEFYNRTASESNVYLNSFHYPDHSYKDQAFDTLSLDSSDSMETSISACSPDNISSASTSNIARIEEMERLLKQAHAEKTRLLESREREMEAKKRALEEEKRRREILEKRLQEETSQRQKLIEKEVKIRERQRAQARPLTRYLPVRKEDFDLRSHVETAGHNIDTCYHVSITEKTCRGFLIKMGGKIKTWKKRWFVFDRNKRTFSYYADKHETKLKGVIYFQAIEEVYYDHLKNANKSPNPLLTFSVKTHDRIYYMVAPSPEAMRIWMDVIVTGAEGYTHFLL

SEQ ID NO: 68419 - protein, 185 aa, Homo sapiens
MPGRSCVALVLLAAAVSCAVAQHAPPWTEDCRKSTYPPSGPTYRGAVPWYTINLDLPPYKRWHELMLDKAPVLKVIVNSLKNMINTFVPSGKIMQVVDEKLPGLLGNFPGPFEEEMKGEIISFNIFYELFTICTSIVAEDKKGHLIHGRNMDFGVFLGWNINNDTWVITEQLKPLTVNLDFQRNN

SEQ ID NO: 68420 - protein, 106 aa, Homo sapiens
MNVTSLFSFTSPAVKRLLGWKQGDEEEKWAEKAVDALVKKLKKKKGAMEELEKALSCPGQPSNCVTIPRSLDGRLQVSHRKGLPHVIYCRVWRWPDLQSHHELKPL

SEQ ID NO: 68421 - protein, 1055 aa, Homo sapiens
MNGNTALAIAKRLGYISVVDTLKVVTEEVTTTTTTITEKHKLNVPETMTEVLDVSDEEGDDTMTGDGGEYLRPEDLKELGDDSLPSSQFLDGMNYLRYSLEGGRSDSLRSFSSDRSHTLSHASYLRDSAVMDDSVVIPSHQVSTLAKEAERNSYRLSWGTENLDNVALSSSPIHSGFLVSFMVDARGGAMRGCRHNGLRIIIPPRKCTAPTRVTCRLVKRHRLATMPPMVEGEGLASRLIEVGPSGAQFLGPVIVEIPHFAALRGKERELVVLRSENGDSWKEHFCDYTEDELNEILNGMDEGGSFLVLVLDSPEDLEKKRICRIITRDFPQYFAVVSRIKQDSNLIGPEGGVLSSTVVPQVQAVFPEGALTKRIRVGLQAQPMHSELVKKILGNKATFSPIVTLEPRRRKFHKPITMTIPVPKASSDVMLNGFGGDAPTLRLLCSITGGTTPAQWEDITGTTPLTFVNECVSFTTNVSARFWLIDCRQIQESVTFASQVYREIICVPYMAKFVVFAKSHDPIEARLRCFCMTDDKVDKTLEQQENFAEVARSRDVEVLEGKPIYVDCFGNLVPLTKSGQHHIFSFFAFKENRLPLFVKVRDTTQEPCGRLSFMKEPKSTRGLVHQAICNLNITLPIYTKESESDQEQEEEIDMTSEKNPQDEQERIEERLAYIADHLGFSWTELARELDFTEEQIHQIRIENPNSLQDQSHALLKYWLERDGKHATDTNLVECLTKINRMDIVHLMETNTEPLQERISHSYAEIEQTITLDHSEGFSVLQEELCTAQHKQKEEQAVSKESETCDHPPIVSEEDISVGYSTFQDGVPKTEGDSSATALFPQTHKEQVQQDFSGKMQDLPEESSLEYQQEYFVTTPGTETSETQKAMIVPSSPSKTPEEVSTPAEEEKLYLQTPTSSERGGSPIIQEPEEPSEHREESSPRKTSLVIVESADNQPETCERLDEDAAFEKGDDMPEIPPETVTEEEYIDEHGHTVVKKVTRKIIRRYVSSEGTEKEEIMVQGMPQEPVNIEEGDGYSKVIKRVVLKSDTEQSEDNNE

SEQ ID NO: 68422 - protein, 155 aa, Homo sapiens
MEYMAESTDRSPGHILCCECGVPISPNPANICVACLRSKVDISQGIPKQVSISFCKQCQRYFQPPGTWIQCALESRELLALCLKKIKAPLSKVRLVDAGFVWTEPHSKRLKVKLTIQKEVMNGAILQQVFVVDYVVQSQMCGDCHRVEAKDFWKA

SEQ ID NO: 68423 - protein, 634 aa, Homo sapiens
MSWESGAGPGLGSQGMDLVWSAWYGKCVKGKGSLPLSAHGIVVAWLSRAEWDQVTVYLFCDDHKLQRYALNRITVWRSRSGNELPLAVASTADLIRCKLLDVTGGLGTDELRLLYGMALVRFVNLISERKTKFAKVPLKCLAQEVNIPDWIVDLRHELTHKKMPHINDCRRGCYFVLDWLQKTYWCRQLENSLRETWELEEFREGIEEEDQEEDKNIVVDDITEQKPEPQDDGKSTESDVKADGDSKGSEEVDSHCKKALSHKELYERARELLVSYEEEQFTVLEKFRYLPKAIKAWNNPSPRVECVLAELKGVTCENREAVLDAFLDDGFLVPTFEQLAALQIEYEENVDLNDVLVPKPFSQFWQPLLRGLHSQNFTQALLERMLSELPALGISGIRPTYILRWTVELIVANTKTGRNARRFSAGQWEARRGWRLFNCSASLDWPRMVESCLGSPCWASPQLLRIIFKAMGQGLPDEEQEKLLRICSIYTQSGENSLVQEGSEASPIGKSPYTLDSLYWSVKPASSSFGSEAKAQQQEEQGSVNDVKEEEKEEKEVLPDQVEEEEENDDQEEEEEDEDDEDDEEEDRMEVGPFSTGQESPTAENARLLAQKRGALQGSAWQVSSGLGSYHWTQ

SEQ ID NO: 68424 - protein, 99 aa, Homo sapiens
MLSLKKYLTEGLLQFTILLSLIGVRVDVDTYLTSQLPPLREIILGPSSAYTQTQFHNLRNTLDGYGIHPKSIDLDNYFTARRLLSQVRALDRFQVPTTE

SEQ ID NO: 68425 - protein, 77 aa, Homo sapiens
KDELYLNLVLEYVPETVYRVARHFTKAKLTIPILYVKFCYPVPAAGVHVPALPQLGLHPLPGRVSPRHQAPEPAGGP

SEQ ID NO: 68426 - protein, 118 aa, Homo sapiens
MDNLSDTLKKLKITAVDKTEDSLEGCLDCLLQALAQNNTETSEKIQASGILQLFASLLTPQSSCKAKVANIIAEVAKNGEVYLKNFSAGNVFSFTSYLVYANSMCGCWIDFTTGAAAK

SEQ ID NO: 68427 - protein, 328 aa, Homo sapiens
MLGSRAAGFARGLRAVALAWLPGWRGRSFALARAAGAPHGGDLQPPACPEPRGRQLSLSAAAVVDSAPRPLQPYLRLMRLDKPIGTWLLYLPCTWSIGLAAEPGCFPDWYMLSLFGTGAILMRGAGCTINDMWDQDYDKKVTRTANRPIAAGDISTFQSFVFLGGQLTLALGVLLCLNYYSIALGAGSLLLVITYPLMKRISYWPQLALGLTFNWGALLGWSAIKGSCDPSVCLPLYFSGVMWTLIYDTIYAHQDKRDDVLIGLKSTALRFGENTKPWLSGFSVAMLGALSLVGVNSGQTAPYYAALGAVGAHLTHQKWGLEILPRLV

SEQ ID NO: 68428 - protein, 47 aa, Homo sapiens
MNAGPSWNKVQHSKNSSGKRQSKSQVPHASSQPRSSLTAVTQPTEEK

SEQ ID NO: 68429 - protein, 97 aa, Homo sapiens
MEPKVINQMLSKAAQSGQWKYGQHACFCQKQGSGNNWAYGYSVHGPRHEESIMNIIRKEVEKCDSFSGFFIIMSMAGGTGSGLGAFVTQNLEDQYSN

SEQ ID NO: 68430 - protein, 108 aa, Homo sapiens
MSTRTPLPTVNERDTENHTSHGDGRQEVTSRTSRSGARCRNSIASCADEQPHIGNYRLLKTIGKGNFAKVKLARHILTGREVAIKIIDKTQLNPTSLQKPDRNVRLRS

SEQ ID NO: 68431 - protein, 210 aa, Homo sapiens
MEDEEGPEYGKPDFVLLDQVTMEDFMRNLQLRFEKGRIYTYIGEVLVSVNPYQELPLYGPEAIARYQGRELYERPPHLYAVANAAYKAMKHRSRDTCIVISGESGAGKTEASKHIMQYIAAVTNPSQRAEVERVKDVLLKSTCVLEAFGNARTNRNHNSSRFGKYMDINFDFKGDPIGGHIHSYLLEKVGSLGSSSSTWVKETSTPSTNC

SEQ ID NO: 68432 - protein, 102 aa, Homo sapiens
MGCASAKHVATVQNEEEAQKGKNYQNGDVFGDEYRIKPVEEVKYMKNGAEEEQKIAARNQENLEKSASSNVRLKTNKEVPGLVHQPRAKYITIGKLKRKEKN

SEQ ID NO: 68433 - protein, 209 aa, Homo sapiens
MAEAEEQETGSLEESTDESEEEESEEEPKLKYERLSNGVTEILQKDAASCMTVHDKFLALGTHYGKVYLLDVQGNITQKFDVSPVKINQISLDESGEHMGVCSEDGKVQVFGLYSGEEFHETFDCPIKIIAVHPHFVRSSCKQFVTGGKKLLLFERSWMNRWKSAVLHEGEGNIRSVKWRGHLIAWANNMSKKPEAWRVAKKMKSYLNN

SEQ ID NO: 68434 - protein, 177 aa, Homo sapiens
MPELAVQKVVVHPLVLLSVVDHFNRIGKVGNQKRVVGVLLGSWQKKVLDVSNSFAVPFDEDDKDDSVWFLDHDYLENMYGMFKKVNARERIVGWYHTGPKLHKNDIAINELMKRYCPNSVLVIIDVKPKDLGLPTEAYISVEEVHDDGTPTSKTFEHVTSEIGAEEAEEVGVEHLLR

SEQ ID NO: 68435 - protein, 40 aa, Homo sapiens
MPTGDFDSKPSWADQVEEEGEDGVIPKALPSQLGSSCPWS

SEQ ID NO: 68436 - protein, 234 aa, Homo sapiens
MLPGYRDPYSSRPLTRGEIGCFLSHYSVWKEVIDRELEKTLVIEDDVRFEHQFKKKLMKLMDNIDQAQLDWELIYIGRKRMQVKEPEKAVPNVANLVEADYSYWTLGYVISLEGAQKLVGANPFGKMLPVDEFLPVMYNKHPVAEYKEYYESRDLKAFSAEPLLIYPTHYTGQPGYLSDTETSTIWDNETVATDWDRTHAWKSRKQSRIYSNAKNTEALPPPTSLDTVPSRDEL

SEQ ID NO: 68437 - protein, 136 aa, Homo sapiens
  MOD_RES (1)..(1): Any amino acid
XCGINPARSFGSAVITHNFSNHWIFWVGPFIGGALAVLIYDFILAPRSSDLTDRVKVWTSGQVEEYDLDADDINSRSFLGTKIYQFTHSLEVVEEVKERDPPASRPSEHDGRCARKSPLAPKLLTDSPAQVPGILP

SEQ ID NO: 68438 - protein, 22 aa, Homo sapiens
MASPDWGYDDKNGPEQWSKLYP

SEQ ID NO: 68439 - protein, 438 aa, Homo sapiens
MPGVPGPGPELAAALEEQLGRALEELRAVAEAGRVAVTQAAEVAVATVEPVARAAEELRAERAALSRRLDALSRQVEVLSLRLGVPLVSGLEPELEPSELLLAAADPEALFQAAEDAGTPVAHPPAFSTRRRSSTGTTRSTSLMEAEPAEPLAAAVEAANGAEQTRVNKAPEGRSPLSAEELMTIEDEGVLDKMLDQSTDFEERKLIRAALRELRQRKRDGSGSTMMQTKTFSSSSSSKKMGSIFDREDQASPRAGSLAALEKRQAEKKKELMKAQSLPKTSASQARKAMIEKLEKEGAAGSPGGPRAAVQRSTSFGVPNANSIKQMLLDWCRAKTRGYEHVDIQNFSSSWSDGMAFCALVHNFFPEAFDYGQLSPQNRRQNFEVAFSSAETHADCPQLLDTEDMVRLREPDWKCVYTYIQEFYRCLVQKGLVKTKKS

SEQ ID NO: 68440 - protein, 354 aa, Homo sapiens
MEERTITIEIPEVLKKQLEDDCYYINRRKRLVKLPCQTNIITILESYVKHFAINAAFSANERPRHHHVMPHANMNVHYIPAEKNVDLCKEMVDGLRITFDYTLPLVLLYPYEQAQYKKVTSSKFFLPIKESATSTNSQEELSPSPPLLNPSTPQSTESQPTTGEPATPKRRKAEPEALQSLRRSTRHSANCDRLSESSASPQPKRRQQDTSASMPKLFLHLEKKTPVHSRSSSPIPLTPSKEGSAVFAGFEGRRTNEINEVLSWKLVPDNYPPGDQPPPPSYIYGAQHLLRLFVKLPEILGKMSFSEKNLKALLKHFDLFLRFLAEYHDDFFPESAYVAACEAHYSTKNPRAIY

SEQ ID NO: 68441 - protein, 124 aa, Homo sapiens
MVFRRFVEVGRVAYVSFGPHAGKLVAIVDVIDQNRALVDGPCTQVRRQAMPFKCMQLTDFILKFPHSAHQKYVRQAWQKADINTKWAATRWAKKIEARERKAKMTDFDRFKVMKAKKMEQNNQE

SEQ ID NO: 68442 - protein, 105 aa, Homo sapiens
EMRNKIREQNLQDIKTAGPQSQVLCGVVMDRSLVQRIWTRLENRKKRVLQTSLRSPTRLPALPSSWRKTLCRSRLLEMTVMLPPLSQLSPICPLMNLQKHSASQC

SEQ ID NO: 68443 - protein, 17 aa, Homo sapiens
  MOD_RES (1)..(1): Any amino acid
XAEVDKLVQLIECPIFT

SEQ ID NO: 68444 - protein, 89 aa, Homo sapiens
MASSLLAGERLVRALGPGGELEPERLPRKLRAELEAALGKKHKGGDSSSGPQRLVSFRLIRDLHQHLRERGEPQSPVREPRTSCPAGED

SEQ ID NO: 68445 - protein, 181 aa, Homo sapiens
GDQMELGEENGAAGAADSGPMEEEEAASEDENGDDQGFQEGEDELGDEEEGAGDENGHGEQQPQPPATQQQQPQQQRGAAKEAAGKSSGPTSLFAVTVAPPGARQGQQQAGEPNLLSHLLKKKMNTSMTQWFVLILIIVIYILKYQEIVSVLLPLQWRVLLFFGLEEEHPMVCQKAKCVLR

SEQ ID NO: 68446 - protein, 1675 aa, Homo sapiens
  MOD_RES (1)..(1): Any amino acid
XRSKTDRDDKYFSYSKLERDTRYVSSRCRSERERRRSRSHSRSERGSRTNLSYSRSERSHYYDSDRRYHRSSPYRERTRYSRPYTDNRARESSDSEEEYKKTYSRRTSSHSSSYRDLRTSSYSKSDRDCKTETSYLEMERRGKYSSKLERESKRTSENEAIKRCCSPPNELGFRRGSSYSKHDSSASRYKSTLSKPIPKSDKFKNSFCCTELNEEIKQSHSFSLQTPCSKGSELRMINKNPEREKAGSPAPSNRLNDSPTLKKLDELPIFKSEFITHDSHDSIKELDSLSKVKNDQLRSFCPIELNINGSPGAESDLATFCTSKTDAVLMTSDDSVTGSELSPLVKACMLSSNGFQNISRCKEKDLDDTCMLHKKSESPFRETEPLVSPHQDKLMSMPVMTVDYSKTVVKEPVDTRVSCCKTKDSDIYCTLNDSNPSLCNSEAENIEPSVMKISSNSFMNVHLESKPVICDSRNLTDHSKFACEEYKQSIGSTSSASVNHFDDLYQPIGSSGIASSLQSLPPGIKVDSLTLLKCGENTSPVLDAVLKSKKSSEFLKHAGKETIVEVGSDLPDSGKGFASRENRRNNGLSGKCLQEAQEEGNSILPERRGRPEISLDERGEGGHVHTSDDSEVVFSSCDLNLTMEDSDGVTYALKCDSSGHAPEIVSTVHEDYSGSSESSNDESDSEDTDSDDSSIPRNRLQSVVVVPKNSTLPMEETSPCSSRSSQSYRHYSDHWEDERLESRRHLYEEKFESIASKACPQTDKFFLHKGTEKNPEISFTQSSRKQIDNRLPELSHPQSDGVDSTSHTDVKSDPLGHPNSEETVKAKIPSRQQEELPIYSSDFEDVPNKSWQQTTFQNRPDSRLGKTELSFSSSCEIPHVDGLHSSEELRNLGWDFSQEKPSTTYQQPDSSYGACGGHKYQQNAEQYGGTRDYWQGNGYWDPRSGRPPGTGVVYDRTQGQVPDSLTDDREEEENWDQQDGSHFSDQSDKFLLSLQKDKGSVQAPEISSNSIKDTLAVNEKKDFSKNLEKNDIKDRGPLKKRRQEIESDSESDGELQDRKKVRVEVEQGETSVPPGSALVGPSCVMDDFRDPQRWKECAKQGKMPCYFDLIEENVYLTERKKNKSHRDIKRMQCECTPLSKDERAQGEIACGEDCLNRLLMIECSSRCPNGDYCSNRRFQRKQHADVEVILTEKKGWGLRAAKDLPSNTFVLEYCGEVLDHKEFKARVKEYARNKNIHYYFMALKNDEIIDATQKGNCSRFMNHSCEPNCETQKWTVNGQLRVGFFTTKLVPSGSELTFDYQFQRYGKEAQKCFCGSANCRGYLGGENRVSIRAAGGKMKKERSRKKDSVDGELEALMENGEGLSDKNQVLSLSRLMVRIETLEQKLTCLELIQNTHSQSCLKSFLERHGLSLLWIWMAELGDGRESNQKLQEEIIKTLEHLPIPTKNMLEESKVLPIIQRWSQTKTAVPPLSEGDGYSSENTSRAHTPLNTPDPSTKLSTEADTDTPKKLMFRRLKIISENSMDSAISDATSELEGKDGKEDLDQLENVPVEEEEELQSQQLLPQQLPECKVDSETNIEASKLPTSEPEADAEIEPKESNGTKLEEPINEETPSQDEEEGVSDVESERSQEQPDKTVDISDLATKLLDSWKDLKEVYRIPKKSQTEKENTRNQPE

SEQ ID NO: 68447 - protein, 15 aa, Homo sapiens
MENPSPAAALGKALC

SEQ ID NO: 68448 - protein, 85 aa, Homo sapiens
MATNESVSIFSSASLAVEYVDSLLPENPLQEPFKNAWNYMLNNYTKFQIATWGSLIVHEALYFLFCLPGFLFQFIPYMKKYKIQK

SEQ ID NO: 68449 - protein, 64 aa, Homo sapiens
YFGMDHNVDQTGKAVIINKTSNTRIPEQRFSEHIKDEKNTEFQQRFILKRDDASMDRDDNQGEP

SEQ ID NO: 68450 - protein, 8 aa, Homo sapiens
MERRRITS

SEQ ID NO: 68451 - protein, 123 aa, Homo sapiens
  MOD_RES (1)..(1): Any amino acid
XQQQIIRLHQELGRQKSLWADVHGKLRSHIDALREQNMELREKLRALQLQRWKARKKSAASPHAGQESHTLALEPAFGKISPLSADEETIPKYAGHKNQSATLLGQRSSSNNSAPPKTEAPQS

SEQ ID NO: 68452 - protein, 275 aa, Homo sapiens
MPKVKSGAIGRRRGRQEQRRELKSAGGLMFNTGIGQHILKNPLIINSIIDKAALRPTDVVLEVGPGTGNMTVKLLEKAKKVVACELDPRLVAELHKRVQGTPVASKLQVLVGDVLKTDLPFFDTCVANLPYQISSPFVFKLLLHRPFFRCAILMFQREFALRLVAKPGDKLYCRLSINTQLLARVDHLMKVGKNNFRPPPKVESSVVRIEPKNPPPPINFQEWDGLVRITFVRKNKTLSAAFKSSAVQQLLEKNYRIHCSVHNIVSAAVYPVKQI

SEQ ID NO: 68453 - protein, 355 aa, Homo sapiens
MAAGVDCGDGVGARQHVFLVSEYLKDASKKMKNGLMFVKLVNPCSGEGAIYLFNMCLQQLFEVKVFKEKHHSWFINQSVQSGGLLHFATPVDPLFLLLHYLIKADKEGKFQPLDQVVVDNVFPNCILLLKLPGLEKLLHHVTEEKGNPEIDNKKYYKYSKEKTLKWLEKKVNQTVAALKTNNVNVSSRVQSTAFFSGDQASTDKEEDYIRYAHGLISDYIPKELSDDLSKYLKLPEPSASLPNPPSKKIKLSDEPVEAKEDYTKFNTKDLKTEKKNSKMTAAQKALAKVDKSGMKTRSTNWSFCDGSTKTEKGQVMVVAPRKAWRFSLQLQTLPEDSDFFFCTFLENRQVPKGAF

SEQ ID NO: 68454 - protein, 175 aa, Homo sapiens
MAGGVTVTNGVKGKKSTCPSAAPSASAPAMTTVENKSKISTGTASSTKRSTSTGNKESSSTRERLRERTRLNQSKKLPSAGQGANDMALAKRSRSRTATECDVRMSKSKSDNQISDRAALEAKVKDLLTLAKTKDVEILHLRNELRDMRAQLGINEDHSEGDEKSEKETIMAHQP

SEQ ID NO: 68455 - protein, 40 aa, Homo sapiens
MPLLWITGPRVRHVVLRSHPRPLVISLWSWFAVTQALASP

SEQ ID NO: 68456 - protein, 1769 aa, Homo sapiens
MAKPTSKDSGLKEKFKILLGLGTPRPNPRSAEGKQTEFIITAEILRELSMECGLNNRIRMIGQICEVAKTKKFEEHAVEALWKAVADLLQPERPLEARHAVLALLKAIVQGQGERLGVLRALFFKVIKDYPSNEDLHERLEVFKALTDNGRHITYLEEELADFVLQWMDVGLSSEFLLVLVNLVKFNSCYLDEYIARMVQMICLLCVRTASSVDIEVSLQVLDAVVCYNCLPAESLPLFIVTLCRTINVKELCEPCWKLMRNLLGTHLGHSAIYNMCHLMEDRAYMEDAPLLRGAVFFVGMALWGAHRLYSLRNSPTSVLPSFYQAMACPNEVVSYEIVLSITRLIKKYRKELQVVAWDILLNIIERLLQQLQTLDSPELRTIVHDLLTTVEELCDQNEFHGSQERYFELVERCADQRPESSLLNLISYRAQSIHPAKDGWIQNLQALMERFFRSESRGAVRIKVLDVLSFVLLINRQFYEEELINSVVISQLSHIPEDKDHQVRKLATQLLVDLAEGCHTHHFNSLLDIIEKVMARSLSPPPELEERDVAAYSASLEDVKTAVLGLLVILQTKLYTLPASHATRVYEMLVSHIQLHYKHSYTLPIASSIRLQAFDFLLLLRADSLHRLGLPNKDGVVRFSPYCVCDYMEPERGSEKKTSGPLSPPTGPPGPAPAGPAVRLGSVPYSLLFRVLLQCLKQESDWKVLKLVLGRLPESLRYKVLIFTSPCSVDQLCSALCSMLSGPKTLERLRGAPEGFSRTDLHLAVVPVLTALISYHNYLDKTKQREMVYCLEQGLIHRCASQCVVALSICSVEMPDIIIKALPVLVVKLTHISATASMAVPLLEFLSTLARLPHLYRNFAAEQYASVFAISLPYTNPSKFNQYIVCLAHHVIAMWFIRCRLPFRKDFVPFITKGLRSNVLLSFDDTPEKDSFRARSTSLNERPKRIQTSLTSASLGSADENSVAQADDSLKNLHLELTETCLDMMARYVFSNFTAVPKRSPVGEFLLAGGRTKTWLVGNKLVTVTTSVGTGTRSLLGLDSGELQSGPESSSSPGVHVRQTKEAPAKLESQAGQQVSRGARDRVRSMSGGHGLRVGALDVPASQFLGSATSPGPRTAPAAKPEKASAGTRVPVQEKTNLAAYVPLLTQGWAEILVRRPTGNTSWLMSLENPLSPFSSDINNMPLQELSNALMAAERFKEHRDTALYKSLSVPAASTAKPPPLPRSNTDSAVVMEEGSPGEVPVLVEPPGLEDVEAALGMDRRTDAYSRSSSVSSQEEKSLHAEELVGRGIPIERVVSSEGGRPSVDLSFQPSQPLSKSSSSPELQTLQDILGDPGDKADVGRLSPEVKARSQSGTLDGESAAWSASGEDSRGQPEGPLPSSSPRSPSGLRPRGYTISDSAPSRRGKRVERDALKSRATASNAEKVPGINPSFVFLQLYHSPFFGDESNKPILLPNESQSFERSVQLLDQIPSYDTHKIAVLYVGEGQSNSELAILSNEHGSYRYTEFLTGLGRLIELKDCQPDKVYLGGLDVCGEDGQFTYCWHDDIMQAVFHIATLMPTKDVDKHRCDKKRHLGNDFVSIVYNDSGEDFKLGTIKGQFNFVHVIVTPLDYECNLVSLQCRKDMEGLVDTSVAKIVSDRNLPFVARQMALHANVSGGGSRRELVGQAQVPPDSELTPCLRPQMASQVHHSRSNPTDIYPSKWIARLRHIKRLRQRICEEAAYSNPSLPLVHPPSHSKAPAQTPAEPTPGYEVGQRKRLISSVEDFTEFV

SEQ ID NO: 68457 - protein, 495 aa, Homo sapiens
MSDLVKHQRTHTGEKPYKCGVCGKGFGDSSARIKHQRTHSGEKPYRARPPAQGPPKIPRSRIPAGERPTICGECGKSFRQSSDLVKHQRTHTGEKPYKCGICGKGFGDSSARIKHQRTHRGEQPPRPVVPRRQPSRAATAATQGPKAQDKPYICTDCGKRFVLSCSLLSHQRSHLGPKPFGCDVCGKEFARGSDLVKHLRVHTGEKPYLCPECGKGFADSSARVKHLRTHSGERPHACPECDRTFSLSSTLLRHRLTHMEPQDFSFPGYPLPALIPSPPPPPLGTSPPLTPRSPSHSGEPFGLPGLEPEPGGPQAGEPPPPLAGDKPHKCPECGKGFRRSSDLVKHHRVHTGEKPYLCPECGKGFADSSARVKHLRTHRGERARPPPPSTLLRPHNPPGPVPMAPRPRVRAQPSGPSQPHVCGFCGKEFPRSSDLVKHRRTHTGEKPYKCAECGKGFGDSSARIKHQRGHLVLTPFGIGDGRARPLKQEAATGLE

SEQ ID NO: 68458 - protein, 772 aa, Homo sapiens
MQFQLTLFLHLGWLSYSKAQDDCNRGACHPTTGDLLVGRNTQLMASSTCGLSRAQKYCILSYLEGEQKCFICDSRFPYDPYDQPNSHTIENVIVSFEPDREKKWWQSENGLDHVSIRLDLEALFRFSHLILTFKTFRPAAMLVERSTDYGHNWKVFKYFAKDCATSFPNITSGQAQGVGDIVCDSKYSDIEPSTGGEVVLKVLDPSFEIENPYSPYIQDLVTLTNLRINFTKLHTLGDALLGRRQNDSLDKYYYALYEMIVRGSCFCNGHASECRPMQKMRGDVFSPPGMVHGQCVCQHNTDGPNCERCKDFFQDAPWRPAADLQDNACRSCSCNSHSSRCHFDMTTYLASGGLSGGVCEDCQHNTEGQHCDRCRPLFYRDPLKTISDPYACIPCECDPDGTISGGICVSHSDPALGSVAGQCLCKENVEGAKCDQCKPNHYGLSATDPLGCQPCDCNPLGSLPFLTCDVDTGQCLCLSYVTGAHCEECTVGYWGLGNHLHGCSPCDCDIGGAYSNVCSPKNGQCECRPHVTGRSCSEPAPGYFFAPLNFYLYEAEEATTLQGLAPLGSETFGQSPAVHVVLGEPVPGNPVTWTGPGFARVLPGAGLRFAVNNIPFPVDFTIAIHYETQSAADWTVQIVVNPPGGSEHCIPKTLQSKPQSFALPAATRIMLLPTPICLEPDVQYSIDVYFSQPLQGESHAHSHVLVDSAAVQWHNLGSLQPPPPECKQFSCFSFPSSWDYRHPPPHLANFCIFSRDGVSPHWPGWSQTPDLR

SEQ ID NO: 68459 - protein, 112 aa, Homo sapiens
RYLSGKSDIQDSLCYKTRLYQIEKYRAPKESYEASLDTWTRDLEFHAVQDKKPKEQEKRGDFLHRPFSKKLDKNLPSHKQPSGSLMTQIQNTKALLKDRKASKSSFPDKGLS

SEQ ID NO: 68460 - protein, 520 aa, Homo sapiens
MSVSVLSPSRRLGGVSGILQVTSLLILLLLLIKAAQLYLHRQWLLKALQQFPCPPSHWLFGHIQEFQHDQELQRIQERVKTFPSACPYWIWGGKVRVQLYDPDYMKVILGRSDPKSHGSYKFLAPRIGYGLLLLNGQTWFQHRRMLTPAFHNDILKPYVGLMADSVRVMLDKWEELLGQDSPLEVFQHVSLMTLDTIMKSAFSHQGSIQVDRNSQSYIQAISDLNSLVFCCMRNAFHENDTIYSLTSAGRWTHRACQLAHQHTGDQVIQLRKAQLQKEGELEKIKRKRHLDFLDILLLAKMENGSILSDKDLRAEVDTFMFEGHDTTASGISWILYALATHPKHQERCREEIHGLLGDGASITWNHLDQMPYTTMCIKEALRLYPPVPGIGRELSTPVTFPDGRSLPKGIMVLLSIYGLHHNPKVWPNLEVFDPSRFAPGSAQHSHAFLPFSGGSRNCIGKQFAMNQLKVARALTLLRFELLPDPTRIPIPMARLVLKSKNGIHLRLRRLPNPCEDKDQL

SEQ ID NO: 68461 - protein, 98 aa, Homo sapiens
MEKTHRGPGLAPGQIYTYPARCWRKKRRLNILEDPRLRPCEYKIDCEAPLKKEGGLPEGPVLEALLCAETGEKKIELKEEETIMDCQKQQLLEFPHDL

SEQ ID NO: 68462 - protein, 76 aa, Homo sapiens
MGPLEFRDVAIEFSLEEWHCLDTAQQNLYRDVMLENYRHLVFLGIVVTKPDLITCLEQGKKPFTVKRHEMIAKSPG

SEQ ID NO: 68463 - protein, 83 aa, Homo sapiens
MLSRLQELRKEEETLLRLKAALHDQLNRLKVEELALQSMISSRRGDEMLSSHTVPEQSHDVSLIKCRPRRECKVCSAPMLLGW

SEQ ID NO: 68464 - protein, 842 aa, Homo sapiens
MMPAQYALTSSLVLLVLLSTARAGPFSSRSNVTLPAPRPPPQPGGHTVGAGVGSPSSQLYEHTVEGGEKQVVFTHRINLPPSTGCGCPPGTEPPVLASEVQALRVRLEILEELVKGLKEQCTGGCCPASAQAGTGQTDVRTLCSLHGVFDLSRCTCSCEPGWGGPTCSDPTDAEIPPSSPPSASGSCPDDCNDQGRCVRGRCVCFPGYTGPSCGWPSCPGDCQGRGRCVQGVCVCRAGFSGPDCSQRSCPRGCSQRGRCEGGRCVCDPGYTGDDCGMRSCPRGCSQRGRCENGRCVCNPGYTGEDCGVRSCPRGCSQRGRCKDGRCVCDPGYTGEDCGTRSCPWDCGEGGRCVDGRCVCWPGYTGEDCSTRTCPRDCRGRGRCEDGECICDTGYSGDDCGVRSCPGDCNQRGRCEDGRCVCWPGYTGTDCGSRACPRDCRGRGRCENGVCVCNAGYSGEDCGVRSCPGDCRGRGRCESGRCMCWPGYTGRDCGTRACPGDCRGRGRCVDGRCVCNPGFTGEDCGSRRCPGDCRGHGLCEDGVCVCDAGYSGEDCSTRSCPGGCRGRGQCLDGRCVCEDGYSGEDCGVRQCPNDCSQHGVCQDGVCICWEGYVSEDCSIRTCPSNCHGRGRCEEGRCLCDPGYTGPTCATRMCPADCRGRGRCVQGVCLCHVGYGGEDCGQEEPPASACPGGCGPRELCRAGQCVCVEGFRGPDCAIQTCPGDCRGRGECHDGSCVCKDGYAGEDCGEEVPTIEGMRMHLLEETTVRTEWTPAPGPVDAYEIQFIPTASPLLCSASPHSPAKAEAEISTSWRNQDSLNFFFCLNIFFCCCYKNTLITRQEFGN

SEQ ID NO: 68465 - protein, 74 aa, Homo sapiens
MFETEADEKREMALEEGKGPGAEDSPPSKEPSPGQELPPGQDLPPNKDSPSGQEPAPSQEPLSSKDSATSEGSP

SEQ ID NO: 68466 - protein, 170 aa, Homo sapiens
MGPEALSSLLLLLLVASGDADMKGHFDPAKCRYALGMQDRTIPDSDISASSSWSDSTAARHSRLESSDGDGAWCPAGSVFPKEEEYLQVDLQRLHLVALVGTQGRHAGGLGKEFSRSYRLRYSRDGRRWMGWKDRWGQEVISGNEDPEGVVLKDLGPPMVARLVRFYPRA

SEQ ID NO: 68467 - protein, 291 aa, Homo sapiens
MEPDSLLDQDDSYESPQERPGSRRSLPGSLSEKSPSMEPSAATPFRVTGFLSRRLKGSIKRTKSQPKLDRNHSFRHILPGFRSAAAAAADNERSHLMPRLKESRSHESLLSPSSAVEALDLSMEEEVVIKPVHSSILGQDYCFEVTTSSGSKCFSCRSAAERDKWMENLRRAVHPNKDNSRRVEHILKLWVIEAKDLPAKKKYLCELCLDDVLYARTTGKLKTDNVFWGEHFEFHNLPPLRTVTVHLYRETDKKKKKERNSYLGLVSLPAASVAGRQFVEKWYPVVTPNPK

SEQ ID NO: 68468 - protein, 80 aa, Homo sapiens
MRAILGSYDSELTPAEYSPQLTRRMREAEDMVQKVHSHSAEMEAQLSQALEELGGQKQRADMLEMELKMLKSQSSSAEQS

SEQ ID NO: 68469 - protein, 30 aa, Homo sapiens
MASKPEKRVASSVFITLAPPRRDVAVAEEV

SEQ ID NO: 68470 - protein, 135 aa, Homo sapiens
MTPKQILQVIEAEGLKEMRSGTSPLACLNAMLHSNSRGGEGLFYKLPGRISLFTLKKDALQWSRHPATVEGEEPEDTADVESCGSNEASTVSGENDVSLDETSSNASCSTESQSRPLSNPRDSYRASSQANKQKK

SEQ ID NO: 68471 - protein, 11 aa, Homo sapiens
  MOD_RES (1)..(1): Any amino acid
XNRSCPEHPSD

SEQ ID NO: 68472 - protein, 103 aa, Homo sapiens
MREIVHLQAGQCGNQIGAKFWEVISDEHGIDPTGTYHGDSDLQLERINVYYNEATGGNYVPRAVLVDLEPGTMDSVRSGPFGQIFRPDNFVFDRVCLSCCHPG

SEQ ID NO: 68473 - protein, 122 aa, Homo sapiens
MENAGHPSADTPTATNYFLQYISSSLENSTNSADASSNKFVFGQNMSERVLSPPKLNEVSSDANRENAAAESGSESSSQEATPEKESLAESAAAYTKATARKCLLEKVEVITGEEAESNVLQ

SEQ ID NO: 68474 - protein, 518 aa, Homo sapiens [sequence omitted]

SEQ ID NO: 68475 - protein, 44 aa, Homo sapiens
MVHVKSEVLAVKLSQEINYAKSLYYEQQLMLRLSENREQLELDS

SEQ ID NO: 68476 - protein, 323 aa, Homo sapiens
MGREQDLILAVKNGDVTGVQKLVAKVKATKTKLLGSTKRLNVNYQDADGFSALHHAALGGSLELIALLLEAQATVDIKDSNGMRPLHYAAWQGRLEPVRLLLRASAAVNAASLDGQIPLHLAAQYGHYEVSEMLLQHQSNPCLVNKAKKTPLDLACEFGRLKVAQLLLNSHLCVALLEGEAKDPCDPNYTTPLHLAAKNGHREVIRQLLRAGIEINRQTKTGTALHEAALYGKTEVVRLLLEGGVDVNIRNTYNQTALDIVNQFTTSQASREIKQLLREASGILKVRALKDFWNLHDPTALNVRAGDVITVRDPKQAFLCKYK

SEQ ID NO: 68477 - protein, 111 aa, Homo sapiens
MFLRGRPVPMMIPDELAPTYSLDTRSELPSCRLKLEWVYGYRGRDCRANLYLLPTGEIVYFVASVAVLYSVEEQRQRHYLGHNDDIKCLAIHPDMVTIATGQVAGTTKEGK

SEQ ID NO: 68478 - protein, 51 aa, Homo sapiens
MLNHATQRVMEAEQTKTRSELVHKETAARYNAAMGRMRQLEKKLKRAINKS

SEQ ID NO: 68479 - protein, 231 aa, Homo sapiens
MSGVRAVRISIESACEKQVHEVGLDGTETYLPPLSMSQNLARLAQRIDFSQGSGSEEEEAAGTEGDAQEWPGAGSSADQDDEEGVVKFQPSLWPWDSVRNNLRSALTEMCVLYDVLSIVRDKKFMTLDPVSQDALPPKQDRGLAIYKERNGSTLRGDPNRLDRVDAMNPQTLQLISKKKSLAGAAQILLKGAERLTKSVTENQENKLQRDFNSELLRLRQHWKLRKVGDKI

SEQ ID NO: 68480 - protein, 312 aa, Homo sapiens
MALGNHSTITEFLLLGLSADPNIRALLFVLFLGIYLLTIMENLMLLLMIRADSCLHKPMYFFLSHLSFVDLCFSSVIVPKMLENLLSQRKTISVEGCLAQVFFVFVTAGTEACLLSGMAYDRHAAICRPLLYGQIMGKQLYMHLVWGSWGLGFLDALINVLLAVNMVFCEAKIIHHYSYEMPSLLPLSCSDISRSLIALLCSTLLHGLGNFLLVFLSYTRIISTILSISSTSGRSKAFSTCSAHLTAVTLYYGSGLLRHLMPNSGSPIELIFSVQYTVVTPMLNSLIYSLKNKEVKVALKRTLEKYLQYTRR

SEQ ID NO: 68481 - protein, 164 aa, Homo sapiens [sequence omitted]

SEQ ID NO: 68482 - protein, 214 aa, Homo sapiens
MLPAATEVQCSPWKKNACCTASTSQELHKDTSRLYNFNWDHCGKMEPACKRHFIQDTCLYECSPNLGPWIQQVNQSWRKERFLDVPLCKEDCQRWWEDCHTSHTCKSNWHRGWDWTSGVNKCPAGALCRTFESYFPTPAALCEGLWSHSYKVSNYSRGSGRCIQMWFDSAQGNPNEEVARFYAAAMHVNAGEMLHGTGGLLLSLALMLQLWLLG

SEQ ID NO: 68483 - protein, 129 aa, Homo sapiens
MCEVSRGWKPCTEGILKVRPTRKISYEESITPTVELNALCMKLGKKPMYKPVDPYSRMQSTYNYNMRGGAYPPRYFYPFPVPPLLYQVELSVGGQQFNGKGKTRQAAKHDAAAKALRILQNEPLPERLE

SEQ ID NO: 68484 - protein, 200 aa, Homo sapiens
MPITLTVSTSSLNLMAADCKQDTAEYVAYVAKDPVNQRACHILECPEGLAQDVISTIGQAFELRFKQYLRNPPKLVTPHDRMAGFDGSAWDEEEEEPPDHQYYNDFPGKEPPLGGVVDMRLREGAAPGAARPTAPNAQTPSHLGATLPVGQPVGGDPEVRKQMPPPPPCPAGRELFDDPSYVNVQNLDKARQAVGGAGPP

SEQ ID NO: 68485 - protein, 185 aa, Homo sapiens
MAAVSLRLGDLVWGKLGRYPPWPGKIVNPPKDLKKPRGKKCFFVKFFGTEDHAWIKVEQLKPYHAHKEEMIKINKGKRFQQAVDAVEEFLRRAKGKDQDLTIPESSTVKGMMAGPMAAFKWQPTASEPVKDADPHFHHFLLSQTEKETGSTSIQAADSTAVNGSITPTDKKIGFLGLGLMGSGIV

SEQ ID NO: 68486 - protein, 91 aa, Homo sapiens
MELKVWVDGVQRIVCGVTEVTTCQEVVIALAQAIGRTGRYTLIEKWRDTERHLAPHENPIISLNKWGQYASDVQLILRRTGPSLSERPTSD

SEQ ID NO: 68487 - protein, 147 aa, Homo sapiens
  MOD_RES (1)..(1): Any amino acid
XATLRLYFDDTGCWDMNDSTALWWVIKGPVVGSIMVNFVLFIGIIVILVQKLQSPDMGGNESSIYLTNLSPRVPKKAREDPLPVPSDQHSLPFLRLARSTLLLIPLFGIHYTVFAFSPENVSKRERLVFELGLGSFQGFVVAVLYCF

SEQ ID NO: 68488 - protein, 117 aa, Homo sapiens
  MOD_RES (1)..(1): Any amino acid
XDDGIKVVKVTFNKQDSLVILTIMATLKIRNSNFYTVAVTSLSSQIQYMNTVVNFTGKAEMGGPFSYVYFFCTVPEILVHNIVIFMRACRREHSICSQGLSSGPTPTWCKQRRNWFT

SEQ ID NO: 68489 - protein, 156 aa, Homo sapiens
MKRRLDDQESPVYAAQQRRIPGSTEAFPHQHRVLAPAPPVYEAVSETMQSATGIQYSVTPSYQVSAMPQSSGSHGPAIAAVHSSHHHPTAVQPHGGQVVQSHAHPAPPVAPVQGQQQFQRLKVVFSSFSWVKKFIFSRKYWLQLVGCGGTTSNLRY

SEQ ID NO: 68490 - protein, 141 aa, Homo sapiens
MSGARSKLALFLCGCYVVALGAHTGEESVADHHEAEYYVAAVYEHPSILSLNPLALISRQEALELMNQNLDIYEQQVMTAAQKDVQIIVFPEDGIHGFNFTRTSIYPFLDFMPSPQVVRWNPCLEPHRFNDTEASYVEVRF

SEQ ID NO: 68491 - protein, 106 aa, Homo sapiens
  MOD_RES (1)..(1): Any amino acid
XLQEESDLELAKETFGVNNAVYGIDAMNPSSRDDFTEFGKLLKDKITQYEKSLYYASFLEVLVRDVCISLEIDDLKKITNSLTVLCSEKQKQEKVRASCVGKWVLN

SEQ ID NO: 68492 - protein, 63 aa, Homo sapiens
  MOD_RES (1)..(1): Any amino acid
XIPQARALLQQCLHARLQIRPADGDVAAQWVEVTSARQLSLSSGVRGGFFRVVSVTRPLCVSL

SEQ ID NO: 68493 - protein, 353 aa, Homo sapiens
MAFWGWRAAAALRLWGRVVERVEAGGGVGPFQACGCRLVLGGRDDVSAGLRGSHGARGEPLDPARPLQRPPRPEVPRAFRRQPRAAAPSFFFSRSPGSGLYSNLQQYDLPYPEAIFELPFFFHNPKPFFTLAKELYPGNYKPNVTHYFLRLLHDKGLLLRLYTQNIDGLERVSGIPASKLVEAHGTFASATCTVCQRPFPGEDIRADVMADRVPRCPVCTGVVKPDIVFFGEPLPQRFLLHVVDFPMADLLLILGTSLEVEPFASLTEAVRSSVPRLLINRDLVGPLAWHPRSRDVAQLGDVVHGVESLVELLGWTEEMRDLVQRETGKVQTAEEDHPRGCPSHCSRLDGPDK

SEQ ID NO: 68494 - protein, 283 aa, Homo sapiens
  MOD_RES (1)..(1): Any amino acid
XWTSEIQMFTSVRVIRLSSLNLTNQALNKNFNDLCENLLKSLYFKLRSMIPCCLCHVNFTVSLPEDELIQVTVTAVAITFDKNQALQTTKTPVEKSLQRASTDNEELLQFPLELCSDSLPSHPFPPAKEHLESASSNSGIPAAQRAMTVEKASPVGDGNFRNRSAPPCANSTVGVVKMTPLSFIPGAKITKYLGIINMFFIRETTSLREEGGVSGFLHAFIAEVFAMVRAHVAALGGNAVVSYIMKQCVFMENPNKNQAQCLINVSGDAVVFVRESDLEVVSS

SEQ ID NO: 68495 - protein, 110 aa, Homo sapiens
MKKVRLKELESRLQQVDGFEKPKLLLEQYPTRPHIAGTDMAFLKTALEMARTAVYSLHKSSTREHVQKKAAEWKIKIDIIAELRYDLPASYKFHKKKSVDIEVDLIRFSF

SEQ ID NO: 68496 - protein, 195 aa, Homo sapiens
MAQKGVLGPGQLGAVAILLYLGLLRSGTGAEGAEAPCGVAPQARITGGSSAVAGQWPWQVSITYEGVHVCGGSLVSEQWVLSAAHCFPSYLQEGSQGDIALLQLSRPITFSRYIRPICLPAANASFPNGLHCTVTGWGHVAPSVSLLTPKPLQQLEVPLISRETCNCLYNIDAKPEEPHFVQEDMVCAGYVEGGK

SEQ ID NO: 68497 - protein, 257 aa, Homo sapiens
MTSSRLWFSLLLAAAFAGRATALWPWPQNFQTSDQRYVLYPNNFQFQYDVSSAAQPGCSVLDEAFQRYRDLLFGSGSWPRPYLTGKRHTLEKNVLVVSVVTPGCNQLPTLESVENYTLTINDDQCLLLSETVWGALRGLETFSQLVWKSAEGTFFINKTEIEDFPRFPHRGLLLDTSRHYLPLSSILDTLDVMAYNKLNVFHWHLVDDPSFPYESFTFPELMRKLSGSVNLKGVLCLSGVLQPCHPHLHSTGCEGGH

SEQ ID NO: 68498 - protein, 75 aa, Homo sapiens
MRGLRHPNIVHMLDSFETDKEVVVVTDYAEGELFQILEDDGKLPEDQVQAIAAQLVSALYYLHSHRILHRDMKPQ

SEQ ID NO: 68499 - protein, 715 aa, Homo sapiens
MATQADLMELDMAMEPDRKAAVSHWQQQSYLDSGIHSGATTTAPSLSGKGNPEEEDVDTSQVLYEWEQGFSQSFTQEQVADIDGQYAMTRAQRVRAAMFPETLDEGMQIPSTQFDAAHPTNVQRLAEPSQMLKHAVVNLINYQDDAELATRAIPELTKLLNDEDQVVVNKAAVMVHQLSKKEASRHAIMRSPQMVSAIVRTMQNTNDVETARCTAGTLHNLSHHREGLLAIFKSGGIPALVKMLGSPVDSVLFYAITTLHNLLLHQEGAKMAVRLAGGLQKMVALLNKTNVKFLAITTDCLQILAYGNQESKLIILASGGPQALVNIMRTYTYEKLLWTTSRVLKVLSVCSSNKPAIVEAGGMQALGLHLTDPSQRLVQNCLWTLRNLSDAATKQEGMEGLLGTLVQLLGSDDINVVTCAAGILSNLTCNNYKNKMMVCQVGGIEALVRTVLRAGDREDITEPAICALRHLTSRHQEAEMAQNAVRLHYGLPVVVKLLHPPSHWPLIKATVGLIRNLALCPANHAPLREQGAIPRLVQLLVRAHQDTQRRTSMGGTQQQFVEGVRMEEIVEGCTGALHILARDVHNRIVIRGLNTIPLFVQLLYSPIENIQRVAAGVLCELAQDKEAAEAIEAEGATAPLTELLHSRNEGVATYAAAVLFRMSEDKPQDYKKRLSVELTSSLFRTEPMAWNETADLGLDIGAQGEPLGYRQDEDS

SEQ ID NO: 68500 - protein, 385 aa, Homo sapiens
MLRHPVRSLVQVAYRRDEMWSEGRYEYERIPRERAPPRSHPSDGYNRLVNIVPKKPPLLDRPGEGSYNRYYSHVDYRDYDEGRSFSHDRRSGPPHRGDESGYRWTRDDHSASRQPEYRDMRDGFRRKSFYSSHYARERSPYKRDNTFFRESPVGRKDSPHSRSGSSVSSRSYSPERSKSYSFHQSQHRKSVRPGASYKRQNEGNPERDKERPVQSLKTSRDTSPSSGSAVSSSKVLDKPSRLTEKELAEAASKWAAEKLEKSDESNLPEISEYEAGSTAPLFTDQPEEPESNTTHGIELFEDSQLTTRSKAIASKTKEIEQVYRQDCETFGMVVKMLIEKDPSLEKSIQFALRQNLHEIGERCVEELKHFIAEYDTSTQDFGEPF

SEQ ID NO: 68501 - protein, 92 aa, Homo sapiens
MEAEVDKLELMKNPVTLLKELSVIKSRYQTLYARFKPVAVEQKESKSRICATVKKTMNMIQKLQKQTDLELSPLTKEEKTAAEQFKFHMPDL

SEQ ID NO: 68502 - protein, 344 aa, Homo sapiens
PYIGSKISLISKAEIRYEGILYTIDTENSTVALAKVRSFGTEDRPTDRPIPPRDEVFEYIIFRGSDIKDLTVCEPPKPQCSLPQDPAIVQSSLGSSTSSFQSMGSYGPFGRMPTYSQFSPSSLVGQQFGAVGVAGSSLTSFGTETSNSGTLPQSSAVGSAFTQDTRSLKTQLSQAEVHKVSRPENEQLRNDNKRQVAPGAPSAPRRGRGGHRGGRGRFGIRRDGPMKFEKDFDFESANAQFNKEEIDREFHNKLKLKEDKLEKQEKPVNGEDKGDSGVDTQNSEGNADEEDPLGPNCYYDKTKSFFDNISCDDNRERRPTWAEERRLNAETFGIPLRPNRGRGG

SEQ ID NO: 68503 - protein, 158 aa, Homo sapiens
MGDPGSEEGPLRPVLEYIDLVSSDDEEPSTSYTDENIKRKDHIDYQKDKVALTLARLARHVEVEKQQKEEKNRAFREKIDFQHAHGLQELEFIRGHSDTEAARLCVDQWLKMPGLKTGTINCGTKSSFRRGGHTWVSGKPILCPIMHCNKEFDNGHLL

SEQ ID NO: 68504 - protein, 68 aa, Homo sapiens
MEGLSDVASFATKLKNTLIQYHSIEEDKWRVAKKTKDVTVWRKPSEEFNGYLVLKGYVIKRATKPKVL

SEQ ID NO: 68505 - protein, 553 aa, Homo sapiens
MNHVAKQQSEEAFPQEQQKAPPVVGGFNSNVGSKVLGLKYEEIDCLINDEHTIKGRREGNEVFLPFTWVEKYFDVYGKVVQYDGYDRFEFSHSYSKVYAQRAPYHPDGVFMSFEGYNVEVRDRVKCISGVEGVPLSTQWGPQGYFYPIQIAQYGLSHYSKNLTEKPPHIEVYETAEDRDKNKPNDWTVPKGCFMANVADKSRFTNVKQFIAPETSEGVSLQLGNTKDFIISFDLKFLTNGSVSVVLETTEKNQLFTIHYVSNAQLIAFKERDIYYGIGPRTSWSTVTRDLVTDLRKGVGLSNTKAVKPTKIMPKKVVRLIAKGKGFLDNITISTTAHMAAFFAASDWLVRNQDEKGGWPIMVTRKLGEGFKSLEPGWYSAMAQGQAISTLVRAYLLTKDHIFLNSALRATAPYKFLSEQHGVKAVFMNKHDWYEEYPTTPSSFVLNGFMYSLIGLYDLKETAGEKLGKEARSLYERGMESLKAMLPLYDTGSGTIYDLRHFMLGIAPNLARWDYHTTHINQLQLLSTIDESPVFKEFVKRWKSYLKGSRAKHN

SEQ ID NO: 68506 - protein, 77 aa, Homo sapiens
MYYGLSNFYQNHRRYVKSRDDSQLNGDSSALLNPSKECEPYRRNEDKPIAPCGAIANSMFNDTLELFLIGNDSYPIP

SEQ ID NO: 68507 - protein, 161 aa, Homo sapiens
MSFIPVAEDSDFPIHNLPYGVFSTRGDPRPRIGVAIGDQILDLSIIKHLFTGPVLSKHQDVFNQPTLNSFMGLGQAAWKEARVFLQNLLSVSQARLRDDTELRKCAFISQASATMHLPATIGDYTDFYSSRQHATNVGIMFRDKENALMPNWLHLPVGYHG

SEQ ID NO: 68508 - protein, 895 aa, Homo sapiens
MDHYDSQQTNDYMQPEEDWDRDLLLDPAWEKQQRKTFTAWCNSHLRKAGTQIENIEEDFRDGLKLMLLLEVISGERLAKPERGKMRVHKISNVNKALDFIASKGVKLVSIGAEEIVDGNVKMTLGMIWTIILRFAIQDISVEETSAKEGLLLWCQRKTAPYKNVNIQNFHISWKDGLGFCALIHRHRPELIDYGKLRKDDPLTNLNTAFDVAEKYLDIPKMLDAEDIVGTARPDEKAIMTYVSSFYHAFSGAQKAETAANRICKVLAVNQENEQLMEDYEKLASDLLEWIRRTIPWLENRVPENTMHAMQQKLEDFRDYRRLHKPPKVQEKCQLEINFNTLQTKLRLSNRPAFMPSEGRMVSDINNAWGCLEQVEKGYEEWLLNEIRRLERLDHLAEKFRQKASIHEAWTDAMWPSLNPGKEAMLRQKDYETATLSEIKALLKKHEAFESDLAAHQDRVEQIAAIAQELNELDYYDSPSVNARCQKICDQWDNLGALTQKRREALERTEKLLETIDQLYLEYAKRAAPFNNWMEGAMEDLQDTFIVHTIEEIQGLTTAHEQFKATLPDADKERLAILGIHNEVSKIVQTYHVNMAGTNPYTTITPQEINGKWDHVRQLVPRRDQALTEEHARQQHNERLRKQFGAQANVIGPWIQTKMEEIGRISIEMHGTLEDQLSHLRQYEKSIVNYKPKIDQLEGDHQLIQEALIFDNKHTNYTMEHIRVGWEQLLTTIARTINEVENQILTRDAKGISQEQMNEFRASFNHFDRKKTGMMDTDDFRACLISMGYNMGEAEFARIMSIVDPNRLGVVTFQAFIDFMSRETADTDTADQVMASFKILAGDKNYITMDELRRELPPDQAEYCIARMAPYTGPDSVPGALDYMSFSTALYGESDL

SEQ ID NO: 68509 - protein, 392 aa, Homo sapiens
  MOD_RES (1)..(1): Any amino acid
XMRNTVYAVKRLKENADLEWTAVKQSFLTEVEQLSRFRHPNIVDFAGYCAQNGFYCLVYGFLPNGSLEDRLHCQTQACPPLSWPQRLDILLGTARAIQFLHQDSPSLIHGDIKSSNVLLDERLTPKLGDFGLARFSRFAGSSPSQSSMVARTQTVRGTLAYLPEEYIKTGRLAVDTDTFSFGVKDLVEEEAEEAGVALRSTQSTLQAGLAADAWAAPIAMQIYKKHLDPRPGPCPPELGLGLGQLACCCLHRRAKRRPPMTQVYERLEKLQAVVAGVPGHSEAASCIPPSPQENSYVSSTGRAHSGAAPWQPLAAPSGASAQAAEQLQRGPNQPVESDESLGGLSAALRSWHLTPSCPLDPAPLREAGCPQGDTAGESSWGSGPGSRPTAVE

SEQ ID NO: 68510 - protein, 154 aa, Homo sapiens
MEETIKDPPTSAVLLDHCHFSQVIFNSVEKFYIPGGDVTCHYTFTQHFIPRRKDWIGIFRVGWKTTREYYTFMWVTLPIDLNNKSAKQQEVQFKAYYLPKDDEYYQFCYVDEDGVVRGASIPFQFRPENEEDILVVTTQFWPTACLSYGEVEEI

SEQ ID NO: 68511 - protein, 55 aa, Homo sapiens
MAALTTLFKYIDENQDRYIKKLAKWVAIQSVSAWPEKRGEIRRMMEVAAADVKQL

SEQ ID NO: 68512 - protein, 120 aa, Homo sapiens
  MOD_RES (1)..(1): Any amino acid
XERTFNCCYPGCHFKTVHGMKDLDRHLRIHTGDKPHKCEFCDKCFSRKDNLTMHMRCHTSVKPHKCHLCDYAAVDSSSLKKHLRIHSDERPYKCQLCPYASRNSSQLTVHLRSHTGPGPG

SEQ ID NO: 68513 - protein, 199 aa, Homo sapiens
MMAKSALRENGTNSETFRQRFRRFHYQEVAGPREAFSQLWELCCRWLRPEVRTKEQIVELLVLEQFLTVLPGEIQNWVQEQCPENGEEAVTLVEDLEREPGRPRSSVTVSVKGQEVRLEKMTPPKSSQELLSVRQESVEPQPRGVPKKERARSPDLGPQEQMNPKEKLKPFQRSGWSKESHGSQICWALRRKNFQVAAT

SEQ ID NO: 68514 - protein, 125 aa, Homo sapiens
MLKEDCASELKVHLAKSLPLPSSVNRPRIDLIVFVVNLHSKYRIREARTSAFSVVKFCSLVCFLTLAWPPQSPEHRGVPAPCGCQLLLGEGVFPRHRCWAGEPLQHSPAHRGEAGPHLSKPPALL

SEQ ID NO: 68515 - protein, 117 aa, Homo sapiens
MGSQVAFLPPPPARSSPDAARIRVKRYRQSMNNFQGLRSFGCRFGTCTVQKLAHQIYQFTDKDKDNVAPRSKISPQGYGRRRRRSLPEAGPGRTLVSSKPQAHGAPAPPSGSAPHFL

SEQ ID NO: 68516 - protein, 85 aa, Homo sapiens
MPVTHRKSDASDMNSDTSPSCRLRAFSRGGSLESRSSSSRSRSFTLDDESLKYLTHEEKDVLLFFEETIDSLDEDFEEPVLCDGG

SEQ ID NO: 68517 - protein, 500 aa, Homo sapiens
MEALLEGIQNRGHGGGFLTSCEAELQELMKQIDIMVAHKKSEWEGRTHALETCLKIREQELKSLRSQLDVTHKEVGMLHQQVEEHEKIKQEMTMEYKQELKKLHEEEFRQKSLDWEKQRLIYQQQVSSLEAQRKALAEQSEIIQAQLVNRKQKLESVELSSQSEIQHLSSKLERANDTICANELEIERLTMRVNDLVGTSMTVLQEQQQKEEKLRESEKLLEALQEEKRELKAALQSQENLIHEARIQKEKLQEKVKATNTQHAVEAIRPREESLAEKKYTSQGQGDLDSVLSQLNFTHTSEDLLQAEVTCLEGSLESVSATCKQLSQELMEKYEELKRMEAHNNEYKAEIKKLKEQILQGEQSYSSALEGMKMEISHLTQELHQRDITIASTKGSSSDMEKRLRAEMQKAEDKAVEHKEILDQLESLKLENRHLSEMVMKLELGLHECSLPVSPLGSIATRFLEEEELRSHHILERLDAHIEELKRESEKTVRQFTALK

SEQ ID NO: 68518 - protein, 70 aa, Homo sapiens
MALVENVTTLQKSQDLLEAEGEKKTMIKKIMPHPAHPGHAGEVGAGERVCAQRVLPALRAGDAGEGRGQG

SEQ ID NO: 68519 - protein, 247 aa, Homo sapiens
MVRCVPSAVIVCFLRPPQPGRTVIFHDVAVLTDKLFPIVEAMQKHFSAGLGTYYSDSIFFLSVAMHQIMPKEILQIIQLDLDLKFKTNIRELFEEFDSFLPGAIIGIAREMQPVYRHTFWQFRHENPQTRVGGPPPEGLPGFNSGVMLLNLEAMRQSPLYSRLLEPAQVQQLADKYHFRGHLGDQDFFTMIGMEHPKLFHVLDCTWNRQLCTWWRDHGYSDVFEAYFRCEGHVKIYHGNCNTPIPED

SEQ ID NO: 68520 - protein, 115 aa, Homo sapiens
  MOD_RES (1)..(1): Any amino acid
XAGQPAATGSPSADKDGMEPNVVARISQWADDHLRLVRGHGIPLWPKLECSGTIIAHCCCSTHFGRKDPPTSASRVAGTTDQVLHLSPRLECNGVISAHCNLCLPGSSDCPASPS

SEQ ID NO: 68521 - protein, 543 aa, Homo sapiens
MSEGESQTVLSSGSDPKVESSSSAPGLTSVSPPVTSTTSAASPEEEEESEDESEILEESPCGRWQKRREEVNQRNVPGIDSAYLAMDTEEGVEVVWNEVQFSERKNYKLQEEKVRAVFDNLIQLEHLNIVKFHKYWADIKENKARVIFITEYMSSGSLKQFLKKTKKNHKTMNEKAWKRWCTQILSALSYLHSCDPPIIHGNLTCDTIFIQHNGLIKIGSVFHRIFANVAPDTINNHVKTCREEQKNLHFFAPEYGEVTNVTTAVDIYSFGMCALEMAVLEIQGNGESSYVPQEAISSAIQLLEDPLQREFIQKCLQSEPARRPTARELLFHPALFEVPSLKLLAAHCIVGHQHMIPENALEEITKNMDTSAVLAEIPAGPGREPVQTLYSQSPALELDKFLEDVRNGIYPLTAFGLPRPQQPQQEEVTSPVVPPSVKTPTPEPAEVETRKVVLMQCNIESVEEGVKHHLTLLLKLEDKLNRHLSCDLMPNENIPELAAELVQLGFISEADQSRLTSLLEETLNKFNFARNSTLNSAAVTVSS

SEQ ID NO: 68522 - protein, 201 aa, Homo sapiens
MKLKDSLFDLDGPKVASPLSPTSLTHTSRPPAALTPVPLSQGDLSHPPRKKDRKNRKLGPGAGAGFGVLRRPRPTPGDGEKRSRIKKSKKRKLKKAERGDRLPPPGPPQAPPSDTDSEEEEEEEEEEEEEEMATVVGGEAPVPVLPTPPEAPRPPATVHPEGVPPADSESKEVGSTETSQDGDASSSEGEMRVMDEDIMVE

SEQ ID NO: 68523 - protein, 181 aa, Homo sapiens
  MOD_RES (1)..(1): Any amino acid
XPLDEPAELGLRERVKASVEHISRILKGRPEGLEKEGPPRKKPGLASFRLSGLKSWDRAPTFLRELSDETVVLGQSVTLACQVSAQPAAQATWSKDGAPLESSSRVLISATLKNFQLLTILVVVAEDLGVYTCSVSNALGTVTTTGVLRKSAPHLRHARISGRCTRMGCCWSGSPWNPTAL

SEQ ID NO: 68524 - protein, 877 aa, Homo sapiens
MAQFPTPFGGSLDIWAITVEERAKHDQQFHSLKPISGFITGDQARNFFFQSGLPQPVLAQIWALADMNNDGRMDQVEFSIAMKLIKLKLQGYQLPSALPPVMKQQPVAISSAPAFAAVPPLANGAPPVIQPLPAFAHPAATLPKSSSFSRSGPGSQLNTKLQKAQSFDVASVPPVAEWAVPQSSRLKYRQLFNSHDKTMSGHLTGPQARTILMQSSLPQAQLASIWNLSDIDQDGKLTAEEFILAMHLIDVAMSGQPLPPVLPPEYIPPSFRRVRSGSGISVISSTSVDQRLPEEPVLEDEQQQLEKKLPVTFEDKKRENFERGNLELEKRRQALLEQQRKEQERLAQLERAEQERKERERQEQERKRQLELEKQLEKQRELERQREEERRKEIERREAAKRELERQRQLEWERNRRQELLNQRNKEQEDIVVLKAKKKTLEFELEALNDKKHQLEGKLQDIRCRLTTQRQEIESTNKSRELRIAEITHLQQQLQESQQMLGRLIPEKQILNDQLKQVQQNSLHRDSLVTLKRALEAKELARQHLRDQLDEVEKETRSKLQEIDIFNNQLKELREIHNKQQLQKQKSMEAERLKQKEQERKIIELEKQKEEAQRRAQERDKQWLEHVQQEDEHQRPRKLHEEEKLKREESVKKKDGEEKGKQEAQDKLGRLFHQHQEPAKPAVQAPWSTAEKGPLTISAQENVKVVYYRALYPFESRSHDEITIQPGDIVMVDESQTGEPGWLGGELKGKTGWFPANYAEKIPENEVPAPVKPVTDSTSAPAPKLALRETPAPLAVTSSEPSTTPNNWADFSSTWPTSTNEKPETDNWDAWAAQPSLTVPSAGQLRQRSAFTPATATGSSPSPVLGQHGFWFFRESC

SEQ ID NO: 68525 - protein, 311 aa, Homo sapiens
MAAENHSFVTKFILVGLTEKSELQLPLFLVFLGIYVVTVLGNLGMITLIGLSSHLHTPMYCFLSSLSFIDFCHSTVITPKMLVNFVTEKNIISYPECMTQLYFFLVFAIAECHMLAAMAYDGYVAICSPLLYSIIISNKACFSLILVVYVIGLICASAHIGCMFRVQFCKFDVINHYFCDLISILKLSCSSTYINELLILIFSGINILVPSLTILSSYIFIIASILRIRYTEGRSKAFSTCSSHISAVSVFFGSAAFMYLQPSSVSSMDQGKVSSVFYTIVVPMLNPLIYSLRNKDVHVALKKTLGKRTFL

SEQ ID NO: 68526 - protein, 224 aa, Homo sapiens
MTTLTRQDLNFGQVVADVLCEFLEVAVHLILYVREVYPVGIFQKRKKYNVPVQMSCHPELNQYIQDTLHCVKPLLEKNDVEKVVVVILDKEHRPVEKFVFEITQPPLLSIRWAAPAPRPLAGISSDSLLSHVEQLLRAFILKISVCDAVLDHNPPGCTFTVLVHTREAATRNMEKIQVIKDFPWILADEQDVHMHDPRLIPLKTMTSDILKMQLYVEERAHKGS

SEQ ID NO: 68527 - protein, 483 aa, Homo sapiens
MAAVILESIFLKRSQQKKKTSPLNFKKRLFLLTVHKLSYYEYDFERGRRGSKKGSIDVEKITCVETVVPEKNPPPERQIPRRGEESSEMEQISIIERFPYPFQVVYDEGPLYVFSPTEELRKRWIHQLKNVIRYNSDLVQKYHPCFWIDGQYLCCSQTAKNAMGCQILENRNGSLKPGSSHRKTKKPLPPTPEEDQILKKPLPPEPAAAPVSTSELKKVVALYDYMPMNANDLQLRKGDEYFILEESNLPWWRARDKNGQEGYIPSNYVTEAEDSIEMYEWYSKHMTRSQAEQLLKQEGKEGGFIVRDSSKAGKYTVSVFAKSTGDPQGVIRHYVVCSTPQSQYYLAARNCLVNDQGVVKVSDFGLSRYVLDDEYTSSVGSKFPVRWSPPEVLMYSKFSSKSDIWAFGVLMWEIYSLGKMPYERFTNSETAEHIAQGLRLYRPHLASEKVYTIMYSCWHEKADERPTFKILLSNILDVMDEES

SEQ ID NO: 68528 - protein, 213 aa, Homo sapiens
MHLLVPPPQHSLFTAFSQFGLLYSVRVFPNAAVAHPGFYAVIKFYSARAAHRAQKACDRKQLFQKSPVKVRLGTRHKAVQHQALALNSSKCQELANYYFGFNGCSKRIIKLQELSDLEERENEDSMVPLPKQSLKFFCALEVVLPSCDCRSPGIGLVEEPMDKVEEGPLSFLMKRKTAQKLAIQKALSDAFQKLLIVVLGKTVLIILEVLQFQ

SEQ ID NO: 68529 - protein, 267 aa, Homo sapiens
MTGERPSTALPDRRWGPRILGFWGGCRVWVFAAIFLLLSLAASWSKAENDFGLVQPLVTMEQLLWVSGRQIGSVDTFRIPLITATPRGTLLAFAEARKMSSSDEGAKFIALRRSMDQGSTWSPTAFIVNDGDVPDGLNLGAVVSDVETGVVFLFYSLCAHKAGCQVASTMLVWSKDDGVSWSTPRNLSLDIGTEVFAPGPGSGIQKQREPRKGRLIVCGHGTLERDGVFCLLSDDHGASWRYGSGVSGIPYGQPKQENDFNPDECQL

SEQ ID NO: 68530 - protein, 62 aa, Homo sapiens
MLKEEQEVAMLGVPHNPAPPMSTVIHIRSETSVPDHVVWSLFNTLFMNTCCLGFIAFAYSVK

SEQ ID NO: 68531 - protein, 57 aa, Homo sapiens
MFFGGEGSLTYTLVIICFLTLRLSASQNCLKKSLEDVVIDIQSSLSKGIRGNEPVYT

SEQ ID NO: 68532 - protein, 492 aa, Homo sapiens
MKMTFYGHFVAGEDQESIQPLLRHYRAFGVSAILDYGVEEDLSPEEAEHKEMESCTSAAERDGSGTNKRDKQYQAHWAFGDRRNGVISARTYFYANEAKCDSHMETFLRCIEASGRVSDDGFIAIKLTALGRPQFLLQFSEVLAKWRCFFHQMAVEQGQAGLAAMDTKLEVAVLQESVAKLGIASRAEIEDWFTAETLGVSGTMDLLDWSSLIDSRTKLSKHLVVPNAQTGQLEPLLSRFTEEEELQMTRMLQRMDVLAKKATEMGVRLMVDAEQTYFQPAISRLTLEMQRKFNVEKPLIFNTYQCYLKDAYDNVTLDVELARREGWCFGAKLVRGAYLAQERARAAEIGYEDPINPTYEATNAMYHRCLDYVLEELKHNAKAKVMVASHNEDTVRFALRRMEELGLHPADHRVYFGQLLGMCDQISFPLGQAGYPVYKYVPYGPVMEVLPYLSRRALENSSLMKGTHRERQLLWLELLRRLRTGNLFHRPA

SEQ ID NO: 68533 - protein, 37 aa, Homo sapiens
MLQQDSNDDTEDVSLFDAEEETTNRPRKAKIRMSQVD

SEQ ID NO: 68534 - protein, 600 aa, Homo sapiens
MDKGLSELSPMQQALIYSFCENHDKAIEVLDGISWNRAEMTMCALLAKVQMKAKRTKEAVEVLKKALDAISHSDKGPDATAISADCLYNLGLCYMEEGNLQMAFDSFTKAVKANPDFAESFYQRGLCKVKLHKDSSILDFNRAITLNPKHYQAYLSRVAFYGLKGRYSKAILNCNKAIKIYPESVRAYLYRGVLKYYNKTYKLAITDLTTAISMDKNSYTAFYNRALCYTKIRELQMALTDYGIVLLLDATETVKLNTFLNRGLIYVELGQYGFALEDFKQAALISRTNGSLCHATAMCHHRINEFEEAVNFFTWALKINPCFLDAYVGRGNSYMEYGHDEATKQAQKDFLKALHINPAYIKARISFGYNLQAQGKFQKAWNHFTIAIDTDPKNYLAYEGRAVVCLQMGNNFAAMQDINAAMKISTTAEFLTNRGVIHEFMGHKQNAMKDYQDAITLNPKYSLAYFNAGNIYFHHRQFSQASDYFSKALKFDPENEYVLMNRAITNTILKKYEEAKEDFANVIESCPFWAAVYFNRAHFYYCLKQYELAEEDLNKALSLKPNDALVYNFRAKVRGKIGLIEEAMADYNQALDLEDYASVI

SEQ ID NO: 68535 - protein, 80 aa, Homo sapiens
MVSGTFRATPTSTAKQKQKVTEHIPPYDVVPSMRPVVLVGPSLKGYERKYKVKLKESLSWQDLCNWLFLMQTPSITQHNL

SEQ ID NO: 68536 - protein, 125 aa, Homo sapiens
MIPMRESPPTRPCSTPTSKNRETVPKARGGPSQETRTGLCHGTAQTKAFGSGQTVVLLQPHAAVRAWIWNKWKSAGAETLEVHPCEQEGSAEPASLTALLFDPAQAATEFCVCNFSLTDRSAEGP

SEQ ID NO: 68537 - protein, 30 aa, Homo sapiens
MAKRNAEKELTDRNWDQEDEAEEGKRRAIN

SEQ ID NO: 68538 - protein, 173 aa, Homo sapiens
MAVCGLGSRLGLGSRLGLRGCFGAARLLYPRFQSRGPQGVEDGDRPQPSSKTPRIPKIYTKTGDKGFSSTFTGERRPKDDQVFEAVGTTDELSSAIGFALELVTEKGHTFAEELQKIQCTLQDVGSALATPCSSAREAHLKYTTFKAGPILELEQWIDKYTSQLPPLTAFILP

SEQ ID NO: 68539 - protein, 83 aa, Homo sapiens
MRPRGLPPLLVVLLGCWASVSAQTDATPAVTTEGLNSTEAALATFGTFPSTRPPGTPRAPGPSSGPRPTPVTDGSHSVTQAGV

SEQ ID NO: 68540 - protein, 1083 aa, Homo sapiens
MNAPDEDETINVNYNIMASYTQTKDWFALAKQSQQTVSTFSLPCCVPYNKLKSPAISSVSENFIFDDGVHPRTKKDPSKTNKLISEFEEEEGEEEEVSVSLQDTPSQALLRVYLEKKQDVDESLTMHFSTCEEFLSSYIYFILRGAIQQIVGKPVGETPDYINFNNITKVSFDDCFESIHGKNFLSELVQTTKERSEEIEQTSLSSKNESAGPESRADWCISHRTYDIGNRKEFERFKKFIKGTLGERYWWLWMDIERLKVLKDPGRHQRHLEKMKKCYLVSNGDYYLSAEILSKFKLLDGSQWNEEHLRNIQSEVLKPLLLYWAPRFCVTHSASTKYASAELKFWHLRQAKPRKDIDPFPQMATLLPLRPKSCIPQIPEIQKEEFSLSQPPKSPNKSPEVKTATQKPWKRELLYPGSSKDDVIEKGSKYMSESSKVIHLTSFTDISECLKPQLDRRYAYTEEPRVKTVSDVGALGGSDMENLLQSLYVENRAGFFFTKFCEHSGNKLWKNSVYFWFDLQAYHQLFYQETLQPFKVCKQAQYLFATYVAPSATLDIGLQQEKKKEIYMKIQPPFEDLFDTAEEYILLLLLEPWTKMVKSDQIAYKKVELVEETRQLDSTYFRKLQALHKETFSKKAEDTTCEIGTGILSLSNVSKRTEYWDNVPAEYKHFKFSDLLNNKLEFEHFRQFLETHSSSMDLMCWTDIEQFRRITYRDRNQRKAKSIYIKNKYLNKKYFFGPNSPASLYQQNQVMHLSGGWGKILHEQLDAPVLVEIQKHVQNRLENVWLPLFLASEQFAARQKIKVQMKDIAEELLLQKAEKKIGVWKPVESKWISSSCKIIAFRKALLNPVTSRQFQRFVALKGDLLENGLLFWQEVQKYKDLCHSHCDESVIQKKITTIINCFINSSIPPALQIDIPVEQAQKIIEHRKELGPYVFREAQMTIFGVLFKFWPQFCEFRKNLTDENIMSVLERRQEYNKQKKKLAVLEDEKSGKDGIKQYANTSVPAIKTALLSDSFLGLQPYGRQPTWCYSKYIEALEQERILLKIQEELEKKLFAGLQPLTNFKASSSTMSLKKNMSAHSSQK

SEQ ID NO: 68541 - protein, 1233 aa, Homo sapiens
MRGLPRGRGLMRARGRGRAAPPGSRGRGRGGPHRGRGRPRSLLSLPRAQASWTPQLSTGLTSPPVPCLPSQGEAPAEMGALLLEKETRGATERVHGSLGDTPRSEETLPKANPDSLEPAGPSSPASVTVTVGDEGADTPVGATPLIGDESENLEGDGDLRGGRILLGHATKSFPSSPSKGGSCPSRAKMSMTGAGKSPPSVQSLAMRLLSMPGAQGAAAAGSEPPPATTSPEGQPKVHRARKTMSKPGNGQPPVPEKRPPEIQHFRMSDDVHSLGKVTSDLAKRRKLNSGGGLSEELGSARRSGEVTLTKGDPGSLEEWETVVGDDFSLYYDSYSVDERVDSDSKSEVEALTEQLSEEEEEEEEEEEEEEEEEEEEEEEEDEESGNQSDRSGSSGRRKAKKKWRKDSPWVKPSRKRRKREPPRAKEPRGVSNDTSSLETERGFEELPLCSCRMEAPKIDRISERAGHKCMATESVDGELSGCNAAILKRETMRPSSRVALMVLCETHRARMVKHHCCPGCGYFCTAGTFLECHPDFRVAHRFHKACVSQLNGMVFCPHCGEDASEAQEVTIPRGDGVTPPAGTAAPAPPPLSQDVPGRADTSQPSARMRGHGEPRRPPCDPLADTIDSSGPSLTLPNGGCLSAVGLPLGPGREALEKALVIQESERRKKLRFHPRQLYLSVKQGELQKVILMLLDNLDPNFQSDQQSKRTPLHAAAQKGSVEICHVLLQAGANINAVDKQQRTPLMEAVVNNHLEVARYMVQRGGCVYSKEEDGSTCLHHAAKIGNLEMVSLLLSTGQVDVNAQDSGGWTPIIWAAEHKHIEVIRMLLTRGADVTLTDNEENICLHWASFTGSAAIAEVLLNARCDLHAVNYHGDTPLHIAARESYHDCVLLFLSRGANPELRNKEGDTAWDLTPERSDVWFALQLNRKLRLGVGNRAIRTEKIICRDVARGYENVPIPCVNGVDGEPCPEDYKYISENCETSTMNIDRNITHLQHCTCVDDCSSSNCLCGQLSIRCWYDKDGRLLQEFNKIEPPLIFECNQACSCWRNCKNRVVQSGIKVRLQLYRTAKMGWGVRALQTIPQGTFICEYVGELISDAEADVREDDSYLFDLDNKDGEVYCIDARYYGNISRFINHLCDPNIIPVRVFMLHQDLRFPRIAFFSSRDIRTGEELGFDYGDRFWDIKSKYFTCQCGSEKCKHSAEAIALEQSRLARLDPHPELLPELGSLPPVNT

SEQ ID NO: 68542 - protein, 154 aa, Homo sapiens
MALLTAETFRLQFNNKRRLRRPYYPRKALLCYQLTPQNGSTPTRGYFENKKKCHAEICFINEIKSMGLDETQCYQVTCYLTWSPCSSCAWELVDFIKAHDHLNLGIFASRLYYHWCKPQQKGLRLLCGSQVPVEVMGFPDSRGTCAGSLHGYIV

SEQ ID NO: 68543 - protein, 217 aa, Homo sapiens
MNSGAMRIHSKGHFQGGIQVKNEKNRPSLKSLKTDNRPEKSKCKPLWGKVFYLDLPSVTISEKLQKDIKDLGGRVEEFLSKDISYLISNKKEAKFAQTLGRISPVPSPESAYTAETTSPHPSHDGSSFKSPDTVCLSRGKLLVEKAIKDHDFIPSNSILSNALSWGVKILHIDDIRYYIEQKKKELYLLKKSSTSVRDGGKRVGSGAQKTRKALQSI

SEQ ID NO: 68544 - protein, 679 aa, Homo sapiens
MVELINKDYADFVNLSTNLVGMDKALNQLSVPLGQLREEVLSLRSSVSEGIRAVDERMSKQEDIRKKKMCVLRLIQVIRSVEKIEKILNSQSSKETSALEASSPLLTGQILERIATEFNQLQFHAVQSKGMPLLDKVRPRIAGITAMLQQSLEGLLLEGLQTSDVDIIRHCLRTYATIDKTRDAEALVGQVLVKPYIDEVIIEQFVESHPNGLQVMYNKLLEFVPHHCRLLREVTGGAISSEKGNTVPGYDFLVNSVWPQIVQGLEEKLPSLFNPGNPDAFHEKYTISMDFVRRLERQCGSQASVKRLRAHPAYHSFNKKWNLPVYFQIRFREIAGSLEAALTDVLEDAPAESPYCLLASHRTWSSLRRCWSDEMFLPLLVHRLWRLTLQILARYSVFVNELSLRPISNESPKEIKKPLVTGSKEPSITQGNTEDQGSGPSETKPVVSISRTQLVYVVADLDKLQEQLPELLEIIKPKLEMIGFKNFSSISAALEDSQSSFSACVPSLSSKIIQDLSDSCFGFLKSALEVPRLYRRTNKEVPTTASSYVDSALKPLFQLQSGHKDKLKQAIIQQWLEGTLSESTHKYYETVSDVLNSVKKMEESLKRLKQARKTTPANPVGPSGGMSDDDKIRLQLALDVEYLGEQIQKLGLQASDIKSFSALAELVAAAKDQATAEQP

SEQ ID NO: 68545 - protein, 279 aa, Homo sapiens
MSTPTDPGAMPHPGPSPGPGPSPGPILGPSPGPGPSPGSVHSMMGPSPGPPSVSHPMPTMGSTDFPQEGMHQMHKPIDGIHDKGIVEDIHCGSMKGTGMRPPHPGMGPPQSPMDQHSQGYMSPHPSPLGAPEHVSSPMSGGGPTPPQMPPSQPGALIPGDPQAMSQPNRGPSPFSPVQLHQLRAQILAYKMLARGQPLPETLQLAVQGKRTLPGLQQQQQQQQQQQQQQQQQQQQQQQPQQQPPQPQTQQQQQPALVNYNRPSGRLIRNQMNNAMVQLG

SEQ ID NO: 68546 - protein, 163 aa, Homo sapiens
MDAVEPGGRGWASMLACRLWKAISRALFAEFLATGLYVFFGVGSVMRWPTALPSVLQIAITFNLVTAMAVQVTWKASGAHANPAVTLAFLVGSHISLPRAVAYVAAQLVGATVGAALLYGVMPGDIRETLGINVAPPTSSALRLFPSSSLHLEACLTRPFSIS

SEQ ID NO: 68547 - protein, 224 aa, Homo sapiens
MASPQLCRALVSAQWVAEALRAPRAGQPLQLLDASWYLPKLGRDARREFEERHIPGAAFFDIDQCSDRTSPYDHMLPGAEHFAEYAGRLGVGAATHVVIYDASDQGLYSAPRVWWMFRAFGHHAVSLLDGGLRHWLRQNLPLSSGKSQPAPAEFRAQLDPAFIKTYEDIKENLESRRFQVVDSRATGRFRGTEPEPRDGSGSTAQAGVQWHNHGSLQPQPPGLR

SEQ ID NO: 68548 - protein, 471 aa, Homo sapiens
MRSCLWRCRHLSQGVQWSLLLAVLVFFLFALPSFIKEPQTKPSRHQRTENIKERSLQSLAKPKSQAPTRARRTTIYAEPVPENNALNTQTQPKAHTTGDRGKEANQAPPEEQDKVPHTAQRAAWKSPEKEKTMVNTLSPRGQDAGMASGRTEAQSWKSQDTKTTQGNGGQTRKLTASRTVSEKHQGKAATTAKTLIPKSQHRMLAPTGAVSTRTRQKGVTTAVIPPKEKKPQATPPPAPFQSPTTQRNQRLKAANFKSEPRWDFEEKYSFEIGGLQTTCPDSVKIKASKSLWLQKLFLPNLTLFLDSRHFNQSEWDRLEHFAPPFGFMELNYSLVQKVVTRFPPVPQQQLLLASLPAGSLRCITCAVVGNGGILNNSHMGQEIDSHDYVFRLSGALIKGYEQDVGTRTSFYGFTAFSLTQSLLILGNRGFKNVPLGKAQTPGSFSGSPAHGQVPVAAPRLSPIHEEQVSEV

SEQ ID NO: 68549 - protein, 248 aa, Homo sapiens
MAGSSSLEAVRRKIRSLQEQADAAEERAGTLQRELDHERKLRETAEADVASLNRRIQLVEEELDRAQERLATALQKLEEAEKAADESERGMKVIESRAQKDEEKMEIQEIQLKEAKHIAEDADRKYEEVARKLVIIESDLERAEERAELSEGKCAELEEELKTVTNNLKSLEAQAEKYSQKEDRYEEEIKVLSDKLKEAETRAEFAERSVTKLEKSIDDLEDELYAQKLKYKAISEELDHALNDMTSM

SEQ ID NO: 68550 - protein, 80 aa, Homo sapiens
MTPGTQSPFFLLLLLTVLTATTAPKPATVVTGSGHASSTPGGEKETSATQRSSVPSSTEKNAIPAPTTTKSCRETFLKCE

SEQ ID NO: 68551 - protein, 1256 aa, Homo sapiens
MSAEASARPLRVGSRVEVIGKGHRGTVAYVGATLFATGKWVGVILDEAKGKNDGTVQGRKYFTCDEGHGIFVRQSQIQVFEDGADTTSPETPDSSASKVLKREGTDTTAKTSKLRGLKPKKAPTARKTTTRRPKPTRPASTGVAGASSSLGPSGSASAGELSSSEPSTPAQTPLAAPIIPTPVLTSPGAVPPLPSPSKEEEGLRAQVRDLEEKLETLRLKRAEDKAKLKELEKHKIQLEQVQEWKSKMQEQQADLQRRLKEARKEAKEALEAKERYMEEMADTADAIEMATLDKEMAEERAESLQQEVEALKERVDELTTDLEILKAEIEEKGSDGAASSYQLKQLEEQNARLKDALVRMRDLSSSEKQEHVKLQKLMEKKNQELEVVRQQRERLQEELSQAESTIDELKEQVDAALGAEEMVEMLTDRNLNLEEKVRELRETVGDLEAMNEMNDELQENARETELELREQLDMAGARVREAQKRVEAAQETVADYQQTIKKYRQLTAHLQDVNRELTNQQEASVERQQQPPPETFDFKIKFAETKAHAKAIEMELRQMEVAQANRHMSLLTAFMPDSFLRPGGDHDCVLVLLLMPRLICKAELIRKQAQEKFELSENCSERPGLRGAAGEQLSFAAGLVYSLSLLQATLHRYEHALSQCSVDVYKKVGSLYPEMSAHERSLDFLIELLHKDQLDETVNVEPLTKAIKYYQHLYSIHLAEQPEDCTMQLADHIKFTQSALDCMSVEVGRLRAFLQGGQEATDIALLLRDLETSCSDIRQFCKKIRRRMPGTDAPGIPAALAFGPQVSDTLLDCRKHLTWVVAVLQEVAAAAAQLIAPLAENEGLLVAALEELAFKASEQIYGTPSSSPYECLRQSCNILISTMNKLATAMQEGEYDAERPPSKPPPVELRAAALRAEITDAEGLGLKLEDRETVIKELKKSLKIKGEELSEANVRLSLLEKKLDSAAKDADERIEKVQTRLEETQALLRKKEKEFEETMDALQADIDQLEAEKAELKQRLNSQSKRTIEGLRGPPPSGIATLVSGIAGGAIPGQAPGSVPGPGLVKDSPLLLQQISAMRLHISQLQHENSILKGAQMKASLASLPPLHVAKLSHEGPGSELPAGALYRKTSQLLETLNQLSTHTHVVDITRTSPAAKSPSAQLMEQVAQLKSLSDTVEKLKDEVLKETVSQRPGATVPTDFATFPSSAFLRAKEEQQDDTVYMGKVTFSCAAGFGQRHRLVLTQEQLHQLHSRLIS

SEQ ID NO: 68552 - protein, 146 aa, Homo sapiens
MDNMTSSAQIIQRSFSSPENFQRQAVMNSALRQMSYGGKFGSSPLDQSGFSPSVQSHSHSFNQSSSSQWRQGTPSSQRKVRMNSYPYLADRHYSREQRYTDHGSDHHYRGKRDDFFYEDRNHDDWSHDYDNRRDSSRDGKWRSSRH

SEQ ID NO: 68553 - protein, 75 aa, Homo sapiens
MADEMGLGKTLQCITLMWTLLRQSPECKPEIDKAVVVSPSSLVKNWYNEVGKWLGGRIQPLAIDGGSKDEIDQKL

SEQ ID NO: 68554 - protein, 175 aa, Homo sapiens
MAGRVPSLLVLLVFPSSCLAFRSPLSVFKRFKETTRPFSNECLGTTRPVVPIDSSDFALDIRMPGVTPKQLTSSLEPAWILSITCYFLDAICLHPLEVTGFVMKEPVQIKPIFCMPGREMLPLPGSPKVLDSELEERLEVNTLYYRYTMGILVLLEIITRTVLVCPYTSHVCHSL

SEQ ID NO: 68555 - protein, 1263 aa, Homo sapiens
MSGGGGGGGSAPSRFADYFVICGLDTETGLEPDELSGENFEQTPLRRTFKSKVLARYPENVEWNPFDQDAVGMLCMPKGLAFKTQADPREPQFHAFIITREDGSRTFGFALTFYEEVTSKQICSAMQTLYHMHNAEYDVLHAPPADDRDQSSMEDGEDTPVTKLQRFNSYDISRDTLYVSKCICLITPMSFMKACRSVLEQLHQAVTSPQPPPLPLESYIYNVLYEVPLPPPGRSLKFSGVYGPIICQRPSTNELPLFDFPVKEVFELLGVENVFQLFTCALLEFQILLYSQHYQRLMTVAETITALMFPFQWQHVYVPILPASLLHFLDAPVPYLMGLHSNGLDDRSKLELPQEANLCFVDIDNHFIELPEDLPQFPNKLEFVQEVSEILMAFGIPPEGNLHCSESASKLKRLRASELVSDKRNGNIAGSPLHSYELLKENETIARLQALVKRTGVSLEKLEVREDPSSNKDLKVQCDEEELRIYQLNIQIREVFANRFTQMFADYEVFVIQPSQDKESWFTNREQMQNFDKASFLSDQPEPYLPFLSRFLETQMFASFIDNKIMCHDDDDKDPVLRVFDSRVDKIRLLNVRTPTLRTSMYQKCTTVDEAEKAIELRLAKIDHTAIHPHLLDMKIGQGKYEPGFFPKLQSDVLSTGPASNKWTKRNAPAQWRRKDRQKQHTEHLRLDNDQREKYIQEARTMGSTIRQPKLSNLSPSVIAQTNWKFVEGLLKECRNKTKRMLVEKMGREAVELGHGEVNITGVEENTLIASLCDLLERIWSHGLQVKQGKSALWSHLLHYQDNRQRKLTSGSLSTSGILLDSERRKSDASSLMPPLRISLIQDMRHIQNIGEIKTDVGKARAWVRLSMEKKLLSRHLKQLLSDHELTKKLYKRYAFLRCDDEKEQFLYHLLSFNAVDYFCFTNVFTTILIPYHILIVPSKKLGGSMFTANPWICISGELGETQIMQIPRNVLEMTFECQNLGKLTTVQIGHDNSGLYAKWLVEYVMVRNEITGHTYKFPCGRWLGKGMDDGSLERILVGELLTSQPEVDERPCRTPPLQQSPSVIRRLVTISPNNKPKLNTGQIQESIGEAVNGIVKHFHKPEKERGSLTLLLCGECGLVSALEQAFQHGFKSPRLFKNVFIWDFLEKAQTYYETLEKNEVVPEENWHTRARNFCRFVTAINNTPRNIGKDGKFQMLVCLGARDHLLHHWIALLADCPITAHMYEDVALIKDHTLVNSLIRVLQTLQEFNITLETSLVKGIDI

SEQ ID NO: 68556 - protein, 214 aa, Homo sapiens
MVDIIAKVTRRQSRALPAQVDDPPEPVYANIERQPRATSPGAAAAPLPSPVWETHTDAGTGRPYYYNPDTGVTTWESPFEAAEGAASPATSPASVDSHPPTPETDYPESLTSYPEEDYSPVGSFGEPGPTSPLTTPPGWSCHVSQDKQMLYTNHFTQEQWVRLEDPHGKPYFYNPEDSSVRWELPQVPVPAPRSIHKSSQDGDTPAQASPPEEK

SEQ ID NO: 68557 - protein, 335 aa, Homo sapiens
MNHKSKKRIREAKRSARPELKDSLDWTRHNYYESFSLSPAAVADNVERADALQLSVEEFVERYERPYKPVVLLNAQEGWSAQEKWTLERLKRKYRNQKFKCGEDNDGYSVKMKMKYYIEYMESTRDDSPLYIFDSSYGEHPKRRKLLEDYKVPKFFTDDLFQYAGEKRRPPYRWFVMGPPRSGTGIHIDPLGTSAWNALVQGHKRWCLFPTSTPRELIKVTRDEGGNQQDEAITWFNVIYPRTQLPTWPPEFKPLEILQKPGETVFVPGGWWHVVLNLDTTIAITQNFASSTNFPVVWHKTVRGRPKLSRKWYRYSTGSGSASHPQPPRATVSQP

SEQ ID NO: 68558 - protein, 84 aa, Homo sapiens
MAERAALEELVKLQGERVRGLKQQKASAELIEEEVAKLLKLKAQLGPDESKQKFVLKTPKMGFHRVGCAGLEFLASSDPPTSAS

SEQ ID NO: 68559 - protein, 238 aa, Homo sapiens
MFLVNSFLKGGGGGGGGGGGLGGGLGNVLGGLISGAGGGGGGGGGGGGGGGGGGGGTAMRILGGVISAISEAAAQYNPEPPDMEVSATELMNILNKVVTRHPDLKTDGFGIDTCRSMVAVMDSDTTGKLGFEEFKYLWNNIKRWQAIYKQFDTDRSGTICSSELPGAFEAAGFHLNEHLYNMIIRRYSDESGNMDFDNFISCLVRLDAMFRAFKSLDKDGTGQIQVNIQEWLQLTMYS

SEQ ID NO: 68560 - protein, 346 aa, Homo sapiens
MESPSAPPHRWCIPWQRLLLTASLLTFWNPPTTAKLTIESTPFNVAEGKEVLLLVHNLPQHLFGYSWYKGERVDGNRQIIGYVIGTQQATPGPAYSGREIIYPNASLLIQNIIQNDTGFYTLHVIKSDLVNEEATGQFRVYPELPKPSISSNNSKPVEDKDAVAFTCEPETQDATYLWWVNNQSLPVSPRLQLSNGNRTLTLFNVTRNDARAYVCGIQNSVSANRSDPVTLDVLYGPDTPIISPPDSSYLSGANLNLSCHSASNPSPQYSWRINGIPQQHTQVLFIAKITPNNNGTYACFVSNLATGRNNSIVKSITVSASGTSPGLSAGATVGIMIGVLVGVALI

SEQ ID NO: 68561 - protein, 137 aa, Homo sapiens
MEERGDSEPTPGCSGLGPGGVRGFGDGGGAPSWAPEDAWMGTHPKYLEMMELDIGDATQVYVAFLVYLDLMESKSWHEVNCVGLPELQLICLVGTEIEGEGLQTVVPTPITASLSHNRYWRATFEEGKYLATLKDLH

SEQ ID NO: 68562 - protein, 777 aa, Homo sapiens
MEEPGATPQPYLGLVLEELRRVVAALPESMRPDENPYGFPSELVVCAAVIGFFVVLLFLWRSFRSVRSRLYVGREQKLGATLSGLIEEKCKLLEKFSLIQKEYEGYEVESSLEDASFEKAAAEEARSLEATCEKLNRSNSELEDEILCLEKDLKQEKSKHSQQDELMADISKSIQSLEDESKSLKSQIAEAKIICKTFKMSEERRAIAIKDALNENSQLQTSHKQLFQQEAEVWKGQVSELNKQKITFEDSKVHAEQVLNDKENHIKTLTGHLPMMKDQAAVLEEDTMDDDNLELEVNSQWENGANLDDPLKGALKKLIHAAKLNVSLKSLEGERNHIIIQLSEVDKTKEELTEHIKNLQTQQVSLQSENIYFESENQKLQQKLKIMTEFYQENEMKLYRKLTVEENYRIEEEEKLSRVEGKLSRATEQLETYRKLAKDLEEELERTVHFYQKQVISYEKRGHDNWLAARTAERNLSDLRKENAHNKQKLTETELKFELLEKDPNALDVSNTAFGREHSPCSPSPLGRPSSETRAFPSPQTLLEDPLRLSPVLPGGGGRGPSSPGNPLDHQITNERGEPSYDRLIDPHRAPSDTGSLSSPVEQDRRMMFPPPGQSYPDSTLPPQREDRFYSNSERLSGPAEPRSFKMTSLDKMDRSMPSEMESSRNDAKDDLGNLNVPDSSLPAENEATGPGLIPPPLAPISGPLFPVDTRGPFMRRGPPFPPPPPGTMFGASRGYFPPRDFPGPPHAPFAMRNIYPPRGLPPYLHPRPGFYPNPTF

SEQ ID NO: 68563 - protein, 201 aa, Homo sapiens
MEEEETQLEEKNSLRVEGDNIYVRHSNLMLEELDKAQEDILKHQASISELKRNFMESTPEPRPNEWEKRRITPLSLQTQGTRAPESEGPCTGARDAVKPPVVKTEMVTISDASQRTEISTKEVPIVQTETKTITYESPQTVKGGISETRIEKRIVITGDGDIDHDQALAQAIREAREQHPDMSVTRVVVHKETELAEEGED

SEQ ID NO: 68564 - protein, 454 aa, Homo sapiens
MRRLICKRICDYKSFDDEESVDGNRPSSAASAFKVPAPKTSGNPANSARKPGSAGGPKVGGASKEGGAGAVDEDDFIKAFTDVPSIQIYSSRELEETLNKIREILSDDKHDWDQRANALKKIRSLLVAGAAQYDCFFQHLRLLDGALKLSAKDLRSQVVREACITVAHLSTVLGNKFDHGAEAIVPTLFNLVPNSAKVMATSGCAAIRFIIRHTHVPRLIPLITSNCTSKSVPVRRRSFEFLDLLLQEWQTHSLERHAAVLVETIKKGIHDADAEARVEARKTYMGLRNHFPGEAETLYNSLEPSYQKSLQTYLKSSGSVASLPQSDRSSSSSQESLNRPFSSKWSTANPSTVAGRVSAGSSKASSLPGSLQRSRSDIDVNAAAGAKAHHAAGQSVRSGRLGAGALNAGSYASLGKRTDYGKLYHVLSLISVKTSSYTLIISIHSCYLRIVHMF

SEQ ID NO: 68565 - protein, 1247 aa, Homo sapiens
MGVDFDVKTFCHNLRATKPPYECPVETCRKVYKSYSGIEYHLYHYDHDNPPPPQQTPLRKHKKKGRQSRPANKQSPSPSEVSQSPGREVMSYAQAQRMVEVDLHGRVHRISIFDNLDVVSEDEEAPEEAPENGSNKENTETPAATPKSGKHKNKEKRKDSNHHHHHNVSASTTPKLPEVVYRELEQDTPDAPPRPTSYYRYIEKSAEELDEEVEYDMDEEDYIWLDIMNERRKTEGVSPIPQEIFEYLMDRLEKESYFESHNKGDPNALVDEDAVCCICNDGECQNSNVILFCDMCNLAVHQECYGVPYIPEGQWLCRRCLQSPSRAVDCALCPNKGGAFKQTDDGRWAHVVCALWIPEVCFANTVFLEPIDSIEHIPPARWKLTCYICKQRGSGACIQCHKANCYTAFHVTCAQQAGLYMKMEPVRETGANGTSFSVRKTAYCDIHTPPGSARRLPALSHSEGEEDEDEEEDEGKGWSSEKVKKAKAKSRIKMKKARKILAEKRAAAPVVSVPCIPPHRLSKITNRLTIQRKSQFMQRLHSYWTLKRQSRNGVPLLRRLQTHLQSQRNCDQVGRDSEDKNWALKEQLKSWQRLRHDLERARLLVELIRKREKLKRETIKVQQIAMEMQLTPFLILLRKTLEQLQEKDTGNIFSEPVPLSEVPDYLDHIKKPMDFFTMKQNLEAYRYLNFDDFEEDFNLIVSNCLKYNAKDTIFYRAAVRLREQGGAVLRQARRQAEKMGIDFETGMHIPHSLAGDEATHHTEDAEEERLVLLENQKHLPVEEQLKLLLERLDEVNASKQSVGRSRRAKMIKKEMTALRRKLAHQRETGRDGPERHGPSSRGSLTPHPAACDKDGQTDSAAEESSSQETSKGLGPNMSSTPAHEVGRRTSVLFSKKNPKTAGPPKRPGRPPKNRESQMTPSHGGSPVGPPQLPIMSSLRQRKRGRSPRPSSSSDSDSDKSTEDPPMDLPANGFSGGNQPVKKSFLVYRNDCSLPRSSSDSESSSSSSSSAASDRTSTTPSKQGRGKPSFSRGTFPEDSSEDTSGTENEAYSVGTGRGVGHSSKFPCPRPGMLGTQCQGLASPPAADPPPLPHSCEVVRKSLGRGAGWLSEDEDSPLDALDLVWAKCRGYPSYPALIIDPKMPREGMFHHGVPIPVPPLEVLKLGEQMTQEAREHLYLVLFFDNKRTWQWLPRTKLVPLGVNQDLDKEKMLEGRKSNIRKSVQIAYHRALQHRSKVQGEQSSETSDSD

SEQ ID NO: 68566 - protein, 119 aa, Homo sapiens
  MOD_RES (1)..(1): Any amino acid
XCSQSERQLLLYEAEALAGGPLAVLGLDVAPSTLLPSYDPDTGLVLLTGKGDTRVFLYELLPESPFFLECNSFTSPDPHKGLVLLPKTECDVREVELMRCLRLRQSSLEPVAFRLPRVR

SEQ ID NO: 68567 - protein, 301 aa, Homo sapiens
MESIFHEKQEGSLCAQHCLNNLLQGEYFSPVELSSIAHQLDEEERMRMAEGGVTSEDYRTFLQQPSGNMDDSGFFSIQVISNALKVWGLELILFNSPEYQRLRIDPINERSFICNYKEHWFTVRKLGKQWFNLNSLLTGPELISDTYLALFLAQLQQEGYSIFVVKGDLPDCEADQLLQMIRVQQMHRPKLIGEELAQLKEQRVHKTDLERVLEANDGSGMLDEDEEDLQRALALSRQEIDMEDEEADLRRAIQLSMQGSSRNISQDMTQTSGTNLTSEELRKRREAYFENHNSEVDEGKF

SEQ ID NO: 68568 - protein, 220 aa, Homo sapiens
MTTMQGMEQAMPGAGPGVPQLGNMAVIHSHLWKGLQEKFLKGEPKVLGVVQILTALMSLSMGITMMCMASNTYGSNPISVYIGYTIWGSVMFIISGSLSIAAGIRTTKGLVRGSLGMNITSSVLAASGILINTFSLAFYSFHHPYCNYYGNSNNCHGTMSILMGLDGMVLLLSVLEFCIAVSLSAFGCKVLCCTPGGVVLILPSHSHMAETASPTPLNEV

SEQ ID NO: 68569 - protein, 478 aa, Homo sapiens
MSLQVLNDKNVSNEKNTENCDFLFSPPEVTGRSSVLRVSQKENVPPKNLAKAMKVTFQTPLRDPQTHRILSPSMASKLEAPFTQDDTLGLENSHPVWTQKEKQLHSASAEDTPVVQLAAETPTAESKERALNSASTSLPTSCPGSEPVPTHQQGQPALELKEESFRDPAEVLGTGAEVDYLEQFGTSSFKESALRKQSLYLKFDPLLRDSPGRPVPVATETSSMHGANETPSGRPREAKLVEFDFLGALDIPVPGPPPGVPAPGGPPLSTGPIVDLLQYSQKDLDAVVKATQEENRELRSRCEELHGKNLELGKIMDRFEEVVYQAMEEVQKQKELSKAEIQKVLKEKDQLTTDLNSMEKSFSDLFKRFEKQKEVIEGYRKNEESLKKCVEDYLARITQEGQRYQALKAHAEEKLQLANEEIAQVRSKAQAEALALQASLRKEQMRIQSLEKTVEQKTKENEELTRICDDLISKMEKI

SEQ ID NO: 68570 - protein, 481 aa, Homo sapiens
MPQLDSGGGGAGGGDDLGAPDELLAFQDEGEEQDDKSRDSAAGPERDLAELKSSLVNESEGAAGGAGIPGVPGAGAGARGEAEALGREHAAQRLFPDKLPEPLEDGLKAPECTSGMYKETVYSAFNLLMHYPPPSGAGQHPQPQPPLHKANQPPHGVPQLSLYEHFNSPHPTPAPADISQKQVHRPLQTPDLSGFYSLTSGSMGQLPHTVSWFTHPSLMLGSGVPGHPAAIPHPAIVPPSGKQELQPFDRNLKTQAESKAEKEAKKPTIKKPLNAFMLYMKEMRAKVIAECTLKESAAINQILGRRWHALSREEQAKYYELARKERQLHMQLYPGWSARDNYGKKKRRSREKHQESTTDPGSPKKCRARFGLNQQTDWCGPCRRKKKCIRYLPGEGRCPSPVPSDDSALGCPGSPAPQDSPSYHLLPRFPTELLTSPAEPAPTSPGLSTALSLPTPGPPQAPRSTLQSTQVQQQESQRQVA

SEQ ID NO: 68571 - protein, 38 aa, Homo sapiens
MDRGEQAFYFIWNFWLELGKDLSFLHSYKMSAENRPSP

SEQ ID NO: 68572 - protein, 47 aa, Homo sapiens
MAAGFGRCCRSSPNSRKNFKLLLVNLPERKSSQWLQNMIKLVNIQSP

SEQ ID NO: 68573 - protein, 322 aa, Homo sapiens
MVAGESGLGKSTLVHSLFLTDLYKDRKLLSAEERISQTVEILKHTVDIEEKGVKLKLTIVDTPGFGDAVNNTECWKPITDYVDQQFEQYFRDESGLNRKNIQDNRVHCCLYFISPFGHGLRPVDVGFMKALHEKVNIVPLIAKADCLVPSEIRKLKERIREEIDKFGIHVYQFPECDSDEDEDFKQQDRELKESAPFAVIGSNTVVEAKGQRVRGRLYPWGIVEVENQAHCDFVKLRNMLIRTHMHDLKDVTCDVHYENYRAHCIQQMTSKLTQDSRMESPIPILPLPTPDAETEKLIRMKDEELRRMQEMLQRMKQQMQDQ

SEQ ID NO: 68574 - protein, 1196 aa, Homo sapiens
MTECTSLQFVSPFAFEAMQKVDVVCLASLSDPELRLLLPCLVRMALCAPADQSQSWAQDKKLILRLLSGVEAVNSIVALLSVDFHALEQDASKEQQLRHKLGGGSGESILVSQLQHGLTLEFEHSDSPRRLRLVLSELLAIMNKVSESNGEFFFKSSELFESPVYLEEAADVLCILQAELPSLLPIVDVAEALLHVRNGAWFLCLLVANVPDSFNEVCRGLIKNGERQDEESLGGRRRTDALRFLCKMNPSQALKVRGMVVEECHLPGLGVALTLDHTKNEACEDGVSDLVCFVSGLLLGTNAKVRTWFGTFIRNGQQRKRETSSSVLWQMRRQLLLELMGILPTVRSTRIVEEADVDMEPNVSVYSGLKEEHVVKASALLRLYCALMGIAGLKPTEEEAEQLLQLMTSRPPATPAGVRFVSLSFCMLLAFSTLVSTPEQEQLMVVWLSWMIKEEAYFESTSGVSASFGEMLLLVAMYFHSNQLSAIIDLVCSTLGMKIVIKPSSLSRMKTIFTQEIFTEQVVTAHAVRVPVTSNLSANITGFLPIHCIYQLLRSRSFTKHKVSIKDWIYRQLCETSTPLHPQLLPLIDVYINSILTPASKSNPEATNQPVTEQEILNIFQGVIGGDNIRLNQRFSITAQLLVLYYILSYEEALLANTKTLAAMQRKPKSYSSSLMDQIPIKFLIRQAQGLQQELGGLHSALLRLLATNYPHLCIVDDWICEEEITGTDALLRRMLLTNNAKNHSPKQLQEAFSAVPVNNTQVMQIIEHLTLLSASELIPYAEVLTSNMSQLLNSGVPRRILQTVNKLWMVLNTVMPRRLWVMTVNALQPSIKFVRQQKYTQNDLMIDPLIVLRCDQRVHRCPPLMDITLHMLNGYLLASKAYLSAHLKETEQDRPSQNNTIGLVGQTDAPEVTREELKNALLAAQDSAAVQILLEICLPTEEEKANGVNPDSLLRNVQSVITTSAPNKGMEEGEDNLLCNLREVQCLICCLLHQMYIADPNIAKLVHFQGYPCELLPLTVAGIPSMHICLDFIPELIAQPELEKQIFAIQLLSHLCIQYALPKSLSVARLAVNVMGTLLTVLTQAKRYAFFMPTLPSLVSFCRAFPPLYEDIMSLLIQIGQVCASDVATQTRDIDPIITRLQQIKEKPSGWSQICKDSSYKNGSRDTGSMDPDVQLCHCIERTVIEIINMSVSGI

SEQ ID NO: 68575 - protein, 184 aa, Homo sapiens
MFLSSVGFSVVMMSIWPYLQKIDPTADTSFLGWVIASYSLGQMVASPIFGLWSNYRPRKEPLIVSILISVAANCLYAYLHIPASHNKYYMLVARGLLGIGAGNVAVVRSYTAGATSLQERTSSMANISMCQALGFILGPENIVWMTQEDSVKVLILKKQVQMKLRFPKEILTRLLLWPSMFCFL

SEQ ID NO: 68576 - protein, 977 aa, Homo sapiens
MTSEEKKERPISMINEASNYNVTSDYAVHPMSPVGRTSRASKKVHNFGKRSNSIKRNPNAPVVRRGWLYKQDSTGMKLWKKRWFVLSDLCLFYYRDEKEEGILGSILLPSFQIALLTSEDHINRKYAFKAAHPNMRTYYFCTDTGKEMELWMKAMLDAALVQTEPVKRVDKITSENAPTKETNNIPNHRVLIKPEIQNNQKNKEMSKIEEKKALEAEKYGFQKDGQDRPLTKINSVKLNSLPSEYESGSACPAQTVHYRPINLSSSENKIVNVSLADLRGGNRPNTGPLYTEADRVIQRTNSMQQLEQWIKIQKGRGHEEETRGVISYQTLPRNMPSHRAQIMARYPEGYRTLPRNSKTRPESICSVTPSTHDKTLGPGAEEKRRSMRDDTMWQLYEWQQRQFYNKQSTLPRHSTLSSPKTMVNISDQTMHSIPTSPSHGSIAAYQGYSPQRTYRSEVSSPIQRGDVTIDRRHRAHHPKHVYVPDRRSVPAGLTLQSVSPQSLQGKTLSQDEGRGTLYKYRPEEVDIDAKLSRLCEQDKVVHALEEKLQQLHKEKYTLEQALLSASQEIEMHADNPAAIQTVVLQRDDLQNGLLSTCRELSRATAELERAWREYDKLEYDVTVTRNQMQEQLDHLGEVQTESAGIQRAQIQKELWRIQDVMEGLSKHKQQRGTTEIGMIGSKPFSTVKYKNEEEEVVPPRPPLPRSYDFTEQPPIIPPLPSDSSSLLCYSRGPVHLPEEKKMYQVQGYPRNGSHCGPDYRLYKSEPELTTVAEVDESNGEEKSEPVSEIETSVVKGSHFPVGVVPPRAKSPTPESSTIASYVTLRKTKKMMDLRTERPRSAVEQLCLAESTRPRMTVEEQMERIRRHQQACLREKKKGLNVIGASDQSPLQSPSNLRDNPFRTTQTRRRDDKELDTAIRENDVKPDHETPATEIVQLKETEPQNVDFSKELKKTENISYEMLFEPEPNGVNSVEMMD

SEQ ID NO: 68577 - protein, 138 aa, Homo sapiens
MYVWPCAVVLAQYLWFHRRSLPGKAILEIGAGVSLPGILAAKCGAEVILSDSSELPHCLEVCRQSCQMNNLPHLQVVGLTWGHISWDLLALPPQDIILASDVFFEPEDFEDILATIYFLMHKNPKVQLWSTYQVRRQC

SEQ ID NO: 68578 - protein, 41 aa, Homo sapiens
MKIFLPVLLAALLGVEREEQSVLPEADHLLRPGQLLRDCVC

SEQ ID NO: 68579 - protein, 61 aa, Homo sapiens
MAPKKPEPKKEAAKPAPAPAPAPAPAPAPAPEAPKEPAFDPKSVKSSKRPFHCLTGPRLER

SEQ ID NO: 68580 - protein, 156 aa, Homo sapiens
MPSSVSWGILLLAGLCCLVPVSLAEDPQGDAAQKTDTSHHDQDHPTFNKITPNLAEFAFSLYRQLAHQSNSTNIFFSPVSIATAFAMLSLGTKADTHDEILEGLNFNLTEIPEAQIHEGFQELLRTLNQPDSQLQLTTGNGLFLSEGLKLVDKFLE

SEQ ID NO: 68581 - protein, 179 aa, Homo sapiens
MRPRGLPPLLVVLLGCWASVSAQTDATPAVTTEGLNSTEAALATFGTFPSTRPPGTPRAPGPSSGPRPTPVTDVAVLCVCDLSPAQCDINCCCDPDCSSVDFSVFSACSVPVVTGDSQFCSQKAVIYSLNFTANPPQRVFELVDQINPSIFCIHITNSHFTPGLSRWLCESRSRILSFP

SEQ ID NO: 68582 - protein, 53 aa, Homo sapiens
MYAKGGKGSAVPSDSQAREKYCLSLSLPSRTWPPGQGPGVCTAQKALHGCWRN

SEQ ID NO: 68583 - protein, 70 aa, Homo sapiens
MAAPGPALCLFDVDGTLTAPRQKITKEMDDFLQKLRQKIKIGVVGGSDFEKVQEQLGNDGVLSLNSEMGC

SEQ ID NO: 68584 - protein, 386 aa, Homo sapiens
MLSSFPVVLLETMSHYTDEPRFTIEQIDLLQRLRRTGMTKHEILHALETLDRLDQEHSDKFGRRSSYGGSSYGNSTNNVPASSSTATASTQTQHSGMSPSPSNSYDTSPQPCTTNQNGRENNERLSTSNGKMSPTRYHANSMGQRSYSFEASEEDLDVDDKVEELMRRDSSVIKEEIKAFLANRRISQAVVAQVTGISQSRISHWLLQQGSDLSEQKKRAFYRWYQLEKTNPGATLSMRPAPIPIEDPEWRQTPPPVSATSGTFRLRRGSRFTWRKECLAVMESYFNENQYPDEAKREEIANACNAVIQKPGKKLSDLERVTSLKVYNWFANRRKEIKRRANIAAILESHGIDVQSPGGHSNSDDVDGNDYSEQTDRMQAEVVAQE

SEQ ID NO: 68585 - protein, 155 aa, Homo sapiens
MVMAAKKGPGPGGGVSGGKAEAEAASEVWCRRVRELGGCSQAGNRHCFECAQRGVTYVDITVGSFVCTTCSGLLRGLNPPHRVKSISMTTFTEPEVVFLQSRGNEVCRKIWLGLFDARTSLVPDSRDPQKVKEFLQEKYEKKRWPDTFPRRLCQL

SEQ ID NO: 68586 - protein, 56 aa, Homo sapiens
MSQEGAVPASAVPLEELSSWPEELCRRELPSVLPRLLSLSQHSDSWIEHIHCEIIR

SEQ ID NO: 68587 - protein, 403 aa, Homo sapiens
MEKSQKINPFILHILQEVDEEIKKGLAAGITLNIAGNNRLVPVERVTGEDFWILSKILKNCLYINGLDVGYNLLCDVGAYYAAKLLQKQLNLIYLNLMFNDIGPEGGELIAKVLHKNRTLKYLRMTGNKIENKGGMFFAAMLQINSSLEKLDLGDCDLGMQSVIAFATVLTQNQAIKAINLNRPILYSEQEESTVHVGRMLKENHCLVALHMCKHDIKNSGIQQLCDALYLNSSLRYLDVSCNKITHDGMVYLADVLKSNTTLEVIDLSFNRIENAGANYLSETLTSHNRSLKALSVVSNNIEGEGLVALSQSMKTNLTFSHIYIWGNKFDEATCIAYSDLIQMGCLKPDNTDVEPFVVDGRVYLAEVSNGLKKHYYWTSTYGESYDHSSNAGFALVPVGQQP

SEQ ID NO: 68588 - protein, 250 aa, Homo sapiens
MEQVQTGGLRTGSGFLTSTLHVIQEIIGCRVRRDPPNSTERYTRWINQLTPEQLLTQVFTSNGPTVIMPTWFCSRAWFSHVGPFNEGGQGVPEDLLFFYEHLRKGGGVIRVDQSLLLYRHHPQAATHCVLETTIWTHRVRFLEEQALPRWAAFTIWNAGKQGRRLYRSLTAGSQRKVVAFCDVDENKIRKGFYCHEDSQERPKPRIPILHFRAARPPFVICVKLDLTGGAFEDNLRSLHLQEGQDFLHFS

SEQ ID NO: 68589 - protein, 258 aa, Homo sapiens
MEPNDSTSTAVEEPDSLEVLVKTLDSQTRTFIVGAQMNVKEFKEHIAASVSIPSEKQRLIYQGRVLQDDKKLQEYNVGGKVIHLVERAPPQTHLPSGASSGTGSASATHGGGSPPGTRGPGASVHDRNANSYVMVGTFNLPSDGSAVDVHINMEQAPIQSEPRVRLVMAQHMIRDIQTLLSRMECRGGPQPQHSQPPPQPPAVTPEPVALSSQTSEPVESEAPPREPMEAEEVEERAPAQNPELTPGPAPAGPTPAPE

SEQ ID NO: 68590 - protein, 38 aa, Homo sapiens
MAMESTATAAVAAELVSADKIEDVPAPSTSADKVESNH

SEQ ID NO: 68591 - protein, 1022 aa, Homo sapiens
MATEGAAQLGNRVAGMVCSLWVLLLVSSVLALEEVLLDTTGETSEIGWLTYPPGGWDEVSVLDDQRRLTRTFEACHVAGAPPGTGQDNWLQTHFVERRGAQRAHIRLHFSVRACSSLGVSGGTCRETFTLYYRQAEEPDSPDSVSSWHLKRWTKVDTIAADESFPSSSSSSSSSSSSAAWAVGPHGAGQRAGLQLNVKERSFGPLTQRGFYVAFQDTGACLALVAVRLFSYTCPAVLRSFASFPETQASGAGGASLVAAVGTCVAHAEPEEDGVGGQAGGSPPRLHCNGEGKWMVAVGGCRCQPGYQPARGDKACQACPRGLYKSSAGNAPCSPCPARSHAPNPAAPVCPCLEGFYRASSDPPEAPCTGPPSAPQELWFEVQGSALMLHWRLPRELGGRGDLLFNVVCKECEGRQEPASGGGGTCHRCRDEVHFDPRQRGLTESRVLVGGLRAHVPYILEVQAVNGVSELSPDPPQAAAINVSTSHEVPSAVPVVHQVSRASNSITVSWPQPDQTNGNILDYQLRYYDQAEDESHSFTLTSETNTATVTQLSPGHIYGFQVRARTAAGHGPYGGKVYFQTLPQGELSSQLPERLSLVIGSILGALAFLLLAAITVLAVVFQRKRRGTGYTEQLQQYSSPGLGVKYYIDPSTYEDPCQAIRELAREVDPAYIKIEEVIGTGSFGEVRQGRLQPRGRREQTVAIQALWAGGAESLQMTFLGRAAVLGQFQHPNILRLEGVVTKSRPLMVLTEFMELGPLDSFLRQREGQFSSLQLVAMQRGVAAAMQYLSSFAFVHRSLSAHSVLVNSHLVCKVARLGHSPQGPSCLLRWAAPEVIAHGKHTTSSDVWSFGILMWEVMSYGERPYWDMSEQEVLNAIEQEFRLPPPPGCPPGLHLLMLDTWQKDRARRPHFDQLVAAFDKMIRKPDTLQAGGDPGERPSQALLTPVALDFPCLDSPQAWLSAIGLECYQDNFSKFGLCTFSDVAQLSLEDLPALGITLAGHQKKLLHHIQLLQQHLRQQGSVEV

SEQ ID NO: 68592 - protein, 236 aa, Homo sapiens
MFDDFSEGRECVNCGAMSTPLWRRDGTGHYLCNACGLYHKMNGINRPLIKPQRRLSASRRVGLSCANCQTTTTTLWRRNAEGEPVCNACGLYMKLHGVPRPLAMRKEGIQTRKRKPKNLNKSKTPAAPSGSESLPPASGASSNSSNATTSSSEEMRPIKTEPGLSSHYGHSSSVSQTFSVSAMSGHGPSIHPVLSALKLSPQGYASPVSQSPQTSSKQDSWNSLVLADSHGDIITA

SEQ ID NO: 68593 - protein, 176 aa, Homo sapiens
MAIFSVYVVNKAGGLIYQLDSYAPRAEAEKTFSYPLDLLLKLHDERVLVAFGQRDGIRVGHAVLAINGMDVNGRLFAIGSQLSPEQGSSGIEMLETDTFKLHCYQTLTGIKFVVLADPRQAGIDSLLRKIYEIYSDFALKNPFYSLEMPIRCELFDQNLKLALEVAEKAGTFGPGS

SEQ ID NO: 68594 - protein, 246 aa, Homo sapiens
MCERSLYRAGYVGSLLNLQSPDSFYFSNLRPNGGQLAALPPISYPRGALPWAATPASCAPAQPAGATAFGGFSQPYLAGSGPLGLQPPTAKDGPEEQAKFYAPEAAAGPEERGRTRPSFAPESSLAPAVAALKAAKYDYAGVGRATPGSTTLLQGAPCAPGFKDDTKGPLNLNMTVQAAGVASCLRPSLPDGKRCPCSPGRPAVGGGPGEGPQEAETLHEAADCGVGERIPRQRIHQQAETQGIVQ

SEQ ID NO: 68595 - protein, 90 aa, Homo sapiens
MGILEKISEIEKEIARTQKNKATEYHLGLLKAKLAKYRAQLLEPSKSASSKGEGFDVMKSGDARVALIGFPSVVHILESDDLHGQRGSVL

SEQ ID NO: 68596 - protein, 314 aa, Homo sapiens
MVSATIPQKKSKVHYHVAVIINYLGHCISLVALLVAFVLFLRLRSIRCLRNIIHWNLISAFILRNATWFVVQLTMSPEVHQSNVGWCRLVTAAYNYFHVTNFFWMFGEGCYLHTAIVLTYSTDRLRKWMFICIGWGVPFPIIVAWAIGKLYYDNEKCWFGKRPGVYTDYIYQGPMILVLLINFIFLFNIVRILMTKLRASTTSETIQYRKAVKATLVLLPLLGITYMLFFVNPGEDEVSRVVFIYFNSFLESFQGFFVSVFYCFLNSEVRSAIRKRWHRWQDKHSIRARVARAMSIPTSPTRVSFHSIKQSTAV

SEQ ID NO: 68597 - protein, 141 aa, Homo sapiens
MEEPQKSYVNTMDLERDEPLKSTGPQISVSEFSCHCCYDILVNPTTLNCGHSFCRHCLALWWASSKKTECPECREKWEGFPKVSILLRWSCSSITGAAGNLNTTSWSTRLWPNGRRKKLSSGWSSWALGHLFTGKGFYLNE

SEQ ID NO: 68598 - protein, 1649 aa, Homo sapiens
MESVEKDWGWGLWRNLRCLGHAHQGKCCTEGGISSTTKTSSENGSCCFEKAARKDHVCRFIGCGRNDRFNYVVMQLQGRNLADLRRSQSRGTFTISTTLRLGRQILESIESIHSVGFLHRDIKPSNFAMGRFPSTCRKCYMLDFGLARQFTNSCGDVRPPRAVAGFRGTVRYASINAHRNREMGRHDDLWSLFYMLVEFVVGQLPWRKIKDKEQVGSIKERYDHRLMLKHLPPEFSIFLDHISSLDYFTKPDYQMSIRVTRKSYKVSTSGPQAFNSLSYTSGPGACISSSSFSRMGSSSFRGGLGAGYGGASGGITTITVNQSLLSPLNLEVDPNIQAVRTQEEKQIKTLNNKFFSFIDKVRFLEQQNKMLETKWSLVQQQKMARSNMDNMFESYINNLKWQLETLGQEKLKLEAELGNMHGLVEDFRNKYEVEISKCTEMENEFVLIKEYVDEAYMNKMELESSLKELTAKISFLRQLYEEEIGSCSPRSRIHLWCCSWTTAASWTWTASSLRSRPEGFPGGCHADTEQRGELAIKDANAKLSELEAALQLASQDMARQLREYQELMNVKLALDIKIATYRKLLEGEESWLESGMQNMSIHMKTTSSYAGGQSLAYGGLTSPGLSYGLGSSFGSGMGSSSFSHTSSSRAVVMKKIETRDGKLVSESSNVLPNLRITATLLTSVFDNSIKTFGVIESDPFDWEKTGNDGSLTTTTTSTTPQLHTRLTPAAIGIANATPIPGDLLRENTDEVFPDEQLSDGENGIPVGVSPDKLPGSLGHPRPQEKDVWEEMDANKNKIKLGICKAATEEENSHGQANGLLNAPSLGSPIRVRSEITQPDRDIPLVRKLRSIHSFELEKRLTLEPKPDTDKFLETCLEKMQKDTSAGKESILPALLHKPCVPAVSRTDHIWHYDEEYLPDASKPASANTPEQADGGGSNGFIAVNLSSCKQEIDSKEWVIVDKEQDLQDFRTNEAVGHKTTGSPSDEEPEVLQVLEASPQDEKLQLGPWAENDHLKKETSGVVLALSAEGPPTAASEQYTDRLELQPGAASQFIAATPTSLMEAQAEGPLTAITIPRPSVASTQSTSGSFHCGQQPEKKDLQPMEPTVELYSPRENFSGLVVTEGEPPSGGSRTDLGLQIDHIGHDMLPNIRESNKSQDLGPKELPDHNRLVVREFENLPGETEEKSILLESDNEDEKLSRGQHCIEISSLPGDLVIVEKDHSATTEPLDVTKTQTFSVVPNQDKNNEIMKLLTVGTSEISSRDIDPHVEGQIGQVAEMQKNKISKDDDIMSEDLPGHQGDLSTFLHQEGKREKITPRNGELFHCVSENEHGAPTRKDMVRSSFVTRHSRIPVLAQEIDSTLESSSPVSAKEKLLQKKAYQPDLVKLLVEKRQFKSFLGDLSSASDKLLEEKLATVPAPFCEEEVLTPFSRLTVDSHLSRSAEDSFLSPIISQSRKSKIPRPVSWVNTDQVNSSTSSQFFPRPPPGKPPTRPGVEARLRRYKVLGSSNSDSDLFSRLAQILQNGSQKPRSTTQCKSPGSPHNPKTPPKSPVVPRRSPSASPRSSSLPRTSSSSPSRAGRPHHDQRSSSPHLGRSKSPPSHSGSSSSRRSCQQEHCKPSKNGLKGSGSLHHHSASTKTPQGKSKPASKLSR

SEQ ID NO: 68599 - protein, 197 aa, Homo sapiens
MAENDVDNELLDYEDDEVETAAGGDGAEAPAKKDVKGSYVSIHSSGFRDFLLKPELLRAIVDCGFEHPSEVQHECIPQAILGMDVLCQAKSGMGKTAVFVLATLQQLEPVTGQVCFCDSHFPRGDNEELHLPYVSVYFLPKVSVLVMCHTRELAFQISKEYERFSKYMPNVKVAVFFGGLSIKKDEEVLKKNCPHIV

SEQ ID NO: 68600 - protein, 314 aa, Homo sapiens
MATQVMGQSSGGGGLFTSSGNIGMALPNDMYDLHDLSKAELAAPQLIMLANVALTGEVNGSCCDYLVGEERQMAELMPVGDNNFSDSEEGEGLEESADIKAHLKHHTRAGDNERVYKCIICTYTTVSEYHWRKHLRNHFPRKVYTCGKCNYFSDRKNNYVQHVRTHTGERPYKCELCPYSSSQKTHLTRHMRTHSVEEREAVSKTALASPPATMAANESQEIDEDEGIHSHEGSDLSDNMSEGSDDSGLHGARPVPQESSRKNAKEALAVKAAKGDFVCIFCDRSFRKGKDYSKHLNRHLVNVYYLEEAAQGQE

SEQ ID NO: 68601 - protein, 464 aa, Homo sapiens
MSTEKVDQKEEAGEKEVCGDQIKGPDKEEEPPAAASHGQGWRPGGRAARNARPEPGARHPALPAMVNDPPVPALLWAQEVGQVLAGRARRLLLQFGVLFCTILLLLWVSVFLYGSFYYSYMPTVSHLSPVHFYYRTDCDSSTTSLCSFPVANVSLTKGGRDRVLMYGQPYRVTLELELPESPVNQDLGMFLVTISCYTRGGRIISTSSRSVMLHYRSDLLQMLDTLVFSSLLLFGFAEQKQLLEVELYADYRENSYVPTTGAIIEIHSKRIQLYGAYLRIHAHFTGLRYLLYNFPMTCAFIGVASNFTFLSVIVLFSYMQWVWGGIWPRHRFSLQVNIRKRDNSRKEVQRRISAHQPGAGPEGQEESTPQSDVTEDGESPEDPSGTEGQLSEEEKPDQQPLSGEEELEPEASDGSGSWEDAALLTEANLPAPAPASASAPVLETLGSSEPAGGALRQRPTCSSS

SEQ ID NO: 68602 - protein, 80 aa, Homo sapiens
MQGLLFSTLLLAGLAQVMAPKPPFAMFEQRHAFLYIFIAEPKAQPGTVRETVSLHASSRRRLNFPLLFAKCAKSPWKNEF

SEQ ID NO: 68603 - protein, 342 aa, Homo sapiens
MSNWKLSKALSLEMIQLKEKVARFSSSSPFQNLEIIATLGVGGFGRVELVKVKNENVAFAMKCIRKKHIVDTKQQEHVYSEKRILEELCSPFIVKLYRTFKDNKYVYMLLEACLGGELWSILRDRGSFDEPTSKFCVACVTEAFDYLHRLGIIYRDLKPENLILDAEGYLKLVDFGFAKKIGSGQKTWTFCGTPEYVAPEVILNKGHDFSVDFWSLGILVYELLTGNPPFSGVDQMMTYNLILKGIEKMDFPRKITRRPEDLIRRLCRQNPTERLGNLKNGINDIKKHRWLNGFNWEGLKARSLPSPLQRELKGPIDHSYFDKYPPEKGMPPDELSGWDKDF

SEQ ID NO: 68604 - protein, 250 aa, Homo sapiens [sequence omitted]

SEQ ID NO: 68605 - protein, 172 aa, Homo sapiens
MGTALDIKIKRANKVYHAGPQKGKFTPSPVDFTITPETLQNVKERALLPKFLLRGHLNSTNCVITQPLTGELVVESSEAAIRSVELQLVRVETCGCAEGYARDATEIQNIQIADGDVCRGLSVPIYMVFPRLFTCPTLETTNFKVEFEVNIVVLLHPDHLITENFPLKLCRI

SEQ ID NO: 68606 - protein, 128 aa, Homo sapiens
MPLGGRASLTPQKLWLGTAKPGSLTQALNSPLTWEHAWTGVPGGTPDCLTDTFRVKRPHLRRSASNGHVPGTPVYREKEDMYDEIIELKKSLHVQKSDVDLMRTKLRRLEEENSRKDRQIEQLLDPSR

SEQ ID NO: 68607 - protein, 271 aa, Homo sapiens
MEWLKTSLLLAVYKTVPILELSPPLWTAIGWVQRGPTPPTPVLRVLLKWAKSPRSSGVPSLSLGADMGSKVADLLYWKDTRTSGVVFTGLMVSLLCLLHFSIVSVAAHLALLLLCGTISLRVYRKVLQAVHRGDGANPFQAYLDVDLTLTREQTERLSHQITSRVVSAATQLRHFFLVEDLVDSLKLALLFYILTFVGAIFNGLTLLILGVIGLFTIPLLYRQHQAQIDQYVGLVTNQLSHIKAKIRAKIPGTGALASAAAAVSGSKAKAE

SEQ ID NO: 68608 - protein, 78 aa, Homo sapiens
MVGLKKKSADDVKKVFHMLDKDKSGFIEEDELGFILKGFSPDARDLSAKETKMLMAAGDKDGDGKIGVDEFSTLVAES

SEQ ID NO: 68609 - protein, 53 aa, Homo sapiens
PEERKMHMPFQKGMPFDLCFLVQSSDFKEHGWSWKPLQEQKTKHRKFSLISRS

SEQ ID NO: 68610 - protein, 32 aa, Homo sapiens
MGLEPPPEVWQVLKTHPGDPRFQCSLWHLYPL

SEQ ID NO: 68611 - protein, 632 aa, Homo sapiens
MSNLKMKEAALIYLDRSGGLQKFIDDCKYYNDSKQSYAVYRFKILINPSDVVELDAELGNHILHQPLKAAEVFQSVCFIAVKTLSLIGQLQTETQINIVLKLTHLPPLPSYGLDLCEFPLDYTSQRFYMMQGIVIAMTTITKYTQGARFLCSDEACPLSKGFQYIRVHVPGATESATIRNDFLCNLCASSLQEDRKFRVLGDKQIVEIIATKALRAFQGYSNNQPFRFQSLTIFLRDESVNKMNIGNEYKIIGIPTCVKTSQTAVCIEANSITFCNSKVPSGISDNFRCLLSLTSSSCWKFTAILANIFASQITPPGTYNLLKLCLLMSLVQTTDRNKELEDCLDILIITSDTLLIDRLLNFSINLVPRGIRHLVSTEIFPTLSRNKYGTGAVSIQAGSALLAKGGICFIGDLASHKKDKLEQLQTVLESRSITVYIPGKKFGEDIDQQMTFPVQCSFWSFVDVDSSSRRNAQKINTLIGQMDCSLIPANLVEAFGLLINCNESSPCHPFLPTVQHTLNKAINPEGLFYAASRQFTTEDFEKLLAFAKNLNVEFSLEAERMTHGYYLASRRIRTGSVCGSKLSASALKYLVFLSEAHARLNLRNKVLKEDVLIAALLFETSLTLKYGNELNY

SEQ ID NO: 68612 - protein, 51 aa, Homo sapiens
MFADLDYDIEEDKLYLTTPQQPWTAQWQLAMRSPVSMAGQSKGKLRWRWRR

SEQ ID NO: 68613 - protein, 576 aa, Homo sapiens
MPVAATNSETAMQQVLDNLGSLPSATGAAELDLIFLRGIMESPIVRSLAKVIMVLWFMQQNVFVPMKYMLKYFGAHERLEETKLEAVRDNNLELVQEILRDLAQLAEQSSTAAELAHILQEPHFQSLLETHDSVASKTYETPPPSPGLDPTFSNQPVPPDAVRMVGIRKTAGEHLGVTFRVEGGELVIARILHGGMVAQQGLLHVGDIIKEVNGQPVGSDPRALQELLRNASGSVILKILPSYQEPHLPRQVFVKCHFDYDPARDSLIPCKEAGLRFNAGDLLQIVNQDDANWWQACHVEGGSAGLIPSQLLEEKRKAFVKRDLELTPNSGTLCGSLSGKKKKRMMYLTTKNAEFDRHELLIYEEVARMPPFRRKTLVLIGAQGVGRRSLKNKLIMWDPDRYGTTVPYTSRRPKDSEREGQGYSFVSRGEMEADVRAGRYLEHGEYEGNLYGTRIDSIRGVVAAGKVCVLDVNPQAVKVLRTAEFVPYVVFIEAPDFETLRAMNRAALESGISTKQLTEADLRRTVEESSRIQRGYGHYFDLCLVNSNLERTFRELQTAMEKLRTEPQWVPVSWVY

SEQ ID NO: 68614 - protein, 357 aa, Homo sapiens
MKGFIDDANYSVGLLDEGTNLGNVIDNYVYEHTLTGKNAFFVGDLGKIVKKHSQWQNVVAQIKPFYTVKCNSAPAVLEILAALGTGFACSSKNEMALVQELGVPPENIIYISPCKQVSQIKYAAKVGVNILTCDNEIELKKIARNHPNAKVLLHIATEDNIGGEEGNMKFGTTLKNCRHLLECAKELDVQIIGVKFHVSSACKESQVYVHALSDARCVFDMAGEIGFTMNMLDIGGGFTGTEFQLEEVNHVISPLLDIYFPEGSGVKIISEPGSYYVSSAFTLAVNIIAKKVVENDKFPSGVEKTGSDEPAFMYYMNDGVYGSFASKLSEDLNTIPEVHKKYKEDEPLFTNSFSAEA

SEQ ID NO: 68615 - protein, 80 aa, Homo sapiens
MEGGFGSDFGGSGSGKLDPGLIMEQRMTDKCFRKCIGKPGGSLDNSEQKCIAMCMDRYMDAWNTVSRAYNSRLQRERANM

SEQ ID NO: 68616 - protein, 258 aa, Homo sapiens
MIPLQKDNQEEGVCPICQESLKEAVSTNCGHLFCRVCLTQHVEKASASGVFCCPLCRKPCSEEVLGTGYICPNHQKRVCRFCEESRLLLCVECLVSPEHMSHHELTIENALSHYKERLNRRSRKLRKDIAELQRLKAQQEKKLQALQFQVDHGNHRLEAGPESQHQTREQLGALPQQWLGQLEHMPAEAARILDISRAVTQLRSLVIDLERMAKELDTNTLKNAGDLLNRSAPQKLEVIYPQLKKGVSELLLQPPQKL

SEQ ID NO: 68617 - protein, 134 aa, Homo sapiens
MEELIWEQYTVTLQKDSKRGFGIAVSGGRDNPHFENGETSIVISDVLPGGPADGLLQENDRVVMVNGTPMEDVLHSFAVQQLRKSGKVAAIVVKRPRKVQVAALQASPPLDQDDRAFEVMDEFDGRSFRSGYSE

SEQ ID NO: 68618 - protein, 237 aa, Homo sapiens
MELTQPAEDLIQTQQTPASELGDPEDPGEEAADGSDTVVLSLFPCTPEPVNPEPDASVSSPQGSSLKHSTTLTNRQRGNEVSALPATLDCDNLVNKPDERGFTPLIWASAFGEIETVRFLLEWGADPHILAKERESALSLASTGGYTDIVGLLLERDVDINIYDWNGGTPLLYAVRGNHVKCVEALLARGADLTTEADSGYTPMDLAVALGYRKVQQVIENHILKLFQSNLVPADPE

SEQ ID NO: 68619 - protein, 127 aa, Homo sapiens
  MOD_RES (1)..(1): Any amino acid
XIVVLFGISITGGLFYTIFKELFSSSSPSKIYGRALEKCRSHPEVIGVFGESVKGYGEVTRRGRRQHVRFTEYVKDGLKHTCVKFYIEGSEPGKQGTVYAQVKEVWESWDVGSEVLSAVLFKFWKGK

SEQ ID NO: 68620 - protein, 128 aa, Homo sapiens
MQRDHTMDYKESCPSVSIPSSDEHREKKKRFTVYKVLVSVGRSEWFVFRRYAEFDKLYNTLKKQFPAMALKIPAKRIFGDNFDPDFIKQRRAGLNEFIQNLVRYPELYNHPDVRAFLQMDSPKHQSDP

SEQ ID NO: 68621 - protein, 199 aa, Homo sapiens
MASVSALTEELDSITSELHAVEIQIQELTERQQELIQKKKVLTKKIKQCLEDSDAGASNEYDSSPAAWNKEDFPWSGKVKDILQNVFKLEKFRPLQLETINVTMAGKEVFLVMPTGGGKSLCYQLPALCSDGFTLVICPLISLMEDQLMVLKQLGISATMLNASSSKEHVKWVHAEMVNKNSELKLIYVTPEKIAKSKM

SEQ ID NO: 68622 - protein, 96 aa, Homo sapiens
MDGGDDGNLIIKKRFVSEAELDERRKRRQEEWEKVRKPEDPEECPEEVYDPRSLYERLQEQKDRKQQEYEEQFKFKNMVRGLDEDETNFLDEVSRQ

SEQ ID NO: 68623 - protein, 76 aa, Homo sapiens
  MOD_RES (1)..(1): Any amino acid
XMLQLLEKVIELENWTEGKGLIVRGAKNTFSSGSDLNAVKSLGTPEDGMAVCMFMQNTLTRFMSRMCGEVVCIQRR

SEQ ID NO: 68624 - protein, 155 aa, Homo sapiens
  MOD_RES (1)..(1): Any amino acid
XIVKATQYGIYERCRELVEAGYDVRQPDKENVTLLHWAAINNRIDLVKYYISKGAIVDQLGGDLNSTPLHWATRQGHLSMVVQLMKYGADPSLIDGEGCSCIHLAAQFGHTSIVAYLIAKGQDYFKKCTCILEMLSEVAEDIPDNTIKVNPEMDL

SEQ ID NO: 68625 - protein, 112 aa, Homo sapiens
MAALLRRLLQRERPSAASGRPAEAPCPVSAPRMFPNESFPVVSEWAGGGGLRQREPILQRRKLRCRSGNNSNCQEFLVFFVPSHLFRSFFHAFHTCALMTTCVTGVVDAGIQ

SEQ ID NO: 68626 - protein, 113 aa, Homo sapiens
MVSSVLPNPTSAECWAALLHDPMTLDMDAVLSDFVRSTGAEPGLARDLLEAPPTVIHLPEPGRCCLHAVQGSRLHPVGQRVAVVSAHSPHPLLGPAFGFHRQKLGPDSRSERL

SEQ ID NO: 68627 - protein, 168 aa, Homo sapiens
  MOD_RES (1)..(1): Any amino acid
XKDSGVQACFNRSREYQLNDSAAYYLNDLDRIAQPNYIPTQQDVLRTRVKTTGIVETHFTFKDLHFKMFDVGGQRSERKKWIHCFEGVTAIIFCVALSDYDLVLAEDEEMNRMHESMKLFDSICNNKWFTDTSIILFLNKKDLFEEKIKKSPLTICYPEYAGIFLFWE

SEQ ID NO: 68628 - protein, 209 aa, Homo sapiens
MAALKSWLSRSVTSFFRYRQCLCVPVVANFKKRCFSELIRPWHKTVTIGFGVTLCAVPIAQKSEPHSLSSEALMRRAVSLVTDSTSTFLSQTTYALIEAITEYTKAVYTLTSLYRQYTSLLGKMNSEEEDEVWQVIIGARAEMTSKHQEYLKLETTWMTAVGLSEMAAEAAYQTEVFSSKLEEEDACHSPLPVNIVLKVLVNAAQIRPL

SEQ ID NO: 68629 - protein, 371 aa, Homo sapiens
LTDRQTDTAPSPSYHLLPGRRRTVDAAASRGQGPEPAPGGGVEGVGARGVALKLFVQLLGCSRFGGAVVRAGEAEPSGAARSASSGREEPQPEEGEEEEEKEEERGPQWRLGARKPGSWTGEAAVCADSAPAARAPQALARASGRGGRVARRGAEESGPPHSPSRRGSASRAGPGRASETMNFLLSWVHWSLALLLYLHHAKWSQAAPMAEGGGQNHHEVVKFMDVYQRSYCHPIETLVDIFQEYPDEIEYIFKPSCVPLMRCGGCCNDEGLECVPTEESNITMQIMRIKPHQGQHIGEMSFLQHNKCECRPKKDRARQENPCGPCSERRKHLFVQDPQTCKCSCKNTDSRCKARQLELNERTCRCDKPRR

SEQ ID NO: 68630 - protein, 321 aa, Homo sapiens
YIERDEVKQIASIIQRGERLHMFRVGGLVFHAIGQLLPHQMADFHSATALYPVGYEATRIYWSLRTNNRRCCYRCSIGENNGRPEFVIKVIEQGLEDLVFTDASPQAVWNRIIEPVAAMRKEADMLRLFPEYLKGEELFGLTVHAVLRIAESLPGVESCQNYLFRYGRHPLMELPLMINPTGCARSEPKILTHYKRPHTLNSTSMSKAYQSTFTGETNTPYSKQFVHSKSSQYRRLRTEWKNNVYLARSRIQGLGLYAAKDLEKHTMVIEYIGTIIRNEVANRREKIYEEQPPLPLSDTLVPSSATSAFLESRHLHVPNKQ

SEQ ID NO: 68631 - protein, 269 aa, Homo sapiens
  MOD_RES (1)..(1): Any amino acid
XDRGVPSSPDHMLAMVEEARRLQGSGPEPLCVHCSAGCGRTGVLCTVDYVRQLLLTQMIPPDFSLFDVVLKMRKQRPAAVQTEEQYRFLYHTVAQMFCSTLQNASPHYQNIKENCAPLYDDALFLRTPQALLAIPRPPGGVLRSISVPGSPGHAMADTYAVVQKRGAPAGAGSGTQTGTGTGTGARSAEEAPLYSKVTPRAQRPGAHAEDARGTLPGRVPADQSPAGSGAYEDVAGGAQTGGLGFNLRIGRPKGPRDPPAEWTRVSLDL

SEQ ID NO: 68632 - protein, 115 aa, Homo sapiens
  MOD_RES (1)..(1): Any amino acid
XFCVGLLTMAKAESPKEHDPFTYDYQSLQIGGLVIAGILFILGILIVLTPPLARASWSYSAAWRPPGGSLSFSYLSTPTGRRCRCKFNQQQRTGEPDEEEGTFRSSIRRLSTRRR

SEQ ID NO: 68633 - protein, 69 aa, Homo sapiens
  MOD_RES (1)..(1): Any amino acid
XNDGFGVYSNSYGPEFAHCREIQWNSLGNGLAYEDFSFPIFLLEDENETKVIKQKSSVTPCLITMCGAC

SEQ ID NO: 68634 - protein, 189 aa, Homo sapiens
MRNYLKERGDQTVLILHAKVAQKSYGNEKRFFCPPPCVYLMGSGWKKKKEQMERDGCSEQESQPCAFIGIGNSDQEMQQLNLEGKNYCTAKTLYISDSDKRKHFMLSVKMFYGNSDDIGVFLSKRIKVISKPSKKKQSLKNADLCIASGTKVALFNRLRSQTVSTRYLHVEGGNFHASSQQWGAFFIHL

SEQ ID NO: 68635 - protein, 76 aa, Homo sapiens
MSRRALRRLRGEQRGQEPLGPGALHFDLRDDDDAEEEGPKRELGVRRPGGAGKEGVRVNNRFELEKWTFSSPPKKR

SEQ ID NO: 68636 - protein, 999 aa, Homo sapiens
MNTKYYGLQILENVIKTRWKILPRNQCEGIKKYVVGLIIKTSSDPTCVEKEKVYIGKLNMILVQILKQEWPKHWPTFISDIVGASRTSESLCQNNMVILKLLSEEVFDFSSGQITQVKSKHLKDSMCNEFSQIFQLCQFVMENSQNAPLVHATLETLLRFLNWIPLGYIFETKLISTLIYKFLNVPMFRNVSLKCLTEIAGVSVSQYEEQFVTLFTLTMMQLKQMLPLNTNIRLAYSNGKDDEQNFIQNLSLFLCTFLKEHDQLIEKRLNLRETLMEALHYMLLVSEVEETEIFKICLEYWNHLAAELYRESPFSTSASPLLSGSQHFDVPPRRQLYLPMLFKVRLLMVSRMAKPEEVLVVENDQGEVVREFMKDTDSINLYKNMRETLVYLTHLDYVDTERIMTEKLHNQVNGTEWSWKNLNTLCWAIGSISGAMHEEDEKRFLVTVIKDLLGLCEQKRGKDNKAIIASNIMYIVGQYPRFLRAHWKFLKTVVNKLFEFMHETHDGVQDMACDTFIKIAQKCRRHFVQVQVGEVMPFIDEILNNINTIICDLQPQQVHTFYEAVGYMIGAQTDQTVQEHLIEKYMLLPNQVWDSIIQQATKNVDILKDPETVKQLGSILKTNVRACKAVGHPFVIQLGRIYLDMLNVYKCLSENISAAIQANGEMVTKQPLIRSMRTVKRETLKLISGWVSRSNDPQMVAENFVPPLLDAVLIDYQRNVPAAREPEVLSTMAIIVNKLGGHITAEIPQIFDAVFECTLNMINKDFEEYPEHRTNFFLLLQAVNSHCFPAFLAIPPTQFKLVLDSIIWAFKHTMRNVADTGLQILFTLLQNVAQEEAAAQSFYQTYFCDILQHIFSVVTDTSHTAGLTMHASILAYMFNLVEEGKISTSLNPGNPVNNQIFLQEYVANLLKSAFPHLQDAQVKLFVTGLFSLNQDIPAFKEHLRDFLVQIKEFAGEDTSDLFLEEREIALRQADEEKHKRQMSVPGIFNPHEIPEEMCD

SEQ ID NO: 68637 - protein, 60 aa, Homo sapiens
MAQNTENHDPVGSILIQIHEDLYQLKEKLTKFSPEEKGETLDIQSLETAIKRTEVGLRGF

SEQ ID NO: 68638 - protein, 97 aa, Homo sapiens
MATNWGSLLQDKQQLEELARQAVDRALAEGVLLRTSQEPTSSEVVSYAPFTLFPSLVPSALLEQAYAVQMDFNLLVDAVSQNAAFLEQTLSRLCSWA

SEQ ID NO: 68639 - protein, 69 aa, Homo sapiens
MSSVAVLTQESFAEHRSGLVPQQIKVATLNSEEESDPPTYKDAFPPLPEKAACLESAQEPAGAWGNKIR

SEQ ID NO: 68640 - protein, 143 aa, Homo sapiens
MDMRWHCENLQVTTDDILVASAECPSDDEDIDPCEPSSGGLANPTRAGGREPYPGSAEVIRESSSTTGMVVGIVAAAALCILILLYAMYKYRNRDEGSYHVDESRNYISNSAQSNGAVVKEKQPSSAKSSNKNKKNKDKEYYV

SEQ ID NO: 68641 - protein, 155 aa, Homo sapiens
MRGEQGAAGARVLQFTNCRILRGGKLLREDLWVRGGRILDPEKLFFEERRVADERRDCGGRILAPGFIDVQINGGFGVDFSQATEDVGSGVALVARRILSHGVTSFCPTLVTSPPEVYHKIPVKSGGPHGAGVLGLHLEGPFISREKRGAHPEAH

SEQ ID NO: 68642 - protein, 194 aa, Homo sapiens
MESRETLSSSRQRGGESDFLPVSSAKPPAAPGCAGEPLLSTPGPGKGIPVGGERMEPEEEDELGSGRDVDSNSNADSEKWVAGDGLEEQEFSIKEANFTEGSLKLKIQTTKRAKKPPKNLENYICPPEIKITIKQSGDQKVSRAGKNSKATKEEERSHSKKKLLTASDLAASDLKGFQPQVSSTDAFKKFGRVK

SEQ ID NO: 68643 - protein, 143 aa, Homo sapiens
MASFPPRVNEKEIGKLLLNLVDHTEVVRDLTFAPDGSLILVSASRDKTLRVWDLKDDGNMMKVLRGHQNWVYSCAFSPDSSMLCSVGASKAVFLWNMDKYTMIRKLEGHHHDVVACDFSPDGALLATASYDTRVYIWDPHNGD

SEQ ID NO: 68644 - protein, 260 aa, Homo sapiens
  MOD_RES (1)..(1): Any amino acid
XVILKDLEVLAEIASSPAGQTDDPGPLDGPDLQASHSELQVPTPGRAGLLNTSGTKGLECSPSTPTMNSYFYKFMINLLKRFSSERKLLEVRGPFIIRQLCLLLNAENIFHSMADILLREEDLKFASTMVHALNTILLTSTELFQLRNQLKDLKTLNYRHAYDLIQKFGDLEVTVDFLAEVDKLVQLIECPIFTYLRLQLLDVKNNPYLIKALYGLLMLLPQSSAFQLLSHRLQCVPNPELLQTEDSLKAAPKSQKADSP

SEQ ID NO: 68645 - protein, 217 aa, Homo sapiens
MADSVKTFLQDLARGIKDSIWGICTISKLDARIQQKREEQRRRRASSVLAQRRAQSIERKQERRILALSPSCHLRLPWCNLSLLQPLPPRSKQFFCLSEPAGWKYSEPRIVSRIFQCCAWNGGVFWFSLLLFYRVFIPVLQSVTARIIGDPSLHGDVWSWLEFFLTSIFSALWVLPLFVLSKVVNAIWFQDIADLAFEVSGRKPHPFPSVSKIIADM

SEQ ID NO: 68646 - protein, 11 aa, Homo sapiens
  MOD_RES (1)..(1): Any amino acid
XCLGAANSSGS

SEQ ID NO: 68647 - protein, 180 aa, Homo sapiens
MSCINLPTVLPGSPSKTRGQIQVILGPMFSGKSTELMRRVRRFQIAQYKCLVIKYAKDTRYSSSFCTHDRNTMEALPACLLRDVAQEALGVAVIGIDEGQFFPDIVEFCEAMANAGKTVIVAALDGTFQRKPFGAILNLVPLAESVVKLTAVCMECFREAAYTKRLGTEKEQILQCSPAN

SEQ ID NO: 68648 - protein, 107 aa, Homo sapiens
MHMMVSKPEQWVKPMAVAGANQYTFHLEATENPGALIKDIRENGMKVGLAIKPGTSVEYLAPWANQIDMALVMTVEPGFGGQKFMEDMMPKVHWLRTQFPSLDIEVD

SEQ ID NO: 68649 - protein, 37 aa, Homo sapiens
MGDEKDSWKVKTLDEILQEKKRRKEQEEKAEIKRLKN

SEQ ID NO: 68650 - protein, 98 aa, Homo sapiens
MKRRLDDQESPVYAAQQRRIPGSTEAFPHQHRVLAPAPPVYEAVSETMQSATGIQYSVTPSYQVSAMPQSSGSHGPAIAAVHSSHHHPTAVQPHGGQV

SEQ ID NO: 68651 - protein, 342 aa, Homo sapiens
MAVSWRSWLANEGVKHLCLFIWLSMNVLLFWKTFLLYNQGPEYHYLHQMLGLGLCLSRASASVLNLNCSLILLPMCRTLLAYLRGSQKVPSRRTRRLLDKSRTFHITCGVTICIFSGVHVAAHLVNALNFSVNYSEDFVELNAARYRDEDPRKLLFTTVPGLTGVCMVVVLFLMITASTYAIRVSNYDIFWYTHNLFFVFYMLLTLHVSGDDWKPYKLRRLYFIWVCRDIQSFRWFADLLCMLHNKFWQENRPDYVNIQLYLSQTDGIQKIIGEKYHALNSRLFIGRPRWKLLFDEIAKYNRGKTVGVFCCGPNSLSKTLHKLSNQNNSYGTRFEYNKESFS

SEQ ID NO: 68652 - protein, 78 aa, Homo sapiens
  MOD_RES (1)..(1): Any amino acid
XVPLMVLMCRVCLEDKPIKPLPCCKKAVCEECLKVYLSAQAGVQWHDLGSRKPPHPRFKRFSCLSLPSSWDYRYNLAK

SEQ ID NO: 68653 - protein, 164 aa, Homo sapiens
MEESPLSRAPSRGGVNFLNVARTYIPNTKVECHYTLPPGTMPSASDWIGIFKVEAACVRDYHTFVWSSVPESTTDGSPIHTSVQFQASYLPKPGAQLYQFRYVNRQGQVCGQSPPFQFREPRPMDELVTLEEADGGSDILLVVPKATVLQNQLDESQQERNDLM

SEQ ID NO: 68654 - protein, 173 aa, Homo sapiens
MIQAVVDNVCWQMSLDRKTTALKQLQGHMWRAAFTAGRMKAEFFADVVPAVRKWREAGMKVYIYSSGSVEAQKLLFGHSTEGDILELVDGHFDTKIGHKVESESYRKIADSIGCSTNNILFLTDVTREASAAEEADVHVAVVVRPGNAGLTDDEKTYYSLITSFSELYLPSST

SEQ ID NO: 68655 - protein, 54 aa, Homo sapiens
MISVKRNTWRALSLVIGDCRKKGNFEYCQDRTEKHSTMPDSPVDVKTQSRLTPP

SEQ ID NO: 68656 - protein, 426 aa, Homo sapiens
MEHGYEETLTRLAAILAKHFADARIVGTDIRDSLMQALASYVCYPHSLRAVERIPEEQRIAMVRNLLAPYEQRPWAQTNWILVRLWRGCGFGYRYTRLPHLLKTKLEDANLPSLQKPCPSTLLQQHMADLLQQGPDVAPSFLNSVLNQLNWAFSEFIGMIQEIQQAAERLERNFVDSRQLKVCATCFDLSVSLLRVLEMTITLVPEIFLDWTRPTSEMLLRRLAQLLNQVLNRVTAERNLFDRVVTLRLPGLESVDHYPILVAVTGILVQLLVRGPASEREQATSVLLADPCFQLRSICYLLGQPEPPAPGTALPAPDRKRFSLQSYADYISADELAQVEQMLAHLTSASAQAAAASLPTSEEDLCPICYAHPISAVFQPCGHKSCKACINQHLMNNKDCFFCKTTIVSVEDWEKGANTSTTSSAA

SEQ ID NO: 68657 - protein, 491 aa, Homo sapiens
MQLPRWWELGDPCAWTGQGRGTRRMSPATTGTFLLTAFLLSCADGINGTVNWKTRQANNFIISRKMAAGMKDVYSIFSKVHSDRNVYPSAGVLFVHVLEREYFKGEFPPYPKPGEISNDPITFNTNLMGYPDRPGWLRYIQRTPYSDGVLYGSPTAENVGKPTIIEITAYNRRTFETARHNLIINIMSAEDGVLLSSPRLECNGTISANCNLRLLGSDFPLPYQAEFFIKNMNVEEMLASEVLGDFLGAVKNVWQPERLNAINITSALDRGGRVPLPINDLKEGVYVMVGADVPFSSCLREVENPQNQLRCSQEMEPVITCDKKFRTQFYIDWCKISLVDKTKQVSTYQEVIRGEGILPDGGEYKPPSDSLKSRDYYTDFLITLAVPSAVALVLFLILAYIMCCRREGVIQLVHHSAIQKSTKELRDMSKNREIAWPLSTLPVFHPVTGEIIPPLHTDNYDSTNMPLMQTQQNLPHQTQIPQQQTTGKWYP

SEQ ID NO: 68658 - protein, 148 aa, Homo sapiens
MAPTQGPRAPLEFGGPLGNPIYDFFLGRELNPRICFFDFKYFCELRPGLIGWVLINLALLMKEAELRGSPSLAMWLVNGFQLLYVGDALWHEEAVLTTMDITHDGFGFMLAFGDMAWVPFTYSLQAQFLLHHPQPLGLPMASVICLIN

SEQ ID NO: 68659 - protein, 448 aa, Homo sapiens
MGKRDRADRDKKKSRKRHYEDEEDDEEDAPGNDPQEAVPSAAGKQVDESGTKVDEYGAKDYRLQMPLKDDHTSRPLWVAPDGHIFLEAFSPVYKYAQDFLVAIAEPVCRPTHVHEYKLTAYSLYAAVSVGLQTSDITEYLRKLSKTGVPDGIMQFIKLCTVSYGKVKLVLKHNRYFVESCHPDVIQHLLQDPVIRECRLRNSEGEATELITETFTSKSAISKTAESSGGPSTSRVTDPQGKSDIPMDLFDFYEQMDKDEEEEEETQTVSFEVKQEMIEELQKRCIHLEYPLLAEYDFRNDSVNPDINIDLKPTAVLRPYQEKSLRKMFGNGRARSGVIVLPCGAGKSLVGVTAACTVRKRCLVLGNSAVSVEQWKAQFKMWSTIDDSQICRFTSDAKDKPIGCSVAISTYSMLGHTTKRSWEAERVMEWLKTQEWGLMILDEVHTIPV

SEQ ID NO: 68660 - protein, 256 aa, Homo sapiens
MMDLRNTPAKSLDKFIEDYLLPDTCFRMQINHAIDIICGFLKERCFRGSSYPVCVSKVVKCKKKLGKLPPQYALELLTVYAWERGSMKTHFNTAQGFRTVLELVINYQQLCIYWTKYYDFKNPIIEKYLRRQLTKPRPVILDPADPTGNLGGGDPKGWRQLAQEAEAWLNYPCFKNWDGSPVSSWILLTQHTPGSIHPTGRRGLDLHHPLNASASWGKGLQCYLDQFLHFQVGLLIQRGQSSSVSWCIIQDRTQVS

SEQ ID NO: 68661 - protein, 99 aa, Homo sapiens
MRLLAAALLLLLLALYTARVDGSKCKCSRKGPKIRYSDVKKLEMKPKYPHCEEKMVIITTKSVSRYRGQEHCLHPKLQSTKRFIKWYNAWNEKRRVYEE

SEQ ID NO: 68662 - protein, 68 aa, Homo sapiens
  MOD_RES (1)..(1): Any amino acid
XKGRCFERTFGNCRCDAACVELGNCCLDYQETCIEPGLKRLLPSYFLWMDSGQNIYTLGVDFFLLLAN

SEQ ID NO: 68663 - protein, 173 aa, Homo sapiens
MAEVARQAQTSQEPYHDKAREHPDDGKHPDGGLYNKGPSYSSYSGYIMMPNMNNDPYMSNGSLSPPIPRTSNKVPVVQPSHAVHPLTPLITYSDEHFSPGSHPSHIPSDVNSKQGMSRHPPAPDIPTFYPLSPGGVGQITPPLGWQGQPVYPITGGFRQPYPSSLSVDTSMSR

SEQ ID NO: 68664 - protein, 545 aa, Homo sapiens
MGFSSELCSPQGHGVLQQMQEAELRLLEGMRKWMAQRVKSDREYAGLLHHMSLQDSGGQSRAISPDSPISQSWAEITSQTEGLSRLLRQHAEDLNSGPLSKLSLLIRERQQLRKTYSEQWQQLQQELTKTHSQDIEKLKSQYRALARDSAQAKRKYQEASKDKDRDKAKDKYVRSLWKLFAHHNRYVLGVRAAQLHHQHHHQLLLPGLLRSLQDLHEEMACILKEILQEYLEISSLVQDEVVAIHREMAAAAARIQPEAEYQGFLRQYGSAPDVPPCVTFDESLLEEGEPLEPGELQLNELTVESVQHTLTSVTDELAVATEMVFRRQEMVTQLQQELRNEEENTHPRERVQLLGKRQVLQEALQGLQVALCSQAKLQAQQELLQTKLEHLGPGEPPPVLLLQDDRHSTSSSEQEREGGRTPTLEILKSHISGIFRPKFSLPPPLQLIPEVQKPLHEQLWYHGAIPRAEVAELLVHSGDFLVRESQGKQEYVLSVLWDGLPRHFIIQAHAPSEWRLLTPGPLPCRTCTDWKGKAFLAFLCSSTTY

SEQ ID NO: 68665 - protein, 161 aa, Homo sapiens
  MOD_RES (1)..(1): Any amino acid
XARNIKVSDPKLFEMIKIFSLSPNFRAEKCLRDHLVQPLRSNGEPEPLRFTGEYCLLRTLKQCQTLREALIAAGKEIIWHGRTKEEPAHYCSICEVEVFDLLFVTNESNSRKTYIVHCQDCARKTSGNLENFVVLEQYKMEDLMQVYDQFTLAPPLPSASS

SEQ ID NO: 68666 - protein, 157 aa, Homo sapiens
MRFMLLFSRQGKLRLQKWYLATSDKERKKMVRELMQVVLARKPKMCSFLEWRDLKVVYKRYASLYFCCAIEGQDNELITLELIHRYVELLDKYFGSVCELDIIFNFEKAYFILDEFLMGGDVQDTSKKSVLKAIEQADLLQEEDESPRSVLEEMGLA

SEQ ID NO: 68667 - protein, 58 aa, Homo sapiens
MLPCASCLPGSLLLWALLLLLLGSASPQDSEEPDSYTVGTVRAAGLGQEGCQRVSDHP

SEQ ID NO: 68668 - protein, 153 aa, Homo sapiens
MVQAHGGRSRAQPLTLSLGAAMTQPPPEKTPAKKHVRLQERRGSNVALMLDVRSLGAVEPICSVNTPREVTLHFLRTAGHPLTRWALQRQPPSPKQLEEEFLIPSNFVSPEDLDIPGHASKDRYKTILPNPQSRVCLGRAQSQEDGDYINANY

SEQ ID NO: 68669 - protein, 123 aa, Homo sapiens
MHTLLAATKDSLAMDPPVVNRPKKSKTKKAPIKTITKAAPAAPPVPAANEIATNKPKITWQALNLPVITQISQALPTTEVTNTQASSVTAQPKKANKMKRVTAKAAQGSQSPTGHEGGTIQLK

SEQ ID NO: 68670 - protein, 80 aa, Homo sapiens
MFAEFFGGRNPFDTFFGQRNGEEGMDIDDPFSGFPMGMGGFTNVNFGRSRSAQEPARKKQDPPVTHDLRVSLEEIYSGCT

SEQ ID NO: 68671 - protein, 143 aa, Homo sapiens
  MOD_RES (1)..(1): Any amino acid
XSLPSGDAFSSVGTHRFVQKVEEMVQNHMTYSLQDVGGDANWQLVVEEGEMKRVWPASQRDVLYLSVIRKIPALTENDPETWIVCNFSVDHDSAPLNNRCVRAKINVAMICQTLVSPPEGNQEISRDNILCKITYVANVNPGG

SEQ ID NO: 68672 - protein, 149 aa, Homo sapiens
MGGEKFDTPHPEGYLFGENMDLNFLGSRPVQFPYVTPAPHEPVKTLRSLVNIRKDSLRLVRYKDDADSPTEDGDKPRVLYSLEFTFDADARVAITIYCQASEEFLNGRAVYSPKSPSLQSETVHYKRGVSQQFSLPSFKIDFSEWKDDE

SEQ ID NO: 68673 - protein, 566 aa, Homo sapiens
MALPGGRHLDSVTLPGQRLHLMQVDSVQRWMEDLKLMTECECMCVLQAKPISLEEDAQGDLILAGGPGPGDPLQLLLKRGWVISTELRRIGQKLAQDRWARVHSMSVRLTCHARSMVSEYSAVSRNSLKEMGEIEKLLMEKCSELSAVTERCLQVENEHVLKSMKACVSETLSMLGQHFGQLLELALTREVQVESHSVTRLECSGAISAQCNLRLLGSSDSPASASQALVRKIDASDNIYTTESTTGNLFSLTQEGAPLCRIIAKEGGVVALFKVCRQDSFRCLYPQALRTLASICCVEEGVHQLEKVDGVLCLADILTDNSHSEATRAEAAAVVAQVTSPHLPVTQHLSSFLESMEEIVTALVKLCQEASSGEVFLLASAALANITFFDTMACEMLLQLNAIRVLLEACSDKQRVDTPYTRDQIVTILANMSVLEQCASDIIQENGVQLIMGMLSEKPRSGTPAEVAACERVQQKAAVTLARLSRDPDVAREAVRLSCMSRLIELCRSPSERNSSDAVLVACLAALRRLAGVCPEGLQDSDFQQLVQPRLVDSFLLCSNMEESFV

SEQ ID NO: 68674 - protein, 10 aa, Homo sapiens
  MOD_RES (1)..(1): Any amino acid
XKSESRCSST

SEQ ID NO: 68675 - protein, 147 aa, Homo sapiens
  MOD_RES (1)..(1): Any amino acid
XSAGASALLRSGPYMPQCDAFGSWEPVQCHAGTGHCWCVDEKGGFIPGSLTARSLQIPQCPTTCEKSRTSGLLSSWKQARSQENPSPKDLFVPACLEARGVRCHSTRRRWLVEQSCVRQSRAPQALPCSSANCCAARAPGACFHQGH

SEQ ID NO: 68676 - protein, 127 aa, Homo sapiens
MLALEAAQFRWLEAASACPCVSPPPGSTGHTSAVCTQMASSMTWTAASIPATLIQRGLLTPCGTGLWPHLSQPPPMKPSTRQQPLLATPRLPSSATNPPPTALQGTSNWPPAWRPRGLASLHTPRRT

SEQ ID NO: 68677 - protein, 181 aa, Homo sapiens
WGHPQQCAISPSPRSRGSGLICRGHCRPQCLHHPPALTRVTRAAAATTSGPQMPAACPGHPIRMFASFHPSASTAGTSGDSGPPDRSPLELHIGFPTDIPKSAPHSMTASSSSVSSPSPGLPRRSAPPSPLCRSLSPGTGGGVRGGVGYLSRGDPVRVLARRVRPDGSVQYLVEWGGGGIF

SEQ ID NO: 68678 - protein, 143 aa, Homo sapiens
MNLQPIFWIGLISSVCCVFAQTDENRCLKANAKSCGECIQAGPNCGWCTNSTFLQEGMPTSARCDDLEALKKKGCPPDDIENPRGSKDIKKNKNVTNRSKGTAEKLKPEDITQIQPQQLVLRLRSGEPQTFTLKFKRAEDYPI

SEQ ID NO: 68679 - protein, 176 aa, Homo sapiens
MPLGLKPTCSVCKTTSSSMWKKGAQGEILCHHCTGRGGAGSGGAGSGAAGGTGGSGGGGFGAATFASTSATPPQSNGGGGGKQSKQEIHRRSARLRNTKYKSAPAAEKKVSTKGKGRRHIFKLKNLLFFPLENIKYGFKRNINLEPIFWGSLWKGRGEIMVLDMASPSKLLSQFPL

SEQ ID NO: 68680 - protein, 191 aa, Homo sapiens
MEKLAASTEPQGPRPVLGRESVQVPDDQDFRSFRSECEAEVGWNLTYSRAGVSVWVQAVEMDRTLHKIKCRMECCDVPAETLYDVLHDIEYRKKWDSNVIETFDIARLTVNADVGYYSWRCPKPLKNRDVITLRSWLPMGADYIIMNYSVKHPKYPPRKDLVRAVSIQTGYLIQSTGPKSCVITYLAQVDP

SEQ ID NO: 68681 - protein, 61 aa, Homo sapiens
MLVGQGAGLLGPAVVTAAVVLLLSGVGPAHGSEDIVVGCGGFVKSDVEINYSLIEQVLNMH

SEQ ID NO: 68682 - protein, 101 aa, Homo sapiens
MAAEADGPLKRLLVPILLPEKCYDQLFVQWDLLHVPCLKILLSKGLGLGIVAGSLLVKLPQVFKILGAKSAEGLSLQSVMLELVALTGTMVYSITNNFPFR

SEQ ID NO: 68683 - protein, 294 aa, Homo sapiens
MAAAEEEPKPKKLKVEAPQALRENILFGMGNPLLDISAVVDKDFLDKYSLKPNDQILAEDKHKELFDELVKKFKVEYHAGGSTQNSIKVAQWMIQQPHKAATFFGCIGIDKFGEILKRKAAEAHVDAHYYEQNEQPTGTCAACITGDNRSLIANLAAANCYKKEKHLDLEKNWMLVEKARVCYIAGFFLTVSPESVLKVAHHASENNRIFTLNLSAPFISQFYKESLMKVMPYVDILFGNETEAATFAREQGFEKVKSLLLLSWIKTRKKLLIPMELEMHLLEVFCLNWSLTSL

SEQ ID NO: 68684 - protein, 90 aa, Homo sapiens
MTSSRLWFSLLLAAAFAGRATALWPWPQNFQTSDQRYVLYPNNFQFQYDVSSAAQPGCSVLDEAFQRYRDLLFGSGSWPRPYLTGCHGVQ

SEQ ID NO: 68685 - protein, 285 aa, Homo sapiens
MNLSLVLAAFCLGIASAVPKFDQNLDTKWYQWKATHRRLYGANEEGWRRAVWEKNMKMIELHNGEYSQGKHGFTMAMNAFGDMKQCGSCWAFSATGALEGQMFRKTGKLVSLSEQNLVDCSRPQGNQGCNGGFMARAFQYVKENGGLDSEESYPYVAVDEICKYRPENSVANDTGFTVVAPGKEKALMKAVATVGPISVAMDAGHSSFQFYKSGIYFEPDCSSKNLDHGVLVVGYGFEGANSNNSKYWLVKNSWGPEWGSNGYVKIAKDKNNHCGIATAASYPNV

SEQ ID NO: 68686 - protein, 6818 aa, Homo sapiens
MASSPELPTEDEQGSWGIDDLHISLQAEQEDTQKKAFTCWINSQLARHTSPSVISDLFTDIKKGHVLLDLLEVLSGQQLPRDKGSNTFQCRINIEHALTFLRNRSIKLINIHVTDIIDGNPSIILGLIWTIILHFHIEKLAQTLSCNYNQPSLDDVSVVDSSPASSPPAKKCSKVQARWQMSARKALLLWAQEQCATYESVNVTDFKSSWRNGMAFLAIIHALRPDLIDMKSVKHRSNKDNLREAFRIAEQELKIPRLLEPEDVDVVDPDEKSIMTYVAQFLQYSKDAPGTGEEAQGKVKDAMGWLTLQKEKLQKLLKDSENDTYFKKYNSLLSFMESFNEEKKSFLDVLSIKRDLDELDKDHLQLREAWDGLDHQINAWKIKLNYALPPPLHQTEAWLQEVEELMDEDLSASQDHSQAVTLIQEKMTLFKSLMDRFEHHSNILLTFENKDENHLPLVPPNKLEEMKRRINNILEKKFILLLEFHYYKCLVLGLVDEVKSKLDIWNIKYGSRESVELLLEDWHKFIEEKEFLARLDTSFQKCGEIYKNLAGECQNINKQYMMVKSDVCMYRKNIYNVKSTLQKVLACWATYVENLRLLRACFEETKKEEIKEVPFETLAQWNLEHATLNEAGNFLVEVSNDVVGSSISKELRRLNKRWRKLVSKTQLEMNLPLMIKKQDQPTFDNSGNILSKEEKATVEFSTDMSVELPENYNQNIKAGEKHEKENEEFTGQLKVAKDVEKLIGQVEIWEAEAKSVLDQDDVDTSMEESLKHLIAKGSMFDELMARSEDMLQMDIQNISSQESFQHVLTTGLQAKIQEAKEKVQINVVKLIAALKNLTDVSPDLDIRLKMEESQKELESYMMRAQQLLGQRESPGELISKHKEALIISNTKSLAKYLKAVEELKNNVTEDIKMSLEEKSRDVCAKWESLHHELSLYVQQLKIDIEKGKLSDNILKLEKQINKEKKLIRRGRTKGLIKEHEACFSEEGCLYQLNHHMEVLRELCEELPSQKSQQEVKRLLKDYEQKIERLLKCASEIHMTLQPTAGGTSKNEGTITTSENRGGDPHSEAPFAKSDNQPSTEKAMEPTMKFSLASVLRPLQEESIMEKDYSASINSLLERYDTYRDILEHHLQNNKFRITSDFSSEEDRSSSCLQAKLTDLQVIKNETDARWKEFEIISLKLENHVNDIKKPFVIKERDTLKERERELQMTLNTRMESLETALRLVLPVEKASLLLCGSDLPLHKMAIQGFHLIDADRIYQHLRNIQDSIAKQIEICNRLEEPGNFVLKELHPFDLHAMQNIILKYKTQFEGMNHRVQRSEDTLKALEDFLASLRTAKLSAEPVTDLSASDTQVAQENTLTVKNKEGEIHLMKDKAKHLDKCLKMLDMSFKDAERGDDTSCENLLDAFSIKLSETHGYGVQEEFTEENKLLEACIFKNNELLKNIQDVQSQISKIGLKDPTVPAVKHRKKSLIRLDKVLDEYEEEKRHLQEMANSLPHFKDGREKTVNQQCQNTVVLWENTKALVTECLEQCGRVLELLKQYQNFKSILTTLIQKEESVISLQASYMGKENLKKRIAEIEIVKEEFNEHLEVVDKINQVCKNLQFYLNKMKTFEEPPFEKEANIIVDRWLDINEKTEDYYENLGRALALWDKLFNLKNVIDEWTEKALQKMELHQLTEEDRERLKEELQVHEQKTSEFSRRVAEIQFLLQSSEIPLELQVMESSILNKMEHVQKCLTGESNCHALSGSTAELREDLDQAKTQIGMTESLLKALSPSDSLEIFTKLEEIQQQILQQKHSMILLENQIGCLTPELSELKKQYESVSDLFNTKKSVLQDHFSKLLNDQCKNFNDWFSNIKVNLKECFESSETKKSVEQKLQKLSDFLTLEGRNSKIKQVDSVLKHVKKHLPKAHVKELISWLVGQEFELEKMESICQARAKELEDSLQQLLRLQDDHRNLRKWLTNQEEKWKGMEEPGEKTELFCQALARKREQFESVAQLNNSLKEYGFTEEEEIIMEATCLMDRYQTLLRQLSEIEEEDKLLPTEDQSFNDLAHDVIHWIKEIKESLMVLNSSEGKMPLEERIQKIKEIILLKPEGDARIETIMKQAESSEAPLVQKTLTDISNQWDNTLHLASTYLSHQEKLLLEGEKYLQSKEDLRLMLIELKKKQEAGFALQHGLQEKKAQLKIYKKFLKKAQDLTSLLKELKSQGNYLLECTKNPSFSEEPWLEIKHLHESLLQQLQDSVQNLDGHVREHDSYQVCVTDLNTTLDNFSKEFVSFSDKPVDQIAVEEKLQKLQELENRLSLQDGTLKKILALAKSVKQNTSSVGQKIIKDDIKSLQCKQKDLENRLASAKQEMECCLNSILKSKRSTEKKGKFTLPGREKQATSDVQESTQESAAVEKLEEDWEINKNFVENVMAVSKNCHHSMYIFESIVKNFISDEMQDSAVEMAMSKQLSLNAQESMKNTEDERKVNELQNQPLELDTMLRNEQLEEIEKLYTQLEAKKAAIKPLEQTECLNKTETGALVLHNIGYSAQHLDNLLQALITLKKNKESQYCVLRDFQEYLAAVESSMKALLTDKESLKVGPLDSVTYLDKIKKFIASIEKEKDSLGNLKIKWENLSNHVTDMDKKLLESQIKQLEHGWEQVEQQIQKKYSQQVVEYDEFTTLMNKVQDTEISLQQQQQHLQLRLKSPEERAGNQSMIALTTDLQATKHGFSVLKGQAELQMKRIWGEKEKKNLEDGINNLKKQWETLEPLHLEAENQIKKCDIRNKMKETILWAKNLLGELNPSIPLLPDDILSQIRKCKVTHDGILARQQSVESLAEEVKDKVPSLTTYEGSDLNNTLEDLRNQYQMLVLKSTQRSQQLEFKLEERSNFFAIIRKFQLMVQESETLIIPRVETAATEAELKHHHVTLEASQKELQEIDSGISTHLQELTNIYEELNVFERLFLEDQLKNLKIRTNRIQRFIQNTCNEVEHKIKFCRQFHEKTSALQEEADSIQRNELLLNQEVNKGVKEEIYNLKDRLTAIKCCILQVLKLKKVFDYIGLNWDFSQLDQLQTQVFEKEKELEEKIKQLDTFEEEHGKYQALLSKMRAIDLQIKKMTEVVLKAPDSSPESRRLNAQILSQRIEKAKCLCDEIIKKLNENKTFDDSFKEKEILQIKLNAEENDKLYKVLQNMVLELSPKELDEKNCQDKLETSLHVLNQIKSQLQQPLLINLEIKHIQNEKDNCEAFQEQVWAEMCSIKAVTAIEKQREENSSEASDVETKLREFEDLQMQLNTSIDLRTNVLNDAYENLTRYKEAVTRAVESITSLEAIIIPYRVDVGNPEESLEMPLRKQEELESTVAHIQDLTEKLGMISSPEAKLQLQYTLQELVSKNSAMKEAFKAQETEAERYLENYKCYRKMEEDIYTNLSKMETVLGQSMSSLPLSYREALERLEQSKALVSNLISTKEELMKLRQILRLLRLRCTENDGICLLKIVSALWEKWLSLLEAAKEWEMWCEELKQEWKFVSEEIEREAIILDNLQEELPEISKTKEAATTEELSELLDCLCQYGENVEKQQLLLTLLLQRIRSIQNVPESSGAVETVPAFQEITSMKERCNKLLQKVQKNKELVQTEIQERHSFTKEIIALKNFFQQTTTSFQNMAFQDHPEKSEQFEELQSILKKGKLTFENIMEKLRIKYSEMYTIVPAEIESQVEECRKALEDIDEKISNEVLKSSPSYAMRRKIEEINNGLHNVEKMLQQKSKNIEKAQEIQKKMWDELDLWHSKLNELDSEVQDIVEQDPGQAQEWMDNLMIPFQQYQQVSQRAECRTSQLNKATVKMEEYSDLLKSTEAWIENTSHLLANPADYDSLRTLSHHASTVQMALEDSEQKHNLLHSIFMDLEDLSIIFETDELTQSIQELSNQVTALQQKIMESLPQIQRMADDVVAIESEVKSMEKRVSKIKTILLSKEIFDFSPEEHLKHGEVILENIRPMKKTIAEIVSYQVELRLPQTGMKPLPVFQRTNQLLQDIKLLENVTQEQNELLKVVIKQTNEWDEEIENLKQILNNYSAQFSLEHMSPDQADKLPQLQGEIERMEKQILSLNQRKEDLLVDLKATVLNLHQHLKQEQEGVERDRLPAVTSEEGGVAERDASERKLNRRGSMSYLAAVEEEVEESSVKSDHDKDMEEDRASSSSGTIVQEAYGKISTSDNSMAQILTPDSLNTEQGPECSLRPNQTEEGTTPPIEADTLDSSDAQGGLEPRVEKTRPEPTEVLHACKTQVAELELWLQQANVAVEPETLNADMQQVLEQQLVGCQAMLTEIEHKVAFLLETCKDQGLGDNGATQHEAEALSLKLKTVKCNLEKVQMMLQEKHSEDQHPTILKKSSEPEHQEALQPVNLSELESIVTERPQFSRQKDFQQQQVLELKPMEQKDFIKFIEFNAKKMWPQYCQHDNDTTQESSARYPTTEELKTYTTQLEDLRQEASNLQTQENMTEEAYINLDKKLFELFLTLSQCLSSVEEMLEMPRLYREDGSGQQVHYETLALELKKLYLALSDKKGDLLKAMTWPGENTNLLLECFDNLQVCLEHTQAAAVCRSKSLKAGLDYNRSYQKADAYTVELENAESRVAKLRDEGERLHLPYALLQEVYKLEDVLDSMWGMLRARYTELSSPFVTESQQDALLQGMVELVKIGKEKLAHGHLKQTKSKVALQAQIENHKVFFQKLVADMLLIQAYSAKILPSLLQNRETFWAEQVTEVKILEEKSRQCGMKLQSLLQKWEEFDENYASLEKDLEILISTLPSVSLVEETEERLVERISFYQQIKRNIGGKHARLYQTLNEGKQLVASVSCPELEGQIAKLEEQWLSLNKKIDHELHRLQALLKHLLSYNRDSDQLTKWLESSQHTLNYWKEQSLNVSQDLDTIRSNINNFFEFSKEVDEKSSLKTAVISIGNQLLHLKETDTATLRASLAQFEQKWTMLITQLPDIQEKLHQLQMEKLPSRKAITEMISWMNNVEHQTSDEDSVHSPSSASQVKHLLQKHKEFRMEMDYKQWIVDFVNQSLLQLSTCDVESKRYERTEFAEHLGEMNRQWHRVHGMLNRKIQHLEQLLESITESENKIQILNNWLEAQEERLKTLQKPESVISVQKLLLDCQDIENQLAIKSKALDELKQSYLTLESGAVPLLEDTASRIDELFQKRSSVLTQVNQLKTSMQSVLQEWKIYDQLYDEVNMMTIRFWYCMEHSKPVVLSLETLRCQVENLQSLQDEAESSEGSWEKLQEVIGKLKGLCPSVAEIIEEKCQNTHKRWTQVNQAIADQLQKAQSLLQLWKAYSNAHGEAAARLKQQEAKFQQLANISMSGNNLAEILPPALQDIKELQHDVQKTKEAFLQNSSVLDRLPQPAESSTHMLLPGPLHSLQRAAYLEKMLLVKANEFENHVLALTAQSPDIEHLNEVSLKLPLSDVAVKTLQNMNRQWIRATATALERCSELQGIGLNEKFLYCCEKWIQLLEKIEEALKVDVANSLPELLEQQKTYKMLEAEVSINQTIADSYVTQSLQLLDTTEIENRPEFITEFSKLTDRWQNAVQGVRQRKGDVDGLNAHVARCGGASLKKQDLRYSLHTACGAALLCRSSHGANKEIHFQRRRTTCALTLEAGEKLLLTTDLKTKESVGRRISQLQDSWKDMEPQLAEMIKQFQSTVETWDQCEKKIKELKSRLQVLKAQSEDPLPELHEDLHNEKELIKVAIRKQEIEDRLNTWVVFNEKNKELCAWLVQMENKVLQTADISIEEMIEKLQKRTVGREEVPERWECETIVSGHGTEESCFLSIRKFHQGRGLHILTCQLIPQDCMEEINLFSENKLQLKQMGDQLIKASNKSRAAEIDDKLNKINDRWQHLFDVIGSSMADQTNSRWMFFQWPRGIQRTVTWPWDHLCSCASTGHTGPFHSSVLRCFEQHIEFGIYRRTYKVNKELGGDKNGQRCPIIYPHGLVQCIRLGEPLILKRVKKLKETFAFIQQLDKNMSNLRTWLARIESELSKPVVYDVCDDQEIQKRLAEQQDLQRDIEQHSAGVESVFNICDVLLHDSDACANETECDSIQQTTRSLDRRWRNICAMSMERRMKIEETWRLWQKFLDDYSRFEDWLKSAERTAACPNSSEVLYTSAKEELKRFERQIHERLTQLELINKQYRRLARENRTDTASRLKQMVHEGNQRWDNLQRRVTAVLRRLRHFTNQREEFEGTRESILVWLTEMDLQLTNVEHFSESDADDKMRQLNGFQQEITLNTNKIDQLIVFGEQLIQKSEPLDAVLIEDELEELHRYCQEGLEDEKEASENETDMEDPREIQTDSWRKRGESEEPSSPQSLCHLVAPGHERSGCETPVSVDSIPLEWDHTGDVGGSSSHEEDEEGPYYSALSGKSISDGHSWHVPDSPSCPEHHYKQMEGDRNVPPVPPASSTPYKPPYVSLNFTGSTAYVCAFDRWEMIQAQELHNKLKIKQNLQQLNSDISAITTWLKKTEAELEMLKMAKPPSDIQEIELRVKRLQEILKAFDTYKALVVSVNVSSKEFLQTESPESTELQSRLRQLSLLWEAAQGAVDSWRGGLRQSLMQCQDFHQLSQNLLLWLASAKNRRQKAHVTDPKADPRALLECRRELMQLEKELVERQPQVDMLQEISNSLLIKGHGEDCIEAEEKVHVIEKKLKQLREQVSQDLMALQGTQNPASPLPSFDEVDSGDQPPATSVPAPRAKFLYPAVQSSENYRRRGGDREQGPRQHTATALLPLKGGPGSPTPAAAPPAAAAPGLPAALLRRRLQLHSGQQLCPVLLPHAEVHQWATPHIEGIAGHSATPPA

SEQ ID NO: 68687 - protein, 1548 aa, Homo sapiens
  MOD_RES (1)..(1): Any amino acid
XVLELLQIPYEKAEDTKMQEIMRLAHEFLQNFCAGNQQNQALLHKHINLFLNPGILEAVTMQHIFMNNFQLCSEINERVVQHFVHCIETHGRNVQYIKFLQTIVKAEGKFIKKCQDMVMAELVNSGEDVLVFYNDRASFQTLIQMMRSERDRMDENSPLMYHIHLVELLAVCTEGKNVYTEIKCNSLLPLDDIVRVVTHEDCIPEVKIAYINFLNHCYVDTEVEMKEIYTSNHMWKLFENFLVDICRACNNTSDRKHADSILEKYVTEIVMSIVTTFFSSPFSDQSTTLQTRQPVFVQLLQGVFRVYHCNWLMPSQKASVESCIRVLSDVAKSRAIAIPVDLDSQVNNLFLKSHSIVQKTAMNWRLSARNAARRDSVLAASRDYRNIIERLQDIVSALEDRLRPLVQAELSVLVDVLHRPELLFPENTDARRKCESGGFICKLIKHTKQLLEENEEKLCIKVLQTLREMMTKDRGYGEKLISIDELDNAELPPAPDSENATEQELEPSPPLRQLEDHKRGEALRQVLVNRYYGNVRPSGRRESLTSFGNGPLSAGGPGKPGGGGGGSGSSSMSRGEMSLAEVQCHLDKEGASNLVIDLIMNASSDRVFHESILLAIALLEGGNTTIQHSFFCRLTEDKKSEKFFKVFYDRMKVAQQEIKATVTVNTSDLGNKKKDDEVDRDAPSRKKAKEPTTQITEEVRDQLLEASAATRKAFTTFRREADPDDHYQPGEGTQATADKAKDDLEMSAVITIMQPILRFLQLLCENHNRDLQNFLRCQNNKTNYNLVCETLQFLDCICGSTTGGLGLLGLYINEKNVALINQTLESLTEYCQGPCHENQNCIATHESNGIDIITALILNDINPLGKKRMDLVLELKNNASKLLLAIMESRHDSENAERILYNMRPKELVEVIKKAYMQGEVEFEDGENGEDGAASPRNVGHNIYILAHQLARHNKELQSMLKPGGQVDGDEALEFYAKHTAQIEIVRLDRTMEQIVFPVPSICEFLTKESKLRIYYTTERDEQGSKINDFFLRSEDLFNEMNWQKKLRAQPVLYWCARNMSFWSSISFNLAVLMNLLVAFFYPFKGVRGALPFEGFQKGRGTLEPHWSGLLWTAMLISLAIVIALPKPHGIRALIASTILRLIFSVGLQPTLFLLGAFNVCNKIIFLMSFVGNCGTFTRGYRAMVLDVEFLYHLLYLVICAMGLFVHEFFYSLLLFDLVYREETLLNVIKSVTRNGRSIILTAVLALILVYLFSIVGYLFFKDDFILEVDRLPNETAVPETGESLASEFLFSDVCRVESGENCSSPAPREELVPAEETEQDKEHTCETLLMCIVTVLSHGLRSGGGVGDVLRKPSKEEPLFAARVIYDLLFFFMVIIIVLNLIFGVIIDTFADLRSEKQKKEEILKTTCFICGLERDKFDNKTVTFEEHIKEEHNMWHYLCFIVLVKVKDSTEYTGPESYVAEMIKERNLDWFPRMRAMSLVSSDSEGEQNELRNLQEKLESTMKLVTNLSGQLSELKDQMTEQRKQKQRIGLLGHPPHMNVNPQQPA

SEQ ID NO: 68688 - protein, 48 aa, Homo sapiens
MAERQEEQRGSPPLRAEGKADAEVKLILYHWTHSFSSQKAKLETQSLS

SEQ ID NO: 68689 - protein, 125 aa, Homo sapiens
MGNTLTCCVSPNASPKLGRRAGSAELYCASDIYEAVSGDAVAVAPAVVEPAELDFGEGEGHHLQHISDREMPEDLALESNPSDHPRASTIFLSKSQTDVREKRKSNHLNHCDLSNILPHKEQRCK

SEQ ID NO: 68690 - protein, 130 aa, Homo sapiens
MTLDNISRAAVDRIIRVDHAGEYGANRIYAGQMAVLGRTSVGPVIQKMWDQEKDHLKKFNELMVTFRVRPTVLMPLWNVLGFALGAGTALLGKEGAMACTVAVEESIAHHYNNQIRTLMEEDPEKYEELL

SEQ ID NO: 68691 - protein, 53 aa, Homo sapiens
MAPGPWPVSCLRGGPLGLTYLSLLLIPAAGASSCPRTPLPAMAPLPQASWNLL

SEQ ID NO: 68692 - protein, 168 aa, Homo sapiens
MKYQEVRCLTSFNISVSFPAETDDYAEIIDEEDTYTMPSKSYGIDEARDYEIQRERIELGRCIGEGQFGDVHQGIYMSPENPALAVAIKTCKNCTSDSVREKFLQEALTMRQFDHPHIVKLIGVITENPVWIIMELCTLGELRSFLQVRKYSLDLASLILYAYQLSTA

SEQ ID NO: 68693 - protein, 214 aa, Homo sapiens
  MOD_RES (1)..(1): Any amino acid
XAKSDLHEVKQEYSISPTDFCRKHKMPPPQAFTCNTADAPSKDIFVKLTTMAMYPEDHYRDRLSRDMGHTDRIENLRKIWVFLKTAFHARLRCMCTCNRCTFCICQNFLNSDLLQSVKNKIFTAVLNRLRARIAEWGAMLLADDEGSITHQVHAVSSVEDSIFMESSHGPLFLEARHVTQADLKSSTFWLRASFGATVFAVLGFAMYKALLKQR

SEQ ID NO: 68694 - protein, 379 aa, Homo sapiens
MDGEEQQPPHEANVEPVVPSEASEPVPRVLSGDPQNLSDVDAFNLLLEMKLKRRRQRPNLPRTVTQLVAEDGSRVYVVGTAHFSDDSKRDVVKTIREVQPDVVVVELCQYRVSMLKMDESTLLREAQELSLEKLQQAVRQNGLMSGLMQMLLLKVSAHITEQLGMAPGGEFREAFKEASKVPFCKFHLGDRPIPVTFKRAIAALSFWQKVRLAWGLCFLSDPISKDDVERCKQKDLLEQMMAEMIGEFPDLHRTIVSERDVYLTYMLRQAARRLELPRASDAEPRKCVPSVVVGVVGMGHVPGIEKNWSTDLNIQEIMTVPPPSVSGRVSRLAVKAAFFGLLGYSLYWMGRRTASLVLSLPAAQYCLQRVTEARHKEKN

SEQ ID NO: 68695 - protein, 336 aa, Homo sapiens
  MOD_RES (1)..(1): Any amino acid
XFNFAEAVNFCTVDWLPLGRQCVEHYRLLHRYCVFSHDEMICKMASKADVLDVVVASTVQKDMAIMIEDEKALRETVRKLGVIDSERMDFELLPDDERQCVKCKTTCFMSAISCSCKPGLLVCLHHVKELCSCPPYKYKLRYRYTLDDLYPMMNALKLRAESYNEWALNVNEALEAKINKKKSLVSFKALIEESEMKKFPDNDLLRHLRLVTQDAEKCASVAQQLLNGKRQTRYRSGGGKSQNQLTVNELRQFVTQLYALPCVLSQTPLLKDLLNRVEDFQQHSQKLLSEETPSAAELQDLLDVSFEFDVELPQLAEMRIRLEQARWLEEATTFIE

SEQ ID NO: 68696 - protein, 566 aa, Homo sapiens
MVDPRYGMCPLKGASGCPGAERSLLVQSYFEKGPLTFRDVAIEFSLEEWQCLDSAQQGLYRKVMLENYRNLVFLGIALTKPDLITCLEQGKEPWNIKRHEMVAKPPVICSHFPQDLWAEQDIKDSFQEAILKKYGKYGHDNLQLQKGCKSVDECKVHKEHDNKLNQCLITTQSNIFQCDPSAKVFHTFSNSNRHKIRHTRKKPFKCKKCEKSFCMLLHLTQHKRFHITENSYQCKDCGKAFNWFSTLTTHRRIHTGEKPYKCEECGKAFNRSSHLTTHKIIHTGEKPYRCEECGKAFNRSSHLTTHKRIHTGVKPYKCTECGKAFNRSSHLTTHRIIHTGEKPYKCEECGKAFNQSSTLTTHKITHAGEKPYKCEECGKAFYRFSYLTKHKTSHTGEKFYKCEECGKGFNWSSALTKHKRIHTGEKPYKCEECGKAFNESSNLTTHKMIHTGEKPYKCDECGKAFNRSSQLTAHKMIHTGEKPYKCEECGKAFNRSSTLTKHKITHTGEKSYKWEECGKDFNQSLSLIKITHTGEKPYKCEKCGKAFYQSSTLTKHKNSYWRELLL

SEQ ID NO: 68697 - protein, 567 aa, Homo sapiens
  MOD_RES (1)..(1): Any amino acid
XREREQLLQARDCAYHLQSAVRLMKTLSPGSPSGGPSPLPQWCRDLQLHPSQGAVLRIGPGETLEPLLLARPIGLAAQCLEAVIEMQLRALGREPASPGLSSQLAELLFALPAYHTLQRKALSHVPGAARPFPTSRVLRLLTGERGCQVASRLDEALQGSALRDQLRRRCQEEGDLLPGLLGLVGGVAGSASCGLGLGGAGALWSQYWTLLWAACAQSLDLNLGPWRDPRATAQQLSQALGQASLPQECEKELASLCHRLLHQSLIWSWDQGFCQALGSALGGQSSLPTSSGTAELLQQLFPPLLDALREPRLRRIFCQPADPAPVALGLCTLQTTLLWFLGRAQQYLAAWDPASFLLLIQKDLPPLLHEAEALYSLASEESLALEVEQQLGLEIQKLTAQIQLLPEESLSVFSQECHKQAMQGFKLYMPRGRYWRLRLCPEPPSAPSEYAGLVVRTVLEPVLQGLQGLPPQAQAPALGQALTAIVGAWLDHILTHGIRFSLQGALQLKQDFGVVRELLEEEQWSLSPDLRQTLLMLSIFQQLDGALLCLLQQPLPKSQVHRRPPCC

SEQ ID NO: 68698 - protein, 611 aa, Homo sapiens
  MOD_RES (1)..(1): Any amino acid
XTGTTHTATTVTSNMSSNQDPPPAASDQGEVESTQGDSVNITSSSAITTTVSSTLTRAVTTVTQSTPVPGPSVPPPEELQVSPGPRQQLPPRQLLQSASTALMGESAEVLSASQTPELPAAVDLSSTGEPSSGQESAGSAVVATVVVQPPPPTQSEVDQLSLPQELMAEAQAGTTTLMVTGLTPEELAVTAAAEAAAQAAATEEAQALAIQAVLQAAQQAVMAGTGEPMDTSEAAATVTQAELGHLSAEGQEGQATTIPIVLTQQELAALVQQQQLQEAQAQQQHHHLPTEALAPADSLNDPAIESNCLNELAGTVPSTVALLPSTATESLAPSNTFVAPQPVVVASPAKLQAAATLTEVANGIESLGVKPDLPPPPSKAPMKKENQWFDVGVIKGTNVMVTHYFLPPDDAVPSDDDLGTVPDYNQLKKQELQPGTAYKFRVAGINACGRGPFSEISAFKTCLPGFPGAPCAIKISKSPDGAHLTWEPPSVTSGKIIEYSVYLAIQSSQAGGELKSSTPAQLAFMRVYCGPSPSCLVQSSSLSNAHIDYTTKPAIIFRIAARNEKGYGPATQVRWLQETSKDSSGTKPANKRPMSSPEMKSAPKKSKADGQ

SEQ ID NO: 68699 - protein, 24 aa, Homo sapiens
MREPVLTWCVPLELLCSHPLPLSA

SEQ ID NO: 68700 - protein, 85 aa, Homo sapiens
MAASSSSSSAGGVSGSSVTGSGFSVSDLAPPRKALFTYPKGAGEMLEDQQVARMEKLAGLVEELEADEWRFKPIEQLLGFTPSSG

SEQ ID NO: 68701 - protein, 714 aa, Homo sapiens
MASEVQLMNASTQTDITFEHIMALAKLRPPTPPVPDICPFLLSDSCHSLHPMEHEFYEDNEYISSLPADADRTEDFEYEEVELCRVSSQEKLGLTVCYRTDDEEDTGIYVSEVDPNSIAAKDGRIREGDRILQINGEDVQNREEAVALLSNDECKRIVLLVARPEIQLDEGWLEDERNEFLEELNLEMLEEEHNEAMQPTANEVEQPKKQEEEEGTTDTATSSSNNHEKDSGVGRTDESLRNDESSEQENAAEDPNSTSLKSKRDLGQSQDTLGSVELQYNESLVSGEYIDSDCIGNPDEDCERFRQLLELKCKIRNHGEYDLYYSSSTIECNQGEQEGVEHELQLLNEELRNIELECQNIMQAHRLQKVTDQYGDIWTLHDGGFRNYNTSIDMQRGKLDDIMEHPEKSDKDSSSAYNTAESCRSTPLTVDRSPDSSLPRVINLTNKKNLRSTMAATQSSSGQSSKESTSTKAKTTEQGCSAESKEKVLEGSKLPDQEKAVSEHIPYLSPYHSSSYRYANIPAHARHYQSYMQLIQQKSAVEYAQSQLSLVSMCKESQKCSEPKMEWKVKIRSDGTRYITKRPVRDRILKERALKIKEERSGMTTDDDTMSEMKMGRYWSKEERKQHLVRAKEQRRRREFMMRSRLECLKESPQSGSEGKKEINIIELSHKKMMKKRNKKILDNWMTIQELMTHGAKSPDGTRVHNAFLSVTTV

SEQ ID NO: 68702 - protein, 308 aa, Homo sapiens
  MOD_RES (1)..(1): Any amino acid
XATARAATAFTEATRQAWRLSRTGTTSTMWISWPCCPRHGRTATGARTATSSSPAVTMAWTARPDSSGPSTTPPTAAATRSMASGQLSAPASPTVGASPWPVRGQGCRSGGLTPALGLPGVGLVLRVEQQPHLPLLSTLAGIRVMVHGRNHTPFLGHHSFSVRPGTEATISIREDEVHRLGSPYGHCTAGGEGVEVELLHNTSYTRQACLVSCFQQLMVETCSCGYYLHPLPAGAEYCSSARHPAWGHCFYRLYQDLETHRLPCTSRCPRPCRESAFKLSTGTSRWPSAKSAGWTLATLGEQGLPHQS

SEQ ID NO: 68703 - protein, 649 aa, Homo sapiens
MDLSALRVEEVQNVINAMQKILECPICLELIKEPVSTKCDHIFCKFCMLKLLNQKKGPSQCPLCKNDITKRSLQESTRFSQLVEELLKIICAFQLDTGLEYANSYNFAKKENNSPEHLKDEVSIIQSMGYRNRAKRLLQSEPENPSLQETSLSVQLSNLGTVRTLRTKQRIQPQKTSVYIELGSDSSEDTVNKATYCSVGDQELLQITPQGTRDEISLDSAKKAACEFSETDVTNTEHHQPSNNDLNTTEKRAAERHPEKYQGSSVSNLHVEPCGTNTHASSLQHENSSLLLTKDRMNVEKAEFCNKSKQPGLARSQHNRWAGSKETCNDRRTPSTEKKVDLNADPLCERKEWNKQKLPCSENPRDTEDVPWITLNSSIQKVNEWFSRSDELLGSDDSHDGESESNAKVADVLDVLNEVDEYSGSSEKIDLLASDPHEALICKSERVHSKSVESNIEDKIFGKTYRKKASLPNLSHVTENLIIGAFVTEPQIIQERPLTNKLKRKRRPTSGLHPEDFIKKADLAVQKTPEMINQGTNQTEQNGQVMNITNSGHENKTKGDSIQNEKNPNPIESLEKESAFKTKAEPISSSISNMELELNIHNSKAPKKNRLRRKSSTRHIHALELVVSRNLSPPNCTELQIDSCSSSEE

SEQ ID NO: 68704 - protein, 113 aa, Homo sapiens
MKDVPGFLQQSQNSGPGQPAVWHRLEELYTKKLWHQLTLQVLDFVQDPCFAQGDGLIKLYENFISEFEHRVNPLSLVEIILHVVRQMTDPNVALTFLEKTREKVKSSDEAVIL

SEQ ID NO: 68705 - protein, 60 aa, Homo sapiens
MLQLSEFDPLLREIAPGPLTTPSVPGSTPGPCFLCGSAPGTLHCPSCKQALCPACDHLFH

SEQ ID NO: 68706 - protein, 237 aa, Homo sapiens
MWLGRRALCALVLLLACASLGLLYASTRDAPGLRLPLAPWAPPQSPRRPELPDLAPEPRYAHIPVRIKEQVVGLLAWNNCSCESSGGGLPLPFQKQVRAIDLTKAFDPAELRAASATREQEFQAFLSRSQSPADQLLIAPANSPLQYPLQGVEVQPLRSILVPGLSLQAASGQEVYQVNLTASLGTWDVAGEVTGVTLTGEGQADLTLVSPGLDQLNRQLQLVTYSSRSYQTNTADT

SEQ ID NO: 68707 - protein, 80 aa, Homo sapiens
MKGPREEIVYLPCIYRNTGTEAPDYLATVDVDPKSPQYCQVIHRLPMPNLKDELHHSGWNTCSSCFGDSTKSRTKLVLPS

SEQ ID NO: 68708 - protein, 283 aa, Homo sapiens
TSGQRPAKRRRKSPAMAALTRDPQFQKLQQWYREHRSELNLRRLFDANKDRFNHFSLTLNTNHGHILVDYSKNLVTEDVMRMLVDLAKSRGVEAARERMFNGEKINYTEGRAVLHVALRNRSNTPILVDGKDVMPEVNKVLDKMKSFCQRVRSGDWKGYTGKTITDVINIGIGGSDLGPLMVTEALKPYSSGGPRVWYVSNIDGTHIAKTLAQLNPESSLFIIASKTFTTQETITNAETAKEWFLQAAKDPSAVAKHFVALSTNTTKVKEFGIDPQNMFEFWD

SEQ ID NO: 68709 - protein, 50 aa, Homo sapiens
MTERLLIKALSGGKNTKIITLNGKKMTKMPSALGKLPGLKTLVLQNNLIP

SEQ ID NO: 68710 - protein, 135 aa, Homo sapiens
MASFVTEVLAHSGRLEKEDLGTRISRLTRRVEEIKGEVCNMISKKYSEFLPSMQSAQGLITQVDKLSEDIDLLKSRIESEIPAVWNLTYKLNFIYTLNNRTKRRRPLCHPSVLSSWHFLFLENYTASLNHLVRCC

SEQ ID NO: 68711 - protein, 72 aa, Homo sapiens
MLGSVATTLPLSSSNSSGMPLGYYLSSPQISRVTISTTGQLTSKATVGSCSRVENSLDASPFSVPKKQDESP

SEQ ID NO: 68712 - protein, 168 aa, Homo sapiens
MEEVPHDCPGADSAQAGRGASCQGCPNQRLCASGAGATPDTAIEEIKEKMKTVKHKILVLSGKGGVGKSTFSAHLAHGLAEDENTQVHQSGSGWSPVYVEDNLGVMSVGFLLSSPDDAVIWRGPKKNGMIKQFLRDVDWGEVDYLIVDTPPGTSDEHLSVVRYLATAH

SEQ ID NO: 68713 - protein, 150 aa, Homo sapiens
MACSPDAVVSPSSAFLRSGSVYEPLKSINLPRPDNETLWDKLDHYYRIVKSTLLLYQSPTTGLFPTKTCGGDQKAKIQDSLYCAAGAWALALAYRRIDDDKGRTHELEHSAIKCMRGILYCYMRQADKVQQFKQDPRPTTCLHSVFNVHT

SEQ ID NO: 68714 - protein, 38 aa, Homo sapiens
MLGDGIQEEKDYEPQTICEHLQYLFALLQNSNRRYIDP

SEQ ID NO: 68715 - protein, 97 aa, Homo sapiens
  MOD_RES (1)..(1): Any amino acid
XFLLSLSEEIQRRLEATGMKGKRLTLKIMVRKPGAPVETAKFGGHGICDNIARTVTLDQATDNAKIIGKAMLNMFHTMKLNISDMRGSPISSVKPLS

SEQ ID NO: 68716 - protein, 781 aa, Homo sapiens
MSEFLLALLTLSGLLPIARVLTVGADRDQQLCDPGEFLCHDHVTCVSQSWLCDGDPDCPDDSDESLDTSRTCQVDQFSCGNGRCIPRAWLCDREDDCGDQTDEMASCEFPTCEPLTQFVCKSGRCISSKWHCDSDDDCGDGSDEVGCVHSCFDNQFRCSSGRCIPGHWACDGDNDCGDFSDEAQINCTKEEIHSPAGCNGNEFQCHPDGNCVPDLWRCDGEKDCEDGSDEKGCNGTIRLCDHKTKFSCWSTGRCINKAWVCDGDIDCEDQSDEDDCDSFLCGPPKHPCANDTSVCLQPEKLCNGKKDCPDGSDEGYLCDECSLNNGGCSNHCSVVPGRGIVCSCPEGLQLNKDNKTCEIVDYCSNHLKCSQVCEQHKHTVKCSCYEGWKLDVDGESCTSVDPFEAFIIFSIRHEIRRIDLHKRDYSLLVPGLRNTIALDFHFNQSLLYWTDVVEDRIYRGKLSESGGVSAIEVVVEHGLATPEGLTVDWIAGNIYWIDSNLDQIEVAKLDGSLRTTLIAGAMEHPRAIALDPRYGILFWTDWDANFPRIESASMSGAGRKTIYKDMKTGAWPNGLTVDHFEKRIVWTDARSDAIYSALYDGTNMIEIIRGHEYLSHPFAVSLYGSEVYWTDWRTNTLSKANKWTGQNVSVIQKTSAQPFDLQIYHPSRQPQAPNPCAANDGKGPCSHMCLINHNRSAACACPHLMKLSSDKKTCYEMKKFLLYARRSEIRGVDIDNPYFNFITAFTVPDIDDVTVIDFDASEERLYWTDIKTQTIKRAFIN

SEQ ID NO: 68717 - protein, 77 aa, Homo sapiens
MEQCACVERELDKVLQKFLTYGQHCERSLEELLHYVGQLRAELASAGGWPPLQVPCDSLPEDMGDPKLLSDRVPEGR

SEQ ID NO: 68718 - protein, 165 aa, Homo sapiens
MSELDQLRQEAEQLKNQIRDARKACADATLSQITNNIDPVGRIQMRTRRTLRGHLAKIYAMHWGTDSRLLVSASQDGKLIIWDSYTTNKVHAIPLRSSWVMTCAYAPSGNYVACGGLDNICSIYNLKTREGNVRVSRELAGHTGYLSCCRFLDDNQIVTSSGDTT

SEQ ID NO: 68719 - protein, 13 aa, Homo sapiens
MASQPPEDTAESQ

SEQ ID NO: 68720 - protein, 169 aa, Homo sapiens
MNIRNARPEDLMNMQHCNLLCLPENYQMKYYFYHGLSWPQLSYIAEDENGKIVGYVLAKMEEDPDDVPHGHITSLAVKRSHRRLGLAQKLMDQASRAMIENFNAKYVSLHVRKSNRAALHLYSNTLNFQISEVEPKYYADGEDAYAMKRDLTQMADEPATGPGSLCLET

SEQ ID NO: 68721 - protein, 61 aa, Homo sapiens
MEKWYLMTVVVLIGLTVRWTVSLNSYSGILTAVITIYSIGDWITHLLQLIIVSYVHMWQSL

SEQ ID NO: 68722 - protein, 666 aa, Homo sapiens
  MOD_RES (1)..(1): Any amino acid
XALQKEILMLKDKLEKSKRERHNEMEEAVGTIKDKYERERAMLFDENKKLTAENEKLCSFVDKLTAQNRQLEDELQDLAAKKESVAHWEAQIAEIIQWVSDEKDARGYLQALASKMTEELEALRSSSLGSRTLDPLWKVRRSQKLDMSARLELQSALEAEIRAKQLVQEELRKVKDANLTLESKLKDSEAKNRELLEEMEILKKKMEEKFRADTGLKLPDFQDSIFEYFNTAPLAHDLTFRTSSASEQETQAPKPEASPSMSVAASEQQEPKAHQFSIKSFSSPTQCSHCTSLMVGLIRQGYACEVCSFACHVSCKDGAPQVCPIPPEQSKRPLGVDVQRGIGTAYKGHVKVPKPTGVKKGWQRAYAVVCDCKLFLYDLPEGKSTQPGVIASQVLDLRDDEFSVSSVLASDVIHATRRDIPCIFRVTASLLGAPSKTSSLLILTENENEKRKWVGILEGLQSILHKNRLRNQVVHVPLEAYDSSLPLIKAILTAAIVDADRIAVGLEEGLYVIEVTRDVIVRAADCKKVHQIELAPREKIVILLCGRNHHVHLYPWSSLDGAEGSFDIKLPETKGCQLMATATLKRNSGTCLFVAVKRLILCYEIQRTKPFHRKFNEIVAPGSVQCLAVLRDRLCVGYPSGFCLLSIQGDGQPLNLVNPNDPSLAF

SEQ ID NO: 68723 - protein, 72 aa, Homo sapiens
TGHGDIISAISMVVAMAVYTSERWDQPPHPQIQTFFSWSFYLGWVSAILLLCTGALSLGAHCGGPRPGYETL

SEQ ID NO: 68724 - protein, 187 aa, Homo sapiens
MSDRYLEQRISIKFCVKLNKSASETHHLLKEAYGDEVMSRARVFDWHKRFKEGREDVRDDARSGRPVTHRTDDNIQKVKDLVCSNRQLTVRMMAEELNLDKETVRLILKENLNMRKISAKVISGVLKGEPKPRKLDFRSDLSKETRKNSSCLRKKRRNLTMLPRLVSNSLSQGILPPWPPKALGLSA

SEQ ID NO: 68725 - protein, 223 aa, Homo sapiens
MSSESSKKRKPKVIRSDGAPAEGKRNRSDTEQEGKYYSEEAEVDLRDPGRDYELYKYTCQELQRLMAEIQDLKSRGGKDVAIEIEERRIQSCVHFMTLKKLNRLAHIRLKKGRDQTHEAKQKVDAYHLQLQNLLYEVMHLQKEITKCLEFKSKHEEIDLVSLEEFYKEAPPDISKAEVTMGDPHQQTLARLDWELEQRKRLAEKYRECLSNKEKILKEIEVKK

SEQ ID NO: 68726 - protein, 220 aa, Homo sapiens
MVQLPVGWTTFLLYSYESSGGMHEECVFPFTYKGSVYFTCTHIHSLSPWCATRAVYNGQWKYCQSEDYPRCIFPFIYRGKAYNSCISQGSFLGSLWCSVTSVFDEKQQWKFCETNEYGGNSLRKPCIFPSIYRNNVVSDCMEDESNKLWCPTTENMDKDGKWSFCADTRISALVPGFPCHFPFNYKNKNYFNCTNEGSKENLVWCATSYNYDQDHTWVYC

SEQ ID NO: 68727 - protein, 224 aa, Homo sapiens
MSLSDWHLAVKLADQPLTPKSILRLPETELGEYSLGGYSISFLKQLIAGKLQESVPDPELIDLIYCGRKLKDDQTLDFYGIQPGSTVHVLRKSWPEPDQKPGVLQDKDLFSVFADPNMLDTLVPAHPALVNAIVLVLHSVAGSAPMPGTDSSSRSMPSSSYRDMPGGFLFEGLSDDEDDFHPNTRSTPSSSTPSSRPASLGYSGAAGPRPITQSELATALALAS

SEQ ID NO: 68728 - protein, 585 aa, Homo sapiens
MPLPFPSRSQQDAPKPTPAACRCSGLARRVLTIAFALLILGLMTWAYAAGVPLASDRYGLLAFGLYGAFLSAHLVAQSLFAYLEHRRVAAAARGPLDAATARSVALTISAYQEDPAYLRQCLASARALLYPRARLRVLMVVDGNRAEDLYMVDMFREVFADEDPATYVWDGNYHQPWEPAAAGAVGAGAYREVEAEDPGRLAVEALVRTRRCVCVAQRWGGKREVMYTAFKALGDSVDYVQVCDSDTRLDPMALLELVRVLDEDPRVGAVGGDVRILNPLDSWVSFLSSLRYWVAFNVERACQSYFHCVSCISGPLGLYRNNLLQQFLEAWYNQKFLGTHCTFGDDRHLTNRMLSMGYATKYTSRSRCYSETPSSFLRWLSQQTRWSKSYFREWLYNALWWHRHHAWMTYEAVVSGLFPFFVAATVLRLFYAGRPWALLWVLLCVQGVALAKAAFAAWLRGCLRMVLLSLYAPLYMCGLLPAKFLALVTMNQSGWGTSGRRKLAANYVPLLPLALWALLLLGGLVRSVAHEARADWSGPSRAAEAYHLAAGAGAYVGYWVAMLTLYWVGVRRLCRRRTGGYRVQV

SEQ ID NO: 68729 - protein, 299 aa, Homo sapiens
MVSSPCTQASSRTCSRILGLSLGTAALFAAGANVALLLPNWDVTYLLRGLLGRHAMLGTGLWGGGLMVLTAAILISLMGWRYGCFSKSGLCRSVLTALLSGGLALLGALICFVTSGVALKDGPFCMFDVSSFNQTQAWKYGYPFKDLHRIICMTVRSGTPSAWSPLQLLSGTCPSSPPFCASACSSFSWWSFMSSTASWAFSAASARSDRQNLHLQAWVFSSSAVLNPFYKEWSLMLECSGVISAHCKLRLPGSSNSPASASQVAGITGTCHHTQLIFVFLVETGFHNVSQDGLDLLTS

SEQ ID NO: 68730 - protein, 47 aa, Homo sapiens
MSKSFQQSSLSRDSQGHGRDLSAAGIGLLAAATQSLSMPASLGRMNQ

SEQ ID NO: 68731 - protein, 118 aa, Homo sapiens
MAAASYDQLLKQVEALKMENSNLRQELEDNSNHLTKLETEASNMKEVLKQLQGSIEDEAMASSGQIDLLERLKELNLDSSNFPGVKLRSKMSLRSYGSREGSVSSRSGECSPVPMGSF

SEQ ID NO: 68732 - protein, 617 aa, Homo sapiens [sequence omitted]

SEQ ID NO: 68733 - protein, 202 aa, Homo sapiens
  MOD_RES (1)..(1): Any amino acid
XEASAARETDAHLANPVLPDEVLQEAVPGSIRTAEHFLGFLRRLLEYVKWRLRVQHVVQESPPAFLSGLAQRVCIQRKPLRFCAERLRSLLHTLEITDLADFSPLTLLANFATLVSTYAKGFTIIIEPFDDRTPTIANPILHFSCMDASLAIKPVFERFQSVIITSGTLSPLDIYPKILDFHPVTMATFTMTLARVCLCPML

SEQ ID NO: 68734 - protein, 112 aa, Homo sapiens
MDVLASYSIFQELQLVHDTGYFSALPSLEETWQQTCLELERYLQTEPRRISETFGEDLDCFLHASPPPCIEESFRRLDPLLLPVEAAICEKSSAVDILLSRDKLLSETCLSL

SEQ ID NO: 68735 - protein, 131 aa, Homo sapiens
KELIPEATEKYLGGTDDTVKKKDLFLDLIADVMFGVPSVIVARNHREGASEEEIRLSKMVMKFWANFARNGNPNGEGLPHWPEYNQKEGYLQIGANTQAAQKLKDKEVAFWTNLFAKKAVEKPPQTEHIEL

SEQ ID NO: 68736 - protein, 39 aa, Homo sapiens
MQLYRKHSCVTLHQRIHNGQKPYEWNTTDLRSLGLRNNL

SEQ ID NO: 68737 - protein, 181 aa, Homo sapiens
  MOD_RES (1)..(1): Any amino acid
XGSVGGGRGGPGPAGSGVKGCAVRLVGAGRPGLPPGRGRKGIPSDIPAPSRCLGPHRYGGVPGAASRGASCPDFRGLCVRLAAELATLGALEQQREAGAEVLSAGDGPGAEEDFLRQLGSLLRELHCPDRALCGGDGAAALREPGAGLRLLRFLCSELQATRLLCLRSLLDPSPRPPLGEG

SEQ ID NO: 68738 - protein, 68 aa, Homo sapiens
MATVMAATAAERAVLEEEFRWLLHDEVHAVLKQLQDILKEASLRFTLPGSGTEGPAKQENFILGSCGM

SEQ ID NO: 68739 - protein, 195 aa, Homo sapiens
MFCVASDEIYIAPSGVQKERIQPEDMFVCDINEKDISGPSPSKKLKKSQCTPLFMNAYTMRGAGAVIHTHSKAAVMATLLFPGREFKITHQEMIKGIKKCTSGGYYRYDDMLVVPIIENTPEEKDLKDRMAHAMNEYPDSCAVLVRRHGVYVWGETWEKAKTMCECYDYLFDIAVSMKKVGLDPSQLPVGENGIV

SEQ ID NO: 68740 - protein, 953 aa, Homo sapiens
MAELDLMAPGPLPRATAQPPAPLSPDSGSPSPDSGSASPVEEEDVGSSEKLGRETEEQDSDSAEQGDPAGEGKEVLCDFCLDDTRRVKAVKSCLTCMVNYCEEHLQPHQVNIKLQSHLLTEPVKDHNWRYCPAHHSPLSAFCCPDQQCICQDCCQEHSGHTIVSLDAARRDKEAELQCTQLDLERKLKLNENAISRLQANQKSVLVSVSEVKAVAEMQFGELLAAVRKAQANVMLFLEEKEQAALSQANGIKAHLEYRSAEMEKSKQELERMAAISNTVQFLEEYCKFKNTEDITFPSVYVGLKDKLSGIRKVITESTVHLIQLLENYKKKLQEFSKEEEYDIRTQVSAVVQRKYWTSKPEPSTREQFLQYAYDITFDPDTAHKYLRLQEENRKVTNTTPWEHPYPDLPSRFLHWRQVLSQQSLYLHRVLLRFRRPSLGTGFCLVSLSDLLPGFPPSLQPLPPFQGPPLQPQMKDGRKGLNQDITDVCFSPEKDHSSKSATSQVYWTAKTQHTSLPLSKAPENEHFLGAASNPEEPWRNSLRCISEMNRLFSGKADITKPGYDPCNLLVDLDDIRDLSSGFSKYRDFIRYLPIHLSKYILRMLDRHTLNKCASVSQHWAAMAQQVKMDLSAHGFIQNQITFLQGSYTRGIDPNYANKVSIPVPKMVDDGKSMRVKHPKWKLRTKNEYNLWTAYQNEETQQVLMEERNVFCGTYNVRILSDTWDQNRVIHYSGGDLIAVSSNRKIHLLDIIQVKAIPVEFRGHAGSVRALFLCEEENFLLSGSYDLSIRYWDLKSGVCTRIFGGHQGTITCMDLCKNRLVSGGRDCQVKVWDVDTGKCLKTFRHKDPILATRINDTYIVSSCERGLVKVWHIAMAQLVKTLSGHEGAVKCLFFDQWHLLSGSTDGLVMAWSMVGKYERCLMAFKHPKLELNNQSKCLAHSQGSTALPCTSARSL

SEQ ID NO: 68741 - protein, 38 aa, Homo sapiens
MEDVEARFAHLLQPIRDLTKNWEVDVAAQLAGSDLHFF

SEQ ID NO: 68742 - protein, 147 aa, Homo sapiens
MGTECHYFICDVGNREEVYQTAKAVREKVGDITILVNNAAVVHGKSLMDSDDDALLKSQHINTLGQFWTTKAFLPRMLELQNGHIVCLNSVLALSAIPGAIDYCTSKASAFAFMESLTLGLLDCPGVSATTVLPFHTSTEMFQGMRV

SEQ ID NO: 68743 - protein, 47 aa, Homo sapiens
NTGSRAAFVKAVGFKDSQKKVLLDPKVLRIFPDKFVLKERTQEGPVT

SEQ ID NO: 68744 - protein, 115 aa, Homo sapiens
QKSTLAIDPATSKEIPLPSPAFDFVILLDVSDTSSMSRMNDIIDQQDPGLSGSLATRVGCNMQFCSARGLWRNLKNIFTEKHTTSKATWATKSCQGWAELKNCPIKLLTKISVNV

SEQ ID NO: 68745 - protein, 562 aa, Homo sapiens
MGWYFRLARTEHYSQRLPAVYWDCSQKGRPFHLFRLLIQYHEPELCSYLDTKKITPDSYALNWLGSLFACYCSTEVTQAIWDGYLQQADPFFIYFLMLIILVNAKEVILTQESDSKEEVIKFLENTPSSLNIEDIEDLFSLAQYYCSKTPASFRKDNHHLFGSTLLGIKDDDADLSQALCLAISVSEILQANQLQGEGVRFFVVDCRPAEQYNAGHLSTAFHLDSDLMLQNPSEFAQSVKSLLEAQKQSIESGSIAGGEHLCFMGSGREEEDMYMNMVLAHFLQKNKEYVSIASGGFMALQQHLADINVDGPENGYGHWIASTSGSRSSINSVDGESPNGSSDRGMKSLVNKMTVALKTKSVNVREKVISFIENTSTPVDRMSFNLPWPDRSCTERHVSSSDRVGKPYRGVKPVFSIGDEEEYDTDEIDSSSMSDDDRKEVVNIQTWINKPDVKHHFPCKEVKESGHMFPSHLLVTATHMYCLREIVSRKGLAYIQSRQALNSVVKITSKKKHPELITFKYGNSSASGIEILAIERYLIPNAGDATKAIKQQIMKVLDALES

SEQ ID NO: 68746 - protein, 185 aa, Homo sapiens
MMPFGKISQQLCGVKKLPWSCDSRYFWGWLNAVFNKVDYDRIRDVGPDRAASEWLLRCGAMVRYHGQERWQKDYNHLPTGPLDKYKIQAIDATDSCIMSIGFDHMEGLEHVEKIRLCKCHYIEDDCLLRLSQLENLQKTILEMEIISCGNITDKGIIALRHLRNLKYLLLSDLPGVREKENLVQA

SEQ ID NO: 68747 - protein, 169 aa, Homo sapiens
MDPLGDTLRRLREAFHAGRTRPAEFRAAQLQGLGRFLQENKQLLHDALAQDLHKSAFESEVSEVAISQGEVTLALRNLRAWMKDERVPKNLATQLDSAFIRKEPFGLVLIIAPWNYPLNLTLVPLVGALAAGNCVVLKPSEISKNVEKILAEVLPQYVDQGALVWARLL

SEQ ID NO: 68748 - protein, 460 aa, Homo sapiens
MIGGLFIYNHKGEVLISRVYRDDIGSRQAADSAVFSSSGPFPGEWLEANRRNAVDAFRVNVIHARQQVRSPVTNIARTSFFHVKRSNIWLAAVTKQNVNAAMVFEFLYKMCDVMAAYFGKISEENIKNNFVLIYELLDEILDFGYPQNSETGALKTFITQQGIKSQHQTKEEQSQITSQVTGQIGWRREGIKYRRNELFLDVLESVNLLMSPQGQVLSAHVSGRVVMKSYLSGMPECKFGMNDKIVIEKQGKGTADETSKSGKQSIAIDDCTFHQCVRLSKFDSERSISFIPPDGEFELMRYRTTKDIILPFRVIPLVREVGRTKLEVKVVIKSNFKPSLLAQKIEVRIPTPLNTSGVQVICMKGKAKYKASENAIVWKIKRMAGMKESQISAEIELLPTNDKKKWARPPISMNFEVPFAPSGLKVRYLKVFEPKLNYSDHDVIKWVRYIGRSGIYETRC

SEQ ID NO: 68749 - protein, 61 aa, Homo sapiens
MLHDARDRQKFFSDVQYLRDMQHKVDSEYQACLRRQEYRRDPNEKKRDQFWGQETSFERSR

SEQ ID NO: 68750 - protein, 73 aa, Homo sapiens
MAGPAEEAGAHCPESLWPLPPQVSPRVTYTRVSPGQAEDVTFLYHPCAHPWLKLQLALLAYACMANPSLTPDF

SEQ ID NO: 68751 - protein, 145 aa, Homo sapiens
MSNQQMHRKTASLNSPVSCKEKPDRVEEPPDYSLHWPEGLKGEEIKKCGREGITLNKYNQQYHKLFKDVPLEEVVLKVCSCALQRDFLLQGRLYISPNWLCFHASLFGKDIKVVIPVVSVQMIKKHKMARLLPNGLAITTNTSQK

SEQ ID NO: 68752 - protein, 53 aa, Homo sapiens
MLQQDSNDDTEDVSLFDAEEETTNRPRKAKIRHPVASFFHLFFRVSAIIVYLL

SEQ ID NO: 68753 - protein, 156 aa, Homo sapiens
  MOD_RES (1)..(1): Any amino acid
XWNDVPCNYHLPFTCKKGTVACGEPPVVEHARTFGQKKDRYEINSLVRYQCTEGFVQRHMPTIRCQPSGHWEEPQITCTDREHHPGHLAEHRPPPTNADYRSGAHGTLGGAAPAQPTEKSFQDAPRTLSPGACQADVHPTQTVSSSCRFLSYKESH

SEQ ID NO: 68754 - protein, 310 aa, Homo sapiens
MESIFHEKQEGSLCAQHCLNNLLQGEYFSPVELSSIAHQLDEEERMRMAEGGVTSEDYRTFLQQPSGNMDDSGFFSIQWFNLNSLLTGPELISDTYLALFLAQLQQEGYSIFVVKGDLPDCEADQLLQMIRVQQMHRPKLIGEELAQLKEQRVHKTDLERVLEANDGSGMLDEDEEDLQRALALSRQEIDMEDEEADLRRAIQLSMQGSSRNISQDMTQTSGTNLTSEELRKRREAYFEKQQQKQQQQQQQQQQGDLSGQSSHPCERPATSSGALGSDLGDAMSEEDMLQAAVTMSLETVRNDLKTEGKK

SEQ ID NO: 68755 - protein, 121 aa, Homo sapiens
APVKYHGDRSKESLVSFAMQHVRSTVTELWTGNFVNSIQTAFAAGIGWLITFCSKGGDCLTSQTRLRLSGMLDGLVNVGWMDCATQDNLCKSLDITTSTTAYFPPGATLNNKEKNSILLLH

SEQ ID NO: 68756 - protein, 37 aa, Homo sapiens
MVALRGLGSGLQPWCPLDLRLGSTGCLTCRHHQTSHE

SEQ ID NO: 68757 - protein, 82 aa, Homo sapiens
  MOD_RES (1)..(1): Any amino acid
XLVDIGLDSCKELLKDLKGFDPGEKYFHNTSWGDVSLWEPSGKKVLLAPSSVSDSAHPRLDLAVPSHQLLWSKSCWPWEFGL

SEQ ID NO: 68758 - protein, 892 aa, Homo sapiens
MLRTAGRDGLCRLSTYLEELEAVELKKFKLYLGTATELGEGKIPWGSMEKAGPLEMAQLLITHFGPEEAWRLALSTFERINRKDLWERGQREDLVRDTPPGGPSSLGNQSTCLLEVSLVTPRKDPQETYRDYVRRKFRLMEDRNARLGECVNLSHRYTRLLLVKEHSNPMQVQQQLLDTGRGHARTVGHQASPIKIETLFEPDEERPEPPRTVVMQGAAGIGKSMLAHKVMLDWADGKLFQGRFDYLFYINCREMNQSATECSMQDLIFSCWPEPSAPLQELIRVPERLLFIIDGFDELKPSFHDPQGPWCLCWEEKRPTELLLNSLIRKKLLPELSLLITTRPTALEKLHRLLEHPRHVEILGFSEAERKEYFYKYFHNAEQAGQVFNYVRDNEPLFTMCFVPLVCWVVCTCLQQQLEGGGLLRQTSRTTTAVYMLYLLSLMQPKPGAPRLQPPPNQRGLCSLAADGLWNQKILFEEQDLRKHGLDGEDVSAFLNMNIFQKDINCERYYSFIHLSFQEFFAAMYYILDEGEGGAGPDQDVTRLLTEYAFSERSFLALTSRFLFGLLNEETRSHLEKSLCWKVSPHIKMDLLQWIQSKAQSDGSTLQQGSLEFFSCLYEIQEEEFIQQALSHFQVIVVSNIASKMEHMVSSFCLKRCRSAQVLHLYGATYSADGEDRARCSAGAHTLLVQLRPERTVLLDAYSEHLAAALCTNPNLIELSLYRNALGSRGVKLLCQGLRHPNCKLQNLRLKRCRISSSACEDLSAALIANKNLTRMDLSGNGVGFPGMMLLCEGLRHPQCRLQMIQLRKCQLESGACQEMASVLGTNPHLVELDLTGNALEDLGLRLLCQGLRHPVCRLRTLWWLFGMDLNKMTHSRLAALRVTKPYLDIGC

SEQ ID NO: 68759 - protein, 498 aa, Homo sapiens
MSSPNIWSTGSSVYSTPVFSQKMTVWILLLLSLYPGFTSQKSDDDYEDYASNKTWVLTPKVPEGDVTVILNNLLEGYDNKLRPDIGVKPTLIHTDMYVNSIGPVNAINMEYTIDIFFAQTWYDRRLKFNSTIKVLRLNSNMVGKIWIPDTFFRNSKKADAHWITTPNRMLRIWNDGRVLYTLRLTIDAECQLQLHNFPMDEHSCPLEFSSYGYPREEIVYQWKRSSVEVGDTRSWRLYQFSFVGLRNTTEVVKTTSGDYVVMSVYFDLSRRMGYFTIQTYIPCTLIVVLSWVSFWINKDAVPARTSLGITTVLTMTTLSTIARKSLPKVSYVTAMDLFVSVCFIFVFSALVEYGTLHYFVSNRKPSKDKDKKKKNPIHHHIGDIVEKQPRISREQLTDPSPSLPSSQAPTIDIRPRSATIQMNNATHLQERDEEYGYECLDGKDCASFFCCFEDCRTGAWRHGRIHIRIAKMDSYARIFFPTAFCLFNLVYWVSYLYL

SEQ ID NO: 68760 - protein, 125 aa, Homo sapiens
MSIVTVQLGQCGNQIGFEVFDALLSDSHSSQGLCSMRENEAYQASCKERFFSEEENGVPIARAVLVDMEPKVINQMLSKAAQSGQWKYGQHACFCQKQGSGNNWAYGRDKDSACYPDWSGTPGLQ

SEQ ID NO: 68761 - protein, 506 aa, Homo sapiens
  MOD_RES (1)..(1): Any amino acid
XKTQLDEENLKKIFREVQIMKMLCHPHIIRLYQVMETERMIYLVTEYASGGEIFDHLVAHGRMAEKEARRKFKQIVTAVYFCHCRNIVHRDLKAENLLLDANLNIKIADFGFSNLFTPGQLLKTWCGSPPYAAPELFEGKEYDGPKVDIWSLGVVLYVLVCGALPFDGSTLQNLRARVLSGKFRIPFFMSTECEHLIRHMLVLDPNKRLSMEQICKHKWMKLGDADPNFDRLIAECQQLKEERQVDPLNEDVLLAMEDMGLDKEQTLQSLRSDAYDHYSAIYSLLCDRHKRHKTLRLGALPSMPRALAFQAPVNIQAEQAGTAMNISVPQVQLINPENQIVEPDGTLNLDSDEGEEPSPEALVRYLSMRRHTVGVADPRTEVMEDLQKLLPGFPGVNPQAPFLQVAPNVNFMHNLLPMQNLQPTGQLEYKEQSLLQPPTLQLLNGMGPLGRRASDGGANIQLHAQQLLKRPRGPSPLVTMTPAVPAVTPVDEESSDGEPDQEAVQR

SEQ ID NO: 68762 - protein, 84 aa, Homo sapiens
MNCDYYMEEKVLPPSSLEGKVKETVHNAFWDHLKEQLSATPPDFSCALELLKEIKEILLSLLLPRQNRLRIEIEEALDMDLLKQ

SEQ ID NO: 68763 - protein, 1037 aa, Homo sapiens
MTTSRGSVGWTTGSAPSWMTRTEELDIRPKVSSLLGKLVSYTNLTQGAKEHEEAESGEGTRRRAAEAPSMGTLMGVYLPCLQNIFGVILFLRLTWMVGTAGVLQALLIVLICCCCTLLTAISMSAIATNGVVPAGGSYFMISRSLGPEFGGAVGLCFYLGTTFAAAMYILGAIEILLTYIAPPAAIFYPSGAHDTSNATLNNMRVYGTIFLTFMTLVVFVGVKYVNKFASLFLACVIISILSIYAGGIKSIFDPPVFPVCMLGNRTLSRDQFDICAKTAVVDNETVATQLWSFFCHSPNLTTDSCDPYFMLNNVTEIPGIPGAAAGVLQENLWSAYLEKGDIVEKHGLPSADAPSLKESLPLYVVADIATSFTVLVGIFFPSVTGIMAGSNRSGDLRDAQKSIPVGTILAIITTSLVYFSSVVLFGACIEGVVLRDKYGDGVSRNLVVGTLAWPSPWVIVIGSFFSTCGAGLQSLTGAPRLLQAIAKDNIIPFLRVFGHGKVNGEPTWALLLTALIAELGILIASLDMVAPILSMFFLMCYLFVNLACAVQTLLRTPNWRPRFKYYHWALSFLGMSLCLALMFVSSWYYALVAMLIAGMIYKYIEYQGAEKEWGDGIRGLSLSAARYALLRLEEGPPHTKNWRPQLLVLLKLDEDLHVKYPRLLTFASQLKAGKGLTIVGSVIQGSFLESYGEAQAAEQTIKNMMEIEKVKGFCQVVVASKVREGLAHLIQSCGLGGMRHNSVVLGWPYGWRQSEDPRAWKTFIDTVRCTTAAHLALLVPKNIAFYPSNHERYLEGHIDVWWIVHDGGMLMLLPFLLRQHKVWRKCRMRIFTVAQMDDNSIQMKKDLAVFLYHLRLEAEVEVVEMHNSDISAYTYERTLMMEQRSQMLRQMRLTKTEREREAQLVKDRHSALRLESLYSDEEDESAVGADKIQMTWTRDKYMTETWDPSHAPDNFRELVHIKPDQSNVRRMHTAVKLNEVIVTRSHDARLVLLNMPGPPRNSEGDENYMEFLEVLTEGLERVLLVRGGGREVITIYS

SEQ ID NO: 68764 - protein, 17 aa, Homo sapiens
MKIPNIGNVMNKFEILG

SEQ ID NO: 68765 - protein, 99 aa, Homo sapiens
MPRRRKNLGGNPFRKTANPKEVVVSSVASREEPTTTLPSMGETKVDQEELFTSISEIFSDLDPDVVYLMLSECDFKGNLIGCLLGASSCAQHFFMDYLI

SEQ ID NO: 68766 - protein, 314 aa, Homo sapiens
GWEMTFLILSIAPVLAVTGMIETAAMTGFANKDKQELKHAGKIATEALENIRTIVSLTREKAFEQMYEEMLQTQHRNTSKKAQIIGSCYAFSHAFIYFAYAAGFRFGAYLIQAGRMTPEGMFIVFTAIAYGAMAIGETLVLAPEYSKAKSGAAHLFALLEKKPNIDSRSQEGKKPDTCEGNLEFREVSFFYPCRPDVFILRGLSLSIERGKTVAFVGSSGCGKSTSVQLLQRLYDPVQGQVLFDGVDAKELNVQWLRSQIAIVPQEPVLFNCSIAENIAYGDNSRVVPLDEIKEAANAANIHSFIEGLPESLEC

SEQ ID NO: 68767 - protein, 465 aa, Homo sapiens
MEASCLELALEGERLCKSGDCRAGVSFFEAAVQVGTEDLKTLSAIYSQLGNAYFYLHDYAKALEYHHHDLTLARTIGDQLGEAKASGNLGNTLKVLGNFDEAIVCCQRHLDISRELNDKVGEARALYNLGNVYHAKGKSFGCPGPQDVGEFPEEVRDALQAAVDFYEENLSLVTALGDRAAQGRAFGNLGNTHYLLGNFRDAVIAHEQRLLIAKEFGDKAAERRAYSNLGNAYIFLGEFETASEYYKKTLLLARQLKDRAVEAQSCYSLGNTYTLLQDYEKAIDYHLKHLAIAQELNDRIGEGRACWSLGNAYTALGNHDQAMHFAEKHLEISREVGDKSGELTARLNLSDLQMVLGLSYSTNNSIMSENTEIDSSLNGVRPKLGRRHSMENMELMKLTPEKVQNWNSEILAKQKPLIAKPSAKLLFVNRLKGKKYKTNSSTKVLQDASNSIDHRIPNSQRVRLN

SEQ ID NO: 68768 - protein, 61 aa, Homo sapiens
MNTYGSYKCYCLNGYMLMPDGSCSSALTCSMANCQYGCDVVKGQIRCQCPSPGLQLAPDGR

SEQ ID NO: 68769 - protein, 171 aa, Homo sapiens
MALKKSSPSLDSGDSDSEELPTFAFLKKEPSSTKRRQPEREEKIVVVDISDCEASCPPAPELFSPPVPEIAETVTQTQPVRLLSSESEDEEEFIPLAQRLTLLLQMEGGGQLLGALQTMECRCVIEAQAVPCSVTWRRRAGPSERGLGGGANSTGVAPGRGICVHDRQWKA

SEQ ID NO: 68770 - protein, 64 aa, Homo sapiens
  MOD_RES (1)..(1): Any amino acid
XTTTIIPKRIAHSPSLQSLKKPIIPKEFGGKVPTVIRQRYLNLFIEECLKFCTSNQEAIEKPQL

SEQ ID NO: 68771 - protein, 256 aa, Homo sapiens
MAAPIPQGFSCLSRFLGWWSRQPVLVTQSAAIVPVRTKKRFTPPIYQPKFKTEKEFMQHARKAGLVIPPEKSDRSIHLACTAGIFDAYVPPEGDARISSLSKEGLIERTERMKKTMASQVSIRRIKDYDANFKIKDFPEKAKDIFIEAHLCLNNSDHDRLHTLVTEHCFPTLAIYDRFGRLMYGQEDVPKDVLEYVVFEKQLTNPYGSWRMHTKIVPPWAPPKQPILKTVMIPGPQLKPEEEYEEAQGEAQKPQLA

SEQ ID NO: 68772 - protein, 47 aa, Homo sapiens
MALVPCQVLRMAILLSYCSILCNYKAIEMPSHQTYGGSWKFLTFIDL

SEQ ID NO: 68773 - protein, 83 aa, Homo sapiens
MMPTPVILLKEGTDSSQGIPQLVSNISACQVIAEAVRTTLGPRGMDKLIVDGRVSEAGETLCGGRFTPPDHHSSFPHSHPAGS

SEQ ID NO: 68774 - protein, 221 aa, Homo sapiens
MAGPFSRLLSARPGLRLLALAGAGSLAAGFLLRPEPVRAASERRRLYPPSQTWPTGQLPGNCTRSRRLCPPSMVTGYPLPSAEYPDLRKHNNCMASHLTPAVYARLCDKTTPTGWTLDQCIQTGVDNPGHPFIKTVGMVAGDEETYEVFADLFDPVIQERHNGYDPRTMKHTTDLDASKIRSGYFDERYVLSSRVRTGRSIRGLSLPPACTRAERREVERV

SEQ ID NO: 68775 - protein, 104 aa, Homo sapiens
  MOD_RES (1)..(1): Any amino acid
XQHAMFGNDTITCTTHGNWTKLPECREVKCPFPSRPDNGFVNYPAKPTLYYKDKATFGCHDGYSLDGPEEIECTKLGNWSAMPSCKEHSSLAFWKTDASDVKPC

SEQ ID NO: 68776 - protein, 182 aa, Homo sapiens
MESGSTAASEEARSLRECELYVQKHNIQALLKDSIVQLCTARPERPMAFLREYFERLEKEEAKQIQNLQKAGTRTDSREDEISPPPPNPVVKGRRRRGAISAEVYTEEDAASYVRKVIPKDYKTMAALAKAIEKNVLFSHLDDNERSDIFDAMFSVSFIAGETVIQQGDEGDNFYVIDQGET

SEQ ID NO: 68777 - protein, 47 aa, Homo sapiens
MADDIDIEAMLEAPYKKDENKLSSANGHEERSKKQTFCLLGKLYISL

SEQ ID NO: 68778 - protein, 93 aa, Homo sapiens
MELLNAYQSKIKMQTEAQHERELQKLEQRVSLRRAHLEQKIEEELAALQKERSERIKNLLERQEREIETFDMESLRMGFGNLVTLDFPKEDYR

SEQ ID NO: 68779 - protein, 95 aa, Homo sapiens
  MOD_RES (1)..(1): Any amino acid
XKYIIWPRIDQKSCFKSMITAGFEPVVIENVLEGDELRTDLKAVEAKVQELGPDCILCIHSTTSCFAPRVPDRKSFSFTFFRCPYYFIVTWIKWL

SEQ ID NO: 68780 - protein, 100 aa, Homo sapiens
MTALQLKELSHSGLYRRRRDRPDSLRVNGLPEEELSNMANALASATCERCKGGFAPAEKIVNSNGELYHEQCFVCAQCFQQFPEGLFYEVNSSLAELSKP

SEQ ID NO: 68781 - protein, 124 aa, Homo sapiens
MDPDSGFLLVTRALDREEQAEYQLQVTLEMQDGHVLWGPQPVLVHVKDENDQVPHFSQAIYRARLSRGTRPGIPFLFLEASDRDEPGTANSDLRFHILSQAPAQPSPDMFQLEPRLGALALSPK

SEQ ID NO: 68782 - protein, 547 aa, Homo sapiens
MAFTLQERQMLGLQGLLPPKIETQDIQALRFHRNLKKMTSPLEKYIYIMGIQERNEKLFYRILQDDIESLMPIVYTPTVGLACSQYGHIFRRPKGLFISISDRGHVRSIVDNWPENHVKAVVVTDGERILGLGDLGVYGMGIPVGKLCLYTACAGIRPDRCLPVCIDVGTDNIALLKDPFYMGLYQKRDRTQQYDDLIDEFMKAITDRYGRNTLIQFEDFGNHNAFRFLRKYREKYCTFNDDIQGTAAVALAGLLAAQKVISKPISEHKILFLGAGEAALGIANLIVMSMVENGLSEQEAQKKIWMFDKYGLLVKGRKAKIDSYQEPFTHSAPESIPDTFEDAVNILKPSTIIGVAGAGRLFTPDVIRAMASINERPVIFALSNPTAQAECTAEEAYTLTEGRCLFASGSPFGPVKLTDGRVFTPGQGNNVYIFPGVALAVILCNTRHISDSVFLEAAKALTSQLTDEELAQGRLYPPLANIQEVSINIAIKVTEYLYANKMAFRYPEPEDKAKYVKERTWRSEYDSLLPDVYEWPESASSPPVITE

SEQ ID NO: 68783 - protein, 486 aa, Homo sapiens
MAENHAQNKAKLISETRRRFEAEYVTDKSDKYDARDVERLQQDDNWVESYLSWRHNIVDETLKMLDESFQWRKEISVNDLNESSIPRWLLEIGVIYLHGYDKEGNKLFWIRVKYHVKDQKTILDKKKLIAFWLERYAKRENGKPVTVMFDLSETGINSIDMDFVRFIINCFKVYYPKYLSKIVIFDMPWLMNAAFKIVKTWLGPEAVSLLKFTSKNEVQDYVSVEYLPPHMGGTDPFKYSYPPLVDDDFQTPLCENGPITSEDETSSKEDIESDGKETLETISNEEQTPLLKKINPTESTSKAEENEKVDSKVKAFKKPLSVFKGPLLHISPAEELYFGSTESGEKKTLIVLTNVTKNIVAFKVRTTAPEKYRVKPSNSSCDPGASVDIVVSPHGGLTVSAQDRFLIMAAEMEQSSGTGPAELTQFWKEVPRNKVMEHRLRCHTVESSKPNTLTLKDNAFNMSDKTSEDICLQFATSSCEMDCSPP

SEQ ID NO: 68784 - protein, 121 aa, Homo sapiens
  MOD_RES (1)..(1): Any amino acid
XSPPIAEQIIRSLKLIMGLDGTTQGLQRVQQLAKNTRYFRQRLQEMGFIIYGNENASVVPLLLYMPGKVAAFARHMLEKKIGVVVVGFPATPLAEARARFCVSAAHTREMLDTVICCVMKI

SEQ ID NO: 68785 - protein, 16 aa, Homo sapiens
MLSSIKCVLVGDSAVG

SEQ ID NO: 68786 - protein, 248 aa, Homo sapiens
MAGSSSLEAVRRKIRSLQEQADAAEERAGTLQRELDHERKLRETAEADVASLNRRIQLVEEELDRAQERLATALQKLEEAEKAADESERGMKVIESRAQKDEEKMEIQEIQLKEAKHIAEDADRKYEEVARKLVIIESDLERAEERAELSEGKCAELEEELKTVTNNLKSLEAQAEKYSQKEDRYEEEIKVLSDKLKEAETRAEFAERSVTKLEKSIDDLEDELYAQKLKYKAISEELDHALNDMTSI

SEQ ID NO: 68787 - protein, 148 aa, Homo sapiens
MNGGNESSGADRAGGPVATSVPIGWQRCVREGAVLYISPSGTELSSLEQTRSYLLSDGTCKCGLECPLNVPKVFNFDPLAPVTPGGAGVGPASEEDMTKLCNHRRKAVAMATLYRSMETTCSHSSPGEGASPQMFHTVSPGPPSARPP

SEQ ID NO: 68788 - protein, 190 aa, Homo sapiens
  MOD_RES (1)..(1): Any amino acid
XKHLEQRLKLMASDMIESCVKRTRIAFEVKLQKTSRSTDFRVPQSICTMFNVMVDAKAQSTKLCSMEMGQEHQYHSKIDELIEETVKEMITLLVAKFVTILEGVLAKLSRYDEGTLFSSFLSFTKPGMDVADAYVTFVRHSQDVLRDKVNEEMYIERLFDQWYNSSMNVICTWLTDRMDLQLHIYQLKTL

SEQ ID NO: 68789 - protein, 441 aa, Homo sapiens
PSPAIGLFASMAAVLLGGARASRLLFQRLLWDVVRSPISFFERTPIGHLLNRFSKETDTVDVDIPDKLRSLLMYAFGLLEVSLVVAVATPLPLWPSCHCFSSTLGFRWLAANVELLGNGLVFAAATCAVLSKAHLSAGLVGFSVSAALQVTQTLQWVVRNWTDLENSIVSVERMQDYAWTPKEAPWRLPTCAAQPPWPQGGQIEFQDFGLRYRPELPLAVQGVSFKIHAGEKVGIVGRTGAGKSSLASGLLRLQEAAEGGIWIDGVPIAHVGLHTLRSRISIIPQDPILFPGSLRMNLDLLQEHSDEAIWAALETVQLKALVASLPGQLQYKCADRGEDLSVGQKQLLCLARALLRKTQILILDEATAAVDPGTELQMQAMLGSWFAQCTVLLIAHRLRSVMDCARVLVMDKGQVAESGSPAQLLAQKGLFYRLAQESGLV

SEQ ID NO: 68790 - protein, 2766 aa, Homo sapiens
MPPNINWKEIMKVDPDDLPRQEELADNLLISLSKVEVNELKSEKQENVIHLFRITQSLMKMKAQEVELALEEVEKAGEEQAKFENQLKTKVMKLENELEMAQQSAGGRDTRFLRNEICQLEKQLEQKDRELEDMEKELEKEKKVNEQLALRNEEAENENSKLRRENKRLKKKNEQLCQDIIDYQKQIDSQKETLLSRRGEDSDYRSQLSKKNYELIQYLDEIQTLTEANEKIEVQNQEMRKNLEESVQEMEKMTDEYNRMKAIVHQTDNVIDQLKKENDHYQLQVQELTDLLKSKNEEDDPIMVAVNAKVEEWKLILSSKDDEIIEYQQMLHNLREKLKNAQLDADKSNVMALQQGIQERDSQIKMLTEQVEQYTKEMEKNTCIIEDLKNELQRNKGASTLSQQTHMKIQSTLDILKEKTKEAERTAELAEADAREKDKELVEALKRLKDYESGVYGLEDAVVEIKNCKNQIKIRDREIEILTKEINKLELKISDFLDENEALRERVGLEPKTMIDLTEFRNSKHLKQQQYRAENQILLKEIESLEEERLDLKKKIRQMAQERGKRSATSGLTTEDLNLTENISQGDRISERKLDLLSLKNMSEAQSKIRSSDKAELLHRRSSFNTPQSDQNETEENMTIGSLSRMLSEIHHSVESGMHPFVPLTRLSSSMQVKENSTPETITIREIFKAPCLQSSRNLESLVSTFSRESHEEINDICLFSDDCMKKVSRSHQALEKTSFVQKSNSSFHGLSTASDIMQKLSLRQKSAIFCQQIHENRADMDKSQVATLEEEQVHSQVKYADINLKEDIIKSEVPLQTEILKNKLKVNLPDPVSITAQSKLSQINSLENLIEQLRRELVFLRSQNEIIAQEFLIKEAECRNADIELEHHRSQAEQNEFLSRELIEKERDLERSRTVIAKFQNKLKELVEENKQLEEGMKEILQAIKEMQKDPDVKGGETSLIIPSLERLVNAIESKNAEGIFDASLHLKAQVDQLTGRNEELRQELRESRKEAINYSQQLAKANLKIDHLEKETSLLRQSEGSNVVFKGIDLPDGIAPSSASIINSQNEYLIHLLQELENKEKKLKNLEDSLEDYNRKFAVIRHQQSLLYKEYLSEKETWKTESKTIKEEKRKLEDQVQQDAIKVKEYNNLLNALQMDSDEMKKILAENSRKITVLQVNEKSLIRQYTTLVELERQLRKENEKQKNELLSMEAEVCEKIGCLQRFKEMAIFKIAALQKVVDNSVSLSELELANKQYNELTAKYRDILQKDNMLVQRTSNLEHLECENISLKEQVESINKELEITKEKLHTIEQAWEQETKLGNESSMDKAKKSITNSDIVSISKKITMLEMKELNERQRAEHCQKMYEHLRTSLKQMEERNFELETKFAELTKINLDAQKVEQMLRDELADSVSKAVSDADRQRILELEKNEMELKVEVSKLREISDIARRQVEILNAQQQSRDKEVESLRMQLLDYQAQSDEKSLIAKLHQHNVSLQLSEATALGKLESITSKLQKMEAYNLRLEQKLDEKEQALYYARLEGRNRAKHLRQTIQSLRRQFSGALPLAQQEKFSKTMIQLQNDKLKIMQEMKNSQQEHRNMENKTLEMELKLKGLEELISTLKDTKGAQKVINWHMKIEELRLQELKLNRELVKDKEEIKYLNNIISEYERTISSLEEEIVQQNKFHEERQMAWDQREVDLERQLDIFDRQQNEILNAAQKFEEATGSIPDPSLPLPNQLEIALRKIKENIRIILETRATCKSLEEKLKEKESALRLAEQNILSRDKVINELRLRLPATAEREKLIAELGRKEMEPKSHHTLKIAHQTIANMQARLNQKEEVLKKYQRLLEKAREEQREIVKKHEEDLHILHHRLELQADSSLNKFKQTAWDLMKQSPTPVPTNKHFIRLAEMEQTVAEQDDSLSSLLVKLKKVSQDLERQREITELKVKEFENIKLQLQENHEDEVKKVKAEVEDLKYLLDQSQKESQCLKSELQAQKEANSRAPTTTMRNLVERLKSQLALKEKQQKALSRALLELRAEMTAAAEERIISATSQKEAHLNVQQIVDRHTRELKTQVEDLNENLLKLKEALKTSKNRENSLTDNLNDLNNELQKKQKAYNKILREKEEIDQENDELKRQIKRLTSGLQGKPLTDNKQSLIEELQRKVKKLENQLEGKVEEVDLKPMKEKNAKEELIRWEEGKKWQAKIEGIRNKLKEKEGEVFTLTKQLNTLKDLFAKADKEKLTLQRKLKTTGMTVDQVLGIRALESEKELEELKKRNLDLENDILYMRAHQALPRDSVVEDLHLQNRYLQEKLHALEKQFSKDTYSKPSISGIESDDHCQREQELQKENLKLSSENIELKFQLEQANKDLPRLKNQVRDLKEMCEFLKKEKAEVQRKLGHVRGSGRSGKTIPELEKTIGLMKKVVEKVQRENEQLKKASGILTSEKMANIEQENEKLKAELEKLKAHLGHQLSMHYESKTKGTEKIIAENERLRKELKKETDAAEKLRIAKNNLEILNEKMTVQLEETGKRLQFAESRGPQLEGADSKSWKSIVVTRMYETKLKELETDIAKKNQSITDLKQLVKEATEREQKVNKYNEDLEQQIKILKHVPEGAETEQGLKRELQVLRLANHQLDKEKAELIHQIEANKDQSGAESTIPDADQLKEKIKDLETQLKMSDLEKQHLKEEIKKLKKELENFDPSFFEEIEDLKYNYKEEVKKNILLEEKVKKLSEQLGVELTSPVAASEEFEDEEESPVNFPIY

SEQ ID NO: 68791 - protein, 18 aa, Homo sapiens
LTDALPLLEQKQQNRLMS

SEQ ID NO: 68792 - protein, 276 aa, Homo sapiens
  MOD_RES (1)..(1): Any amino acid
XPILTYQGGSVEAAQAFLCKNGDPQTPRFDHLVAIERAGRAADGNYYNARKMNIKHLVDPIDDLFLAAKKIPGISSTGVGDGGNELGMGKVKEAVRRHIRHGDVIACDVEADFAVIAGVSNWGGYALACALYILYSCAVHSQYLRKAVGPSRAPGDQAWTQALPSVIKSGWGRCQGVPEPGLMVAAGGLCQGELPQPEQKEVKAKTELGPPDAMWRHVGLSVFPRVAGRQMEPFLPLPHSPARSRQPALPCLLQDETMIIPAPSCSTGSLSTMFPP

SEQ ID NO: 68793 - protein, 49 aa, Homo sapiens
MDDTLFQLKFTAKQLEKLAKKAEKDSKAEQAKVKKLLSPAGFRPFCRKM

SEQ ID NO: 68794 - protein, 1903 aa, Homo sapiens
SPMDQMGKMRPQPYGGTNPYSQQQGPPSGPQQGHGYPGQPYGSQTPQRYPMTMQGRAQSAMGGLSYTQQIPPYGQQGPSGYGQQGQTPYYNQQSPHPQQQQPPYSQQPPSQTPHAQPSYQQQPQSQPPQLQSSQPPYSQQPSQPPHQQSPAPYPSQQSTTQQHPQSQPPYSQPQAQSPYQQQQPQQPAPSTLSQQAAYPQPQSQQSQQTAYSQQRFPPPQELSQDSFGSQASSAPSMTSSKGGQEDMNLSLQSRPSSLPDLSGSIDDLPMGTEGALSPGVSTSGISSSQGEQSNPAQSPFSPHTSPHLPGIRGPSPSPVGSPASVAQSRSGPLSPAAVPGNQMPPRPPSGQSDSIMHPSMNQSSIAQDRGYMQRNPQMPQYSSPQPGSALSPRQPSGGQIHTGMGSYQQNSMGSYGPQGGQYGPQGGYPRQPNYNALPNANYPSAGMAGGINPMGAGGQMHGQPGIPPYGTLPPGRMSHASMGNRPYGPNMANMPPQVGSGMCPPPGGMNRKTQETAVAMHVAANSIQNRPPGYPNMNQGGMMGTGPPYGQGINSMAGMINPQGPPYSMGGTMANNSAGMAASPEMMGLGDVKLTPATKMNNKADGTPKTESKSKKSSSSTTTNEKITKLYELGGEPERKMWVDRYLAFTEEKAMGMTNLPAVGRKPLDLYRLYVSVKEIGGLTQVNKNKKWRELATNLNVGTSSSAASSLKKQYIQCLYAFECKIERGEDPPPDIFAAADSKKSQPKIQPPSPAGSGSMQGPQTPQSTSSSMAEGGDLKPPTPASTPHSQIPPLPGMRSNSVGIQDAFNDGSDSTFQKRNSMTPNPGYQPSMNTSDMMGRMSYEPNKDPYGSMRKAPGSDPFMSSGQGPNGGMGDPYSRAAGPGLGNVAMGPRQHYPYGGPYDRVRTEPGIGPEGNMSTGAPQPNLMPSNPDSGMYSPSRYPPQQQQQQQQRHDSYGNQFSTQGTPSGSPFPSQQTTMYQQQQQNYKRPMDGTYGPPAKRHEGEMYSVPYSTGQGQPQQQQLPPAQPQPASQQQAAQPSPQQDVYNQYGNAYPATATAATERRPAGGPQNQFPFQFGRDRVSAPPGTNAQQNMPPQMMGGPIQASAEVAQQGTMWQGRNDMTYNYANRQSTGSAPQGPAYHGVNRTDEMLHTDQRANHEGSWPSHGTRQPPYGPSAPVPPMTRPPPSNYQPPPSMQNHIPQVSSPAPLPRPMENRTSPSKSPFLHSGMKMQKAGPPVPASHIAPAPVQPPMIRRDITFPPGSVEATQPVLKQRRRLTMKDIGTPEAWRVMMSLKSGLLAESTWALDTINILLYDDNSIMTFNLSQLPGLLELLVEYFRRCLIEIFGILKEYEVGDPGQRTLLDPGRFSKVSSPAPMEGGEEEEELLGPKLEEEEEEEVVENDEEIAFSGKDKPASENSEEKLISKFDKLPVKIVQKNDPFVVDCSDKLGRVQEFDSGLLHWRIGGGDTTEHIQTHFESKTELLPSRPHAPCPPAPRKHVTTAEGTPGTTDQEGPPPDGPPEKRITATMDDMLSTRSSTLTEDGAKSSEAIKESSKFPFGISPAQSHRNIKILEDEPHSKDETPLCTLLDWQDSLAKRCVCVSNTIRSLSFVPGNDFEMSKHPGLLLILGKLILLHHKHPERKQAPLTYEKEEEQDQGVSCNKVEWWWDCLEMLRENTLVTLANISGQLDLSPYPESICLPVLDGLLHWAVCPSAEAQDPFSTLGPNAVLSPQRLVLETLSKLSIQDNNVDLILATPPFSRLEKLYSTMVRFLSDRKNPVCREMAVVLLANLAQGDSLAARAIAVQKGSIGNLLGFLEDSLAATQFQQSQASLLHMQNPPFEPTSVDMMRRAARALLALAKVDENHSEFTLYESRLLDISVSPLMNSLVSQVICDVLFLIGQS

SEQ ID NO: 68795 - protein, 75 aa, Homo sapiens
MIRNWLTIFILFPLKLVEKCESSVSLTVPPVVKLENGSSTNVSLTLRPPLNATLVITFEITFRSKNITILELPDE

SEQ ID NO: 68796 - protein, 203 aa, Homo sapiens
MAEISDLDRQIEQLRRCELIKESEVKALCAKAREILVEESNVQRVDSPVTVCGDIHGQFYDLKELFRVRYPDRITLIRGNHESRQITQVYGFYDECLRKYGSVTVWRYCTEIFDYLSLSAIIDGKIFCVHGGLSPSIQTLDQIRTIDRKQEVPHDGPMCDLLWSDPEDTTGWGVSPRGAGYLFGSDVVAQFNAANDIDMICRA

SEQ ID NO: 68797 - protein, 58 aa, Homo sapiens
MKNATIVMSVRREQGSSSGEGSLSFEDVAVGFTREEWQFLDQSQKVLYKEVMLENYIN

SEQ ID NO: 68798 - protein, 186 aa, Homo sapiens
MKLLSLVAVVGCLLVPPAEANKVRESSEDIRCKCICPPYRNISGHIYNQNVSQKDCNCLHVVEPMPVPGHDVEAYCLLCECRYEERSTTTIKVIIVIYLSVVGALLLYMAFLMLVDPLIRKPDAYTEQLHNEEENEDARSMAAAAASLGGPRANTVLERVEGAQQRWKLQVQEQRKTVFDRHKMLS

SEQ ID NO: 68799 - protein, 43 aa, Homo sapiens
MSYVVTKTKAINGKYHRFLGRHFPRFYVLYTIFMKGRIADVMG

SEQ ID NO: 68800 - protein, 135 aa, Homo sapiens
MVLRSGICGLSPHRIFPSLLVVVALVGLLPVLRSHGLQLSPTASTIRSSEPPRERSIGDVTTAPPEVTPESRPVNHSVTDHGMKPRKAFPVLGIDYTHVRTPFEISLWILLACLMKIGFHVIPTISSIVPESCLL

SEQ ID NO: 68801 - protein, 490 aa, Homo sapiens
MKTYRQREKQGTKVADSSKGPDEAKIKALLERTGYTLDVTTGQRKYGGPPPDSVYSGQQPSVGTEIFVGKIPRDLFEDELVPLFEKAGPIWDLRLMMDPLTGLNRGYAFVTFCTKEAAQEAVKLYNNHEIRSGKHIGVCISVANNRLFVGSIPKSKTKEQILEEFSKVTEGLTDVILYHQPDDKKKNRGFCFLEYEDHKTAAQVKVLFVRNLANTVTEEILEKAFSQFGKLERVKKLKDYAFIHFDERDGAVKAMEEMNGKDLEGENIEIVFAKPPDQKRKERKAQRQAAKNQMYDDYYYYGPPHMPPPTRGRGRGGRGGYGYPPDYYGYEDYYDYYGYDYHNYRGGYEDPYYGYEDFQVGARGRGGRGARGAAPSRGRGAAPPRGRAGYSQRGGPGSARGVRGARGGAQQQRGRGVRGARGGRGGNVGGKRKADGYNQPDSKRRQTNNQNWGSQPIAQQPLQGGDHSGNYGYKSENQEFYQDTFGQQWK

SEQ ID NO: 68802 - protein, 54 aa, Homo sapiens
  MOD_RES (1)..(1): Any amino acid
XEPCTSPEAMGPSGHRRRCLVPASPEQHVEVDKCPHSQLPPQAAHQPPSPPAGA

SEQ ID NO: 68803 - protein, 856 aa, Homo sapiens
MALIMEPVSKWSPSQVVDWMKGLDDCLQQYIKNFEREKISGDQLLRITHQELEDLGVSRIGHQELILEAVDLLCALNYGLETENLKTLSHKLNASAKNLQNFITGRRRSGHYDGRTSRKLPNDFLTSVVDLIGAAKSLLAWLDRSPFAAVTDYSVTRNNVIQLCLELTTIVQQDCTVYETENKILHVCKTLSGVCDHIISLSSDPLVSQSAHLEVIQLANIKPSEGLGMYIKSTYDGLHVITGTTENSPADRCKKIHAGDEVIQVNHQTVPLIPRSPTSSVATPSSTISTPTKRDSSALQDLYIPPPPAEPYIPRDEKGNLPCEDLRGHMVGKPVHKGSESPNSFLDQEYRKRFNIVEEDTVLYCYEYEKGRSSSQGRRESTPTYGKLRPISMPVEYNWVGDYEDPNKMKRDSRRENSLLRYMSNEKIAQEEYMFQRNSKKDTGKKSKKKGDKSNSPTHYSLLPSLQMDALRQDIMGTPVPETTLYHTFQQSSLQHKSKKKNKGPIAGKSKRRISCKDLGRGDCEGWLWKKKDAKSYFSQKWKKYWFVLKDASLYWYINEEDEKAEGFISLPEFKIDRASECRKKYAFKACHPKIKSFYFAAEHLDDMNRWLNRINMLTAGYAERERIKQEQDYWSESDKEEADTPSTPKQDSPPPPYDTYPRPPSMSCASPYVEAKHSRLSSTETSQSQSSHEEFRQEVTGSSAVSPIRKTASQRRSWQDLIETPLTSSGLHYLQTLPLEDSVFSDSAAISPEHRRQSTLPTQKCHLQDHYGPYPLAESERMQVLNGNGGKPRSFTLPRDSGFNHCCLNAPVSACDPQDDVQPPEVEEEEEEEEEEGEAAGENIGEKRWNCDLGI

SEQ ID NO: 68804 - protein, 106 aa, Homo sapiens
MRLEKDRFSVNLDVKHFSPEELKVKVLGDVIEVHGKHEERQDEHGFISREFHRKYRIPADVDPLTITSSLSSDGVLTVNGPRKQVSGPERTIPITREEKPAVTAAP

SEQ ID NO: 68805 - protein, 624 aa, Homo sapiens
MYFPSWLSQLYRGLSRPIRRTTQPIWGSLYRSLLQSSQRRIPEFSSFVVRTNTCGELRSSHLGQEVTLCGWIQYRRQNTFLVLRDFDGLVQVIIPQDESAASVKKILCEAPVESVVQVSGTVISRPAGQENPKMPTGEIEIKVKTAELLNACKKLPFEIKNFVKKTEALRLQYRYLDLRSFQMQYNLRLRSQMVMKMREYLCNLHGFVDIETPTLFKRTPGGAKEFLVPSREPGKFYSLPQSPQQFKQLLMVGGLDRYFQVARCYRDEGSRPDRQPEFTQIDIEMSFVDQTGIQSLIEGLLQYSWPNDKDPVVVPFPTMTFAEVLATYGTDKPDTRFGMKIIDISDVFRNTEIGFLQDALSKPHGTVKAICIPEGAEILPVFLNANRNWNSPVANFIMESQRLELIRLMETQEEDVVLLTAGEHNKACSLLGKLRLECADLLETRGVVLRDPTLFSFLWVVDFPLFLPKEENPRELESAHHPFTAPHPSDIHLLYTEPKKARSQHYDLVLNGNEIGGGSIRIHNAELQRYILATLLKEDVKMLSHLLQALDYGAPPHGGIALGLDRLICLVTGSPSIRDVIAFPKSFRGHDLMSNTPDSVPPEELKPYHIRVSKPTDSKAERAH

SEQ ID NO: 68806 - protein, 53 aa, Homo sapiens
MQTSSSRSVHLSEWQKNYFAITSGICTGPKADAYRAQILRIQYAWANSEISQV

SEQ ID NO: 68807 - protein, 120 aa, Homo sapiens
MNSVSPAAAQYRSSSPEDARRRPEARRPRGPRGPDPNGLGPSGASGPALGSPGAGPSEPDEVDKFKAKFLTAWNNVKYGWVVKSRTSFSKISSIHLCGRRYRFEGEGDIQRFQRDFVSRL

SEQ ID NO: 68808 - protein, 95 aa, Homo sapiens
AVVRWIARSTQGSEVTAVTRPQDNAGEAAALSSLRALRKEFVPFLLNFLREQSSRVLPQGPPTPAKTPGASAALPGRPGGPPRGSRGARSQLFPP

SEQ ID NO: 68809 - protein, 62 aa, Homo sapiens
  MOD_RES (1)..(1): Any amino acid
XGSDYEDQGDDQLNVFGEDTMGGFMEDLRKCKIIFIIGGPGSGKGAGAACLWTTPPRPSPSA

SEQ ID NO: 68810 - protein, 273 aa, Homo sapiens
MARETFPFTSSMLRSLRLQQEWLEWEDRRRAAAQQCRSRRCPSSPRARLTRPHRSCRDPAVHQALFSGNLQQVQALFQDEEAANMIVETVSNQLAWSAEQGFWVLTPKTKQTAPLAIATARGYTDCARHLIRQGAELDARVGGRAALHEACARAQFDCVRLLLTFGAKANVLTEEGTTPLHLCTIPESLQCAKLLLEAGATVNLAAGESQETPLHVAAARGLEQHVALYLEHGADVGLRTSQGETALNTACAGAEGPDAETLRQLPSGPGSPA

SEQ ID NO: 68811 - protein, 166 aa, Homo sapiens
MSPKPRASGPPAKATEAGKRKSSSQPSPSDPKKKTTKVAKKGKAVRRGRRGKKGAATKMAAVTAPEAESGPAAPGPSDQPSQELPQHELPPEEPVSEGTQHDPLSQESELEEPLSQESEVEEPLSQESQVEEPLSQESEVEEPLSQESQVEEPLSQESEMEELPSV

SEQ ID NO: 68812 - protein, 74 aa, Homo sapiens
MKRNTCDLLSRSKSASEETLHSSNEEEDPFRGMEPYLVRRLSCRNIQLPPLAFRQLEQADLKSESENIQRPTSL

SEQ ID NO: 68813 - protein, 110 aa, Homo sapiens
MREIVHIQAGQCGNQIGTKFWEVISDEHGIDPAGGYVGDSALQLERINVYYNESSSQKYVPRAALVDLEPGTMDSVRSGPFGQLFRPDNFIFATYFEDLSISQVWLPHSC

SEQ ID NO: 68814 - protein, 1215 aa, Homo sapiens
QPEYLDATGGTLHPYQMEGLNWLRFSWAQGTDTILADEMGLGKTVQTAVFLYSLYKEGHSKGPFLVSAPLSTIINWEREFEMWAPDMYVVTYVGDKDSRAIIRENEFSFEDNAIRGGKKASRMKKEASVKFHVLLTSYELITIDMAILGSIDWACLIVDEAHRLKNNQSKFFRVLNGYSLQHKLLLTGTPLQNNLEELFHLLNFLTPERFHNLEGFLEEFADIAKEDQIKKLHDMLGPHMLRRLKADVFKNMPSKTELIVRVELSPMQKKYYKYILTRNFEALNARGGGNQVSLLNVVMDLKKCCNHPYLFPVAAMEAPKMPNGMYDGSALIRASGKLLLLQKMLKNLKEGGHRVLIFSQMTKMLDLLEDFLEHEGYKYERIDGGITGNMRQEAIDRFNAPGAQQFCFLLSTRAGGLGINLATADTVIIYDSDWNPHNDIQAFSRAHRIGQNKKVMIYRFVTRASVEERITQVAKKKMMLTHLVVRPGLGSKTGSMSKQELDDILKFGTEELFKDEATDGGGDNKEGEDSSVIHYDDKAIERLLDRNQDETEDTELQGMNEYLSSFKVAQYVVREEEMGEEEEVEREIIKQEESVDPDYWEKLLRHHYEQQQEDLARNLGKGKRIRKQVNYNDGSQEDRDWQDDQSDNQSDYSVASEEGDEDFDERSEAPRRPSRKGLRNDKDKPLPPLLARVGGNIEVLGFNARQRKAFLNAIMRYGMPPQDAFTTQWLVRDLRGKSEKEFKAYVSLFMRHLCEPGADGAETFADGVPREGLSRQHVLTRIGVMSLIRKKVQEFEHVNGRWSMPELAEVEENKKMSQPGSPSPKTPTPSTPGDTQPNTPAPVPPAEDGIKIEENSLKEEESIEGEKEVKSTAPETAIECTQAPAPASEDEKVVVEPPEGEEKVEKAEVKERTEEPMETEPKGAADVEKVEEKSAIDLTPIVVEDKEEKKEEEEKKEVMLQNGETPKDLNDEKQKKNIKQRFMFNIADGGFTGMEMRGPPGLEGSDVKLGFLSETTNEERAATVTKKTYEIWHRRHDYWLLAGIINHGYARWQDIQNDPRYAILNEPFKGEMNRGNFLEIKNKFLARRFKLLEQALVIEEQLRRAAYLNMSEDPSHPSMALNTRFAEVECLAESHQHLSKESMAGNKPANAVLHKVLKQLEELLSDMKADVTRLPATIARIPPVAVRLQMSERNILSRLANRAPEPTPQQVAQQQ

SEQ ID NO: 68815 - protein, 209 aa, Homo sapiens
MDFPSSLRPALFLTGPLGLSDVPDLSFMCSWRDALTLPEAQPQNSENGALHVTKDLLWEPATPGPLPMLPPLIDPWDPGLTARDLLFRGGCRYRKRPRVVLDVTEQISRFLLDHGDVAFAPLGKLMLENFKLEGAGSRTKKKTVVSVKKLLQDLGGHQPWGQVSLGLPQQPTAPLLYPRGPHPGHVGGEPLGRAAARGAGAAVGAAASG

SEQ ID NO: 68816 - protein, 671 aa, Homo sapiens
MWLLYLLVPALFCRAGGSIPIPQKLFGEVTSPLFPKPYPNNFETTTVITVPTGYRVKLVFQQFDLEPSEGCFYDYVKMLLTFHTDFSNEENGTIMFYKGFLAYYQAVDLDECASRSKSGEEDPQPQCQHLCHNYVGGYFCSCRPGYELQEDRHSCQAECSSELYTEASGYISSLEYPRSYPPDLRCNYSIRVERGLTLHLKFLEPFDIDDHQQVHCPYDQLQIYANGKNIGEFCGKQRPPDLDTSSNAVDLLFFTDESGDSRGWKLRYTTEIIKCPQPKTLDEFTIIQNLQPQYQFRDYFIATCKQGYQLIEGNQVLHSFTAVCQDDGTWHRAMPRCKIKDCGQPRNLPNGDFRYTTTMGVNTYKARIQYYCHEPYYKMQTRAGSRESEQGVYTCTAQGIWKNEQKGEKIPRCLPVCGKPVNPVEQRQRIIGGQKAKMGNFPWQVFTNIHGRGGGALLGDRWILTAAHTLYPKEHEAQSNASLDVFLGHTNVEELMKLGNHPIRRVSVHPDYRQDESYNFEGDIALLELENSVTLGPNLLPICLPDNDTFYDLGLMGYVSGFGVMEEKIAHDLRFVRLPVANPQACENWLRGKNRMDVFSQNMFCAGHPSLKQDACQGDSGGVFAVRDPNTDRWVATGIVSWGIGCSRGYGFYTKVLNYVDWIKKEMEEED

SEQ ID NO: 68817 - protein, 526 aa, Homo sapiens
MEGSSKAGRELGIGYEPGSSGVGAPLTPHKKMKKRKELNALIGLAGDSRRKKPKKGPSSHRLLRTEPPDSDSESSSEEEEEFGVVGNRSRFAKGDYLRCCKICYPLCGFVILAACVVACVGLVWMQVALKEDLDALKEKFRTMESNQKSSFQEIPKLNEELLSKQKQLEKIESGEMGLNKVWINITEMNKQISLLTSAVNHLKANVKSAADLISLPTTVEGLQKSVASIGNTLNSVHLAVEALQKTVDEHKKTMELLQSDMNQHFLKETPGSNQIIPSPSATSELDNKTHSENLKQDILYLHNSLEEVNSALVGYQRQNDLKLEGMNETVSNLTQRVNLIESDVVAMSKVEKKANLSFSMMGDRSATLKRQSLDQVTNRTDTVKIQSIKKEDSSNSQVSKLREKLQLISALTNKPESNRPPETADEEQVESFTSKPSALPKFSQFLGDPVEKAAQLRPISLPGVSSTEDLQDLFRKTGQDVDGKLTYQEIWTSLGSAMPEPESLRAFDSDGDGRYSFLELRVALGI

SEQ ID NO: 68818 - protein, 693 aa, Homo sapiens
MEVNCLTLKDLISPRQPRLDFAVEDGENAQKENIFVDRSRMAPKTPIKNEPIDLSKQKKFTPERNPITPVKFVDRQQAEPWTPTANLKMLISAASPDIRDREKKKGLFRPIENKDDAFTDSLQLDVVGDSAVDEFEKQRPSRKQKSLGLLCQKFLARYPSYPLSTEKTTISLDEVAVSLGVERRRIYDIVNVLESLHLVSRVAKNQYGWHGRHSLPKTLRNLQRLGEEQKYEEQMAYLQQKELDLIDYKFGERKKDGDPDSQEQQLLDFSEPDCPSSSANSRKDKSLRIMSQKFVMLFLVSKTKIVTLDVAAKILIEESQDAPDHSKFKTKVRRLYDIANVLTSLALIKKVHVTEERGRKPAFKWIGPVDFSSSDEELVDVSASVLPELKRETYGQIQVCAKQKLARHGSFNTVQASERIQRKVNSEPSSPYREEQGSGGYSLEIGSLAAVYRQKIEDNSQGKAFASKRVVPPSSSLDPVAPFPVLSVDPEYCVNPLAHPVFSVAQTDLQAFSMQNGLNGQVDVSLASAASAVESLKPALLAGQPLVYVPSASLFMLYGSLQEGPASGSGSERDDRSSEAPATVELSSAPSAQKRLCEERKPQEEDEPATKRQSREYEDGPLSLVMPKKPSDSTDLASPKTMGNRASIPLKDIHVNGQLPAAEEISGKATANSLVSSEWGNPSRNTDVEKPSK

SEQ ID NO: 68819 - protein, 224 aa, Homo sapiens
MLKMGFQQQVLDILENIPNDCQTILVSATIPTSIEQLASQLLHNPVRIITGEKNLPCANVRQIILWVEDPAKKKKLFEILNDKKLFKPPVLVFVDCKLGADLLSEAVQKITGLKSISIHSEKSQIERKNILKGLLEGDYEVVVSTGVLGRGLDLISVRLVVNFDMPSSMDEYVHQIGRVGRLGQNGTAITFINNNSKRLFWDIAKRVKPTGSILPPQLLNSPYL

SEQ ID NO: 68820 - protein, 136 aa, Homo sapiens
MNKPSDGRPKYLVVNADEGEPGTCKDREILRHDPHKLLEGCLVGGRAMGARAAYIYIRGEFYNEASNLQVAIREAYEAGLIGKNACGSGYDFDVFVVRGAGAYICGEETALIESIEGKQGKPRLKPPFPADVGKAW

SEQ ID NO: 68821 - protein, 75 aa, Homo sapiens
MDKNELVQKAKLAEQAERYDDMAACMKSVTEQGAELSNEERNLLSVAYKNVVGARRSSWRVVSSIEQKTEGAEKK

SEQ ID NO: 68822 - protein, 116 aa, Homo sapiens
MAAVVAATRWWQLLLVLSAAGMGASGAPQPPNILLLLMDDESLPPPRAAGSPRWAPVLPDGCLCPLENAERSDCFPEHALQRPGVRVLTAVAGPFSALSGISLLKILCFRISSFHF

SEQ ID NO: 68823 - protein, 246 aa, Homo sapiens
MATGTRYAGKVVVVTGGGRGIGAGIVRAFVNSGARVVICDKDESGGRALEQELPGAVFILCDVTQEDDVKDISFLLRPWFLRPSADLAAWIVLSTTLATLALPYLRKSQGNVINISSLVGAIGQAQAVPYVATKGAVTAMTKALALDESPYGVRVNCISPGNIWTPLWEELAALMPDPRATIREGMLAQPLGRMGQPAEVGAAAVFLASEANFCTGIELLVTGGAELGYGCKASRSTPVDAPDIPS

SEQ ID NO: 68824 - protein, 161 aa, Homo sapiens
MTHEEHHAAKTLGIGKAIAVLTSGGDAQGMNAAVRAVVRVGIFTGARVFFVHEGYQGLVDGGDHIKEATWESVSMMLQLGGTVIGSARCKDFREREGRLRAAYNLVKRGITNLCVIGGDGSLTGADTFRSEWSDLLSDLQKAGKITDEEATKSSYLNIVGL

SEQ ID NO: 68825 - protein, 136 aa, Homo sapiens
MDTEGFGELLQQAEQLAAETEGISELPHVERNLQEIQQAGERLRSRTLTRTSQETADVKASVLLGSRGLDISHISQRLESLSAATTFEPLEPVKDTDIQGFLKNEKDNALLSAIEESRKRTFGMAEEYHRESMLVE

SEQ ID NO: 68826 - protein, 63 aa, Homo sapiens
MQIFVKTLTGKTITLEVEPSDTIENVKAKIQDKEGIPPDQQRLIFAGKQLEDGRTLSDYNIQK

SEQ ID NO: 68827 - protein, 74 aa, Homo sapiens
MAALKSWLSRSVTSFFRYRCGRVEGTGPEGGTDADSAVARPTAPAFLTRSSLVRPAGSRRLAPVQTVFVCSCCG

SEQ ID NO: 68828 - protein, 38 aa, Homo sapiens
MPVMPIPRRVRSFHGPHTTCLHAACGPVRASHLARTKY

SEQ ID NO: 68829 - protein, 204 aa, Homo sapiens
MGLLVFVRNLLLALCLFLVLGFLYYSAWKLHLLQWEEDSSKYSHSSSPQEKPVADSVVLSFDSAGQTLGSEYDRLGFLLNLDSKLPAELATKYANFSEGACKPGYASALMTAIFPRFSKPAPMFLDDSFRKWARIREFVPPFGIKGQDNLIKAILSVTKEYRLTPALDSLRCRRCIIVGNGGVLANKSLGSRIDDYDIVVRPRL

SEQ ID NO: 68830 - protein, 150 aa, Homo sapiens
  MOD_RES (1)..(1): Any amino acid
XAQPEHKQQKLWHLFQNSATAVAQLYKDRVCQQPGLSLWVPFQNAATAVTNLYKESVDTHQRSFDIGIQIGYQRRNKDVLAWVKKRRRTIRREDLISFLCGKVPPPRNSRAPPRLTVVSPNRATSTETSSSVETDLQPFREAIALHGKAV

SEQ ID NO: 68831 - protein, 184 aa, Homo sapiens
MALVRDRRAHYVMSIVIRWVHCFSSSLRGTFGTRWEAMKAKATELRVCCARRKREAREFKPPQMRGSTRLNISDDLKIGFFSTDHATQTDSSEILSVKELSSSTQKLAQMMKSLQVDFGFLKQLLQLKFEDRLKEESLSLFTILHDRILEIEKHYQQNEDKMRKSFNQQLADAIAVIKGMYQPL

SEQ ID NO: 68832 - protein, 47 aa, Homo sapiens
MSFFPELYFNVDNGYLEGLVRGLKAGVLSQADYLNLVQCETLEVTVT

SEQ ID NO: 68833 - protein, 186 aa, Homo sapiens
RTNPEDIYPSNPTDDDVSSGSSSERSSTSGGYIFYTFSTVHPIPDEDSPWITDSTDRIPATSTSSNTISAGWEPNEENEDERDRHLSFSGSGIDDDEDFISSTRDQDTFHPSGGSHTTHGSESDGHSHGSQEGGANTTSGPIRTPQIPEWLIILASLLALALILAVCIAVNSRRRCGQKKKLVINS

SEQ ID NO: 68834 - protein, 176 aa, Homo sapiens
MRDVTISKSEYAPSEKMITKVQDFQEDKELFRYCTLPEILKYVECFTGPNIMAMHTMLINKPPDSGKKTSRHPLHQDLHYFPFRPSDLIVCAWTAMEHISRNNGCLVVLPGTHKGSLKPHDYPKWEGGVNKMFHGIQDYEENKARVHLVMEKGDTVFFHPLLIHGSGQNKTQGFRK

SEQ ID NO: 68835 - protein, 113 aa, Homo sapiens
MDVLVSECSARLLQQEEEIKSLTAEIDRLKNCGCLGASPNLEQLQEENLKLKYRLNILRKSLQAERNKPTKNMINIISRLQEVFGHAIKAAYPDLENPPLLVTPNAQNQGTES

SEQ ID NO: 68836 - protein, 239 aa, Homo sapiens
MAASCPLPVTPDLPTLRAKLQGLLQFLRDALSISNAHTVDFYTESVWEELVDLPPETVLAALRKSASETEALPSETRPLVEAEWEAGMTDFPKIFCETSQKLVSVEAFALAAKYYSVQNLGICTPFEQLLVALRGNQNQRIGENQKAVEFMNMKKSHEVQAMSELISSIADYYGIKQVIDLGSGKGYLSSFLSLKYGLKVYGIDSSNTNTHGAEERNRKLKKHWKLCHAQSRLDVNGLA

SEQ ID NO: 68837 - protein, 86 aa, Homo sapiens
MKFFLLLFTIGFCWAQYSPNTQQGRTSIVHLFEWRWVDIALECERYLAPKGFGGVQVSPPNENVAIHNPFRPWWERYQPVSYKLCT

SEQ ID NO: 68838 - protein, 64 aa, Homo sapiens
  MOD_RES (1)..(1): Any amino acid
XGRENRMPILISKIFPGLAADQSRALRLGDAILSVNGTDLRQATHDQAVQALKRAGKEVLLEGL

SEQ ID NO: 68839 - protein, 51 aa, Homo sapiens
  MOD_RES (1)..(1): Any amino acid
XSPEVILGHPYDVAIDMWSLGCITAELYTGYPLFPGENEVEQLACIMELTN

SEQ ID NO: 68840 - protein, 393 aa, Homo sapiens
MDRMKKIKRQLSMTLRGGRGIDKTNGAPEQIGLDESGGGGGSDPGEAPTRAAPGELRSARGPLSSAPEIVHEDLKMGSDGESDQASATSSDEVQSPVRVRMRNHPPRKISTEDINKRLSLPADIRLPEGYLEKLTLNSPIFDKPLSRRLRRVSLSEIGFGKLETYIKLDKLGEGTYATVYKGKSKLTDNLVALKEIRLEHEEGAPCTAIREVSLLKDLKHANIVTLHDIIHTEKSLTLVFEYLDKDLKQYLDDCGNIINMHNVKLFLFQLLRGLAYCHRQKVLHRDLKPQNLLINERGELKLADFGLARAKSIPTKTYSNEVVTLWYRPPDILLGSTDYSTQIDMWGVGCIFYEMATGRPLFPGSTVEEQLHFIFRILVFCAMKPCSQPFRDR

SEQ ID NO: 68841 - protein, 63 aa, Homo sapiens
HMAANMYVLWSFSSSIVNILGQEQFMAVYLSAGVISNFVSYVGKVATGRYGPSLGAMVCYLRS

SEQ ID NO: 68842 - protein, 1441 aa, Homo sapiens
MRAGVQTGDRIIKVNGTLVTHSNHLEVVKLIKSGSYVALTVQGRPPGSPQIPLADSEVEPSVIGHMSPIMTSPHSPGASGNMERITSPVLMGEENNVVHNQKVEILRKMLQKEQERLQLLQEDYNRTPAQRLLKEIQEAKKHIPQLQEQLSKATGSAQDGAVVTPSRPLGDTLTVSEAETDPGDVLGRTDCSSGDASRPSSDNADSPKSGPKERIYLEENPEKSETIQDTDTQSLVGSPSTRIAPHIIGAEDDDFGTEHEQINGQCSCFQSIELLKSRPAHLAVFLHHVVSQFDPATLLCYLYSDLYKHTNSKETRRIFLEFHQFFLDRSAHLKVSVPDEMSADLEKRRPELIPEDLHRHYIQTMQERVHPEVQRHLEDFRQKRSMGLTLAESELTKLDAERDKDRLTLEKERTCAEQIVAKIEEVLMTAQAVEEDKSSTMQYVILMYMKHLGVKVKEPRNLEHKRGRIGFLPKIKQSMKKDKEGEEKGKRRGFPSILGPPRRPSRHDNSAIGRAMELQKARHPKHLSTPSSVSPEPQDSAKLRQSGLANEGTDAGYLPANSMSSVASGASFSQEGGKENDTGSKQVGETSAPGDTLDGTPRTLNTVFDFPPPPLDQVQEEECEVERVTEHGTPKPFRKFDSVAFGESQSEDEQFENDLETDPPNWQQLVSREVLLGLKPCEIKRQEVINELFYTERAHVRTLKVLDQVFYQRVSREGILSPSELRKIFSNLEDILQLHIGLNEQMKAVRKRNETSVIDQIGEDLLTWFSGPGEEKLKHAAATFCSNQPFALEMIKSRQKKDSRFQTFVQDAESNPLCRRLQLKDIIPTQMQRLTKYPLLLDNIAKYTEWPTEREKVKKAADHCRQILNYVNQAVKEAENKQRLEDYQRRLDTSSLKLSEYPNVEELRNLDLTKRKMIHEGPLVWKVNRDKTIDLYTLLLEDILVLLQKQDDRLVLRCHSKILASTADSKHTFSPVIKLSTVLVRQVATDNKALFVISMSDNGAQIYELVAQTVSEKTVWQDLICRMAASVKEQSTKPIPLPQSTPGEGDNDEEDPSKLKEEQHGISVTGLQSPDRDLGLESTLISSKPQSHSLSTSGKSEVRDLFVAERQFAKEQHTDGTLKEVGEDYQIAIPDSHLPVSEERWALDALRNLGLLKQLLVQQLGLTEKSVQEDWQHFPRYRTASQGPQTDSVIQNSENIKAYHSGEGHMPFRTGTGDIATCYSPRTSTESFAPRDSVGLAPQDSQASNILVMDHMIMTPEMPTMEPEGGLDDSGEHFFDAREAHSDENPSEGDGAVNKEEKDVNLRISGNYLILDGYDPVQESSTDEEVASSLTLQPMTGIPAVESTHQQQHSPQNTHSDGAISPFTPEFLVQQRWGAMEYSCFEIQSPSSCADSQSQIMEYIHKIEADLEHLKKVEESYTILCQRLAGSALTDKHSDKS

SEQ ID NO: 68843 - protein, 93 aa, Homo sapiens
MTQEYDNKRPVLVLQNEALYPQRRSYTSEDEAWKSFLENPLTAATKAMMSINGDEDSAAALGLLYDYYKVPRERRSSTAKPEVEHPEPDHSKR

SEQ ID NO: 68844 - protein, 64 aa, Homo sapiens
MAMTAGTTTTFPMSNHTRERVTVAKLTLENFYSNLILQHEERETRQKKLEVAMEEEGLADEEVM

SEQ ID NO: 68845 - protein, 222 aa, Homo sapiens
MLDLEVVPERSLGNEQWEFTLGMPLAQAVAILQKHCRIIKNVQVLYSEQVIEVCDLTKVKLKYCGVHFNSQAIAPTIEQIDQSFGATHPGVYNSAEQLFHLNFRGLSFSFQLDSWTEAPKYEPNFAHGLASLQIPHGATVKRMYIYSGNSLQDTKAPMMPLSCFLGNVYAESVDVLRDGTGPAGLRLRLLAAGCGPGLLADAKMRVFERSVYFGDSCQDVLS

SEQ ID NO: 68846 - protein, 218 aa, Homo sapiens
MMGGSSAAAPGAGAWEAWERSGVGAYADLGQQARTLRGGFSGAALPWAARLSLVCASLFCEPSPSLGSLLATYGWYIVFSCILLYVVFQKLSARLRALRQRQLDRAAAAVEPDVVVKRQEALAAARLKMQEELNAQVEKHKEKLKQLEEEKRRQKIEMWDSMQEGKSYKGNAKKPQEEDSPGPSTSSVLKRKSDRKPLRGGGYNPLSGEGGGACSWRP

SEQ ID NO: 68847 - protein, 33 aa, Homo sapiens
  MOD_RES (1)..(1): Any amino acid
XQNTGALQECTAPLQCSFPCVKLTWTVSAQIAG

SEQ ID NO: 68848 - protein, 221 aa, Homo sapiens
  MOD_RES (1)..(1): Any amino acid
XASGTVFTATDVALGQEVAIKQINLQKQPKKELIINEILVMKELKNPNIVNFLDSYLVGDELFVVMEYLAGGSLTDVVTETCMDEAQIAAVCRECLQALEFLHANQVIHRDIKSDNVLLGMEGSVKLTDFGFCAQITPEQSKRSTMVGTPYWMAPEVVTRKAYGPKVDIWSLGIMAIEMVEGEPPYLNENPLRHPFLKLAKPLSSLTPLIMAAKEAMKSNR

SEQ ID NO: 68849 - protein, 388 aa, Homo sapiens
MKETRGYGGDAPFCTRLNHSYTGMWAPERSAEARGNLTRPPGSGEDCGSVSVAFPITMLLTGFVGNALAMLLVSRSYRRRESKRKKSFLLCIGWLALTDLVGQLLTTPVVIVVYLSKQRWEHIDPSGRLCTFFGLTMTVFGLSSLFIASAMAVERALAIRAPHWYASHMKTRATRAVLLGVWLAVLAFALLPVLGVGQYTVQWPGTWCFISTGRGGNGTSSSHNWGNLFFASAFAFLGLLALTVTFSCNLATIKALVSRCRAKATASQSSAQWGRITTETAIQLMGIMCVLSVCWSPLLIMMLKMIFNQTSVEHCKTHTEKQKECNFFLIAVRLASLNQILDPWVYLLLRKILLRKFCQVANAVSFSRRNFGEIKTCLSARITSLEAP

SEQ ID NO: 68850 - protein, 122 aa, Homo sapiens
MEMESAAASTRFHQPHMERKMSAMACEIFNELRLEGKLCDVVIKVNGFEFSAHKNILCSCSSYFRALFTSGWNNTEKKVYNIPGISPDMMKLIIEYAYTRTVPITPDNVEKLLAAADQFNIM

SEQ ID NO: 68851 - protein, 71 aa, Homo sapiens
EDVISSIRNFLIYVALLRVSECLPGCDCETSGELTDGHPLTLRGHRGLRTELNGSGEQGGCALKATGICAV

SEQ ID NO: 68852 - protein, 1129 aa, Homo sapiens
MARMLYPSKGQGLSGPTAENKDVFRRHSWGPGRELEGPLNTRRLQASGCPGPKEALFLQIREGLDTFLGLQHQGGYASRLDQDSCHPSAGPLDHSATGMLSKSVPVSGINCLLDRSDTDGNVSQSSAIDLRKRCSQLEGHSGTRVGSSLRQTFSFLSGMTGKAKTREKEKMKEAKDARYTNGHLFTTISVSGMTMCYACNKSITAKEALICPTCNVTIHNRCKDTLANCTKVKQKQQKAALLKNNTALQSVSLRSKTTIRERPSSAIYPSDSFRQSLLGSRRGRSSLSLAKSVSTTNIAGHFNDESPLGLRRILSQSTDSLNMRNRTLSVESLIDEAEVIYSELMSDFEMDEKDFAADSWSLAVDSSFLQQHKKEVMKQQDVIYELIQTELHHVRTLKIMTRLFRTGMLEELHLEPGVVQGLFPCVDELSDIHTRFLSQLLERRRQALCPGSTRNFVIHRLGDLLISQFSGPSAEQMCKTYSEFCSRHSKALKLYKELYARDKRFQQFIRKVTRPAVLKRHGVQECILLVTQRITKYPLLISRILQHSHGIEEERQDLTTALGLVKELLSNVDEGIYQLEKGARLQEIYNRMDPRAQTPVPGKGPFGREELLRRKLIHDGCLLWKTATGRFKDVLVLLMTDVLVFLQEKDQKYIFPTLDKPSVVSLQNLIVRDIANQEKGMFLISAAPPEMYEVHTASRDDRSTWIRVIQQSVRTCPSREDFPLIETEDEAYLRRIKMELQQKDRALVELLREKVGLFAEMTHFQAEEDGGSGMALPTLPRGLFRSESLESPRGERLLQDAIREVEGLKDLLVGPGVELLLTPREPALPLEPDSGGNTSPGVTANGEARTFNGSIELCRADSDSSQRDRNGNQLRSPQEEALQRLVNLYGLLHGLQAAVAQQDTLMEARFPEGPERREKLCRANSRDGEAGRAGAAPVAPEKQATELALLQRQHALLQEELRRCRRLGEERATEAGSLEARLRESEQARALLEREAEEARRQLAALGQTEPLPAEAPWARRPVDPRRRSLPAGDALYLSFNPPQPSRGTDRLDLPVTTRSVHRNFEDRERQELGSPEERLQDSSDPDTGSEEEGSSRLSPPHSPRDFTRMQDIPEETESRDGEAVASES

SEQ ID NO: 68853 - protein, 363 aa, Homo sapiens
MKTLLLLLLVLLELGEAQGSLHRVPLRRHPSLKKKLRARSQLSEFWKSHNLDMIQFTESCSMDQSAKEPLINYLDMEYFGTISIGSPPQNFTVIFDTGSSNLWVPSVYCTSPACKTHSRFQPSQSSTYSQPGQSFSIQYGTGSLSGIIGADQVSVEGLTVVGQQFGESVTEPGQTFVDAEFDGILGLGYPSLAVGGVTPVFDNMMAQNLVDLPMFSVYMSSNPEGGAGSELIFGGYDHSHFSGSLNWVPVTKQAYWQIALDNIQVGGTVMFCSEGCQAIVDTGTSLITGPSDKIKQLQNAIGAAPVDGEDFVDGMQFCSSGFQGLDIHPPAGPLWILGDVFIRQFYSVFDRGNNRVGLAPAVP

SEQ ID NO: 68854 - protein, 142 aa, Homo sapiens
MYHSLSETRHPLQPEEQEVGIDPLSSYSNKSGGDSNKNGRRTSSTLDSEGTFNSYRKEWEELFVNNNYLATIRQKGINGQLRSSRFRSICWKLFLCVLPQDKSQWISRIEELRAWYSNIKEIHITNPRKVVGQQDLMINNPL

SEQ ID NO: 68855 - protein, 107 aa, Homo sapiens
MSSPQAPEDGQGCGDRGDPPGDLRSVLVTTVLNLEPLDEDLFRGPEAASTVPSGADTNRVELLGALCEGRATWEAHLHLPGLLPAGPAQPHAAPVLHAHCATTRRAA

SEQ ID NO: 68856 - protein, 101 aa, Homo sapiens
MQIPKHISIEDITATSTSTTGTSHLVKCAEKEKTFCVNGGECFMVKDLSNPSRYLCKCPNEFTGDRCQNYVMASFYKHLGIEFMEAEELYQKRVLTITGIC

SEQ ID NO: 68857 - protein, 196 aa, Homo sapiens
MMGDEGSAYWIAHQAVKIVFDSIDNLEAAPHDIGYVKQAMFHYFQVPDRLGILTHLYRDFDKCRFAGFCRKIAEGAQQGDPLSRYIFRKAGEMLGRHIVAVLPEIDPVLFQGKIGLPILCVGSVWKSWELLKEGFLLALTQGREIQAQNFFSSFTLMKLRHSSALGGASLGARHIGHLLPMDYSANAIAFYSYTFS

SEQ ID NO: 68858 - protein, 703 aa, Homo sapiens
MQSAKYFNYTVKVLGQGEEWRGGDGINSIGGGQKVRLMKEVMEHYADQDDLVVMFTECFDVIFAGGPEEVLKKFQKANHKVVFAADGILWPDKRLADKYPVVHIGKRYLNSGGFIGYAPYVNRIVQQWNLQDNDDDQLFYTKVYIDPLKREAINITLDHKCKIFQTLNGAVDEVVLKFENGKARAKNTFYETLPVAINGNGPTKILLNYFGNYVPNSWTQDNGCTLCEFDTVDLSAVDVHPNVSIGVFIEQPTPFLPRFLDILLTLDYPKEALKLFIHNKEVYHEKDIKVFFDKAKHEIKTIKIVGPEENLSQAEARNMGMDFCRQDEKCDYYFSVDADVVLTNPRTLKILIEQNRKIIAPLVTRHGKLWSNFWGALSPDGYYARSEDYVDIVQGNRVGVWNVPYMANVYLIKGKTLRSEMNERNYFVRDKLDPDMALCRNAREMTLQREKDSPTPETFQMLSPPKGVFMYISNRHEFGRLLSTANYNTSHYNNDLWQIFENPVDWKEKYINRDYSKIFTENIVEQPCPDVFWFPIFSEKACDELVEEMEHYGKWSGGKHHDSRISGGYENVPTDDIHMKQVDLENVWLHFIREFIAPVTLKVFAGYYTKGFALLNFVVKYSPERQRSLRPHHDASTFTINIALNNVGEDFQGGGCKFLRYNCSIESPRKGWSFMHPGRLTHLHEGLPVKNGTRYIAVSFIDP

SEQ ID NO: 68859 - protein, 196 aa, Homo sapiens
  MOD_RES (1)..(1): Any amino acid
XGAVHKPYNCSHCGKSFSRPDHLNSHVRQVHSTERPFKCEKCEAAFATKDRLRAHTVRHEEKVPCHVCGKMLSSAYISDHMKVHSQGPHHVCELCNKGTGEVCPMAAAAAAAAAAAAAAVAAPPTAVGSLSGAEGVPVSSQPLPSQPCSSPGLVFSSLFPTTEEVVALAMSSCSCVPCMYPTLHPFLLRGPHYNKF

SEQ ID NO: 68860 - protein, 106 aa, Homo sapiens
MVGEGPYLISDLDQRGRRRSFAERYDPSLKTMIPVRPCARLAPNPVDDAGLLSFATFSWLTPVMVKGYRQRLTVDTLPPLSTYDSSDTNAKRFRVLWDEEVARVGP

SEQ ID NO: 68861 - protein, 358 aa, Homo sapiens
MAQPYPPAQYPPPPQNGIPAEYAPPPPHPTQDYSGQTPVPTEHGMTLYTPAQTHPEQPGSEASTQPIAGTQTVPTDEAAQTDSQPLHPSDPTEKQQPKRLHVSNIPFRFRDPDLRQMFGQFGKILDVEIIFNERGSKGFGFVTFETSSDADRAREKLNGTIVEGRKIEVNNATARVMTNKKTGNPYTNGWKLNPVVGAVYGPEFYAVTGFPYPTTGTAVAYRGAHLRGRGRAVYNTFRAAPPPPPIPTYGAALEQTLVKMPVPWAGLAPCPLPPQQTPEPAYPTSPAFPPLSCPFASRVVYQDGFYGAEIYGGYAAYRYAQPAAAAAAYSDSYGRVYAAADPYHHTIGPAATYSIGTM

SEQ ID NO: 68862 - protein, 113 aa, Homo sapiens
MAAAALRDPAQGYVTFEDVAVYFSQEEWRLLDDAQRLLYRNVMLENFTLLASLGKVLTPHPSILSWARLFLLFLGRGLFFPKLNCGHSFLLQYPEVAIVIGLGCVYYHLLSPS

SEQ ID NO: 68863 - protein, 913 aa, Homo sapiens
MPTAAAPIISSVQKLVLYETRARYFLVGSNNAETKYRVLKIDRTEPKDLVIIDDRHVYTQQEVRELLGRLDLGNRTKMGQKGSSGLFRAVSAFGVVGFVRFLEGYYIVLITKRRKMADIGGHAIYKVEDTNMIYIPNDSVRVTHPDEARYLRIFQNVDLSSNFYFSFNSVLSYSYDLSHSLQYNLTVLRMPLEMLKSEMTQNRQESFDIFEDEGLITQGGSGVFGICSEPYMKYVWNGELLDIIKSTVHRDWLLYIIHGFCGQSKLLIYGRPVYVTLIARRSSKFAGTRFLKRGANCEGDVANEVETEQILCDASVMSFTAGSYSSYVQVRGSVPLYWSQDISTMMPKPPITLDQADPFAHVAALHFDQMFQRFGSPIIILNLVKEREKRKHERILSEELVAAVTYLNQFLPPEHTIVYIPWDMAKYTKSKLCNVLDRLNVIAESVVKKTGFFVNRPDSYCSILRPDEKWNELGGCVIPTGRLQTGILRTNCVDCLDRTNTAQFMVGKCALAYQLYSLGLIDKPNLQFDTDAVRLFEELYEDHGDTLSLQYGGSQLVHRVKTYRKIAPWTQHSKDIMQTLSRYYSNAFSDADRQDSINLFLGVFHPTEGKPHLWELPTDFYLHHKNTMRLLPTRRSYTYWWTPEVIKHLPLPYDEVICAVNLKKLIVKKFHKYEEEIDIHNEFFRPYELSSFDDTFCLAMTSSARDFMPKTVGIDPSPFTVRKPDETGKSVLGNKSNREEAVLQRKTAASAPPPPSEEAVSSSSEDDSGTDREEEGSVSQRSTPVKMTDAGDSAKVTENVVQPMKELYGINLSDGLSEEDFSIYSRFVQLGQSQHKQDKNSQQPCSRCSDGVIKLTPISAFSQDNIYEVQPPRVDRKSTEIFQAHIQASQGIMQPLGKEDSSMYREYIRNRYL

SEQ ID NO: 68864 - protein, 125 aa, Homo sapiens
  MOD_RES (1)..(1): Any amino acid
XEAQSVILRRYFLELTQSFIIPLERYVASLMPLQKSISPWKSPPQLRQFLPEEFMKTLEKTGPQLTSRIKGDWIGLYRHFLKSPNFDGWFKTRRKEMTQKLEALHLEALCEEVRKLCVCVMINNC

SEQ ID NO: 68865 - protein, 240 aa, Homo sapiens
MATELEYESVLCVKPDVSVYRIPPRASNRGYRASDWKLDQPDWTGRLRITSKGKTAYIKLEDKVSGELFAQAPVEQYPGIAVETVTDSSRYFVIRIQDGTGRSAFIGIGFTDRGDAFDFNVSLQDHFKWVKQESEISKESQEMDARPKLDLGFKEGQTIKLCIGNITNKKGGASKPRTARGGGLSLLPPPPGGKVTIPPPSSSVAISNHVTPPPIPKSNHGGSDADLDSPAPVTTPAPTP

SEQ ID NO: 68866 - protein, 78 aa, Homo sapiens
MTSYMAIDGSALVPLRQKPRRKTQGFLTMSRRRISCKDLGHADCQGWLYKKKEKGSFLSNKWKKFWVILKGSSLYWYS

SEQ ID NO: 68867 - protein, 94 aa, Homo sapiens
  MOD_RES (1)..(1): Any amino acid
XEMNQSDSKEVDSSEESSQDSSENSSESEDEDDSIPSEVTIDNIKLPNSEGGKVETGFHRVSQDGLNLLTSCSTLLDLPKCWDYRHEPPCPAGN

SEQ ID NO: 68868 - protein, 319 aa, Homo sapiens
MGLEKLHPFDAGKWGKVINFLKEEKLLSDSMLVEAREASEEDLLVVHTRRYLNELKWSFAVATITEIPPVIFLPNFLVQRKVLRPLRTQTGGTIMAGKLAVERGWAINVGGGFHHCSSDRGGGFCAYADITLAIKFLFERVEGISRATIIDLDAHQGNGHERDFMDDKRVYIMDVYNRHIYPGDRFAKQAIRRKVELEWGTEDDEYLDKVERNIKKSLQEHLPDVVVYNAGTDILEGDRLGGLSISPAGIVKRDELVFRMVRGRRVPILMVTSGGYQKRTARIIADSILNLFGLGLIGPESPSVSAQNSDTPLLPPAVP

SEQ ID NO: 68869 - protein, 78 aa, Homo sapiens
MASYFDEHDCEPSDPEQETRTNMLLELARSLFNRMDFEDLGLVVDWDHHLPPPAAKTVVENLPRTVIRGSQAGGGDCH

SEQ ID NO: 68870 - protein, 349 aa, Homo sapiens
MAVFVVLLALVAGVLGNEFSILKSPGSVVFRNGNWPIPGERIPDVAALSMGFSVKEDLSWPGLAVGNLFHRPRATVMVMVKGVNKLALPPGSVISYPLENAVPFSLDSVANSIHSLFSEETPVVLQLAPSEERVYMVGKANSVFEDLSVTLRQLRNRLFQENSVLSSLPLNSLSRNNEVDLLFLSELQVLHDISSLLSRHKHLAKDHSPDLYSLELAGLDEIGKRYGEDSEQFRDASKILVDALQKFADDMYSLYGGNAVVELVTVKSFDTSLIRKTRTILEAKQANPASPYNLAYKYNFEYSVVFNMVLWIMIALALAVIITSYNIWNMDPGYDSIIYRMTNQKIRMD

SEQ ID NO: 68871 - protein, 247 aa, Homo sapiens
MLSDGCGSEEKISVPSCYGGIGAPVSRQVPASHDSELMAFMTRKLWDLEQQVKAQTDEILSKDQKIAALEDLVQTLRPHPAEATLQRQEELETMCVQLQRQVREMERFLSDYGLQWVGEPMDQEDSESKTVSEHGERDWMTAKKFWKPGDSLAPPEVDFDRLLASLQDLSELVVEGDTQVTPVPGGARLRTLEPIPLKLYRNGIMMFDGPFQPFYDPSTQRCLRDILDGFFPSELQRLYPNGVPFKV

SEQ ID NO: 68872 - protein, 61 aa, Homo sapiens
MWNFRELSENSQQAANVLSGACGLQRGDRVAVVLPRVPEWWLVILGCIRAGLIFMPGTIQM

SEQ ID NO: 68873 - protein, 82 aa, Homo sapiens
MDLKDTGAKKCTQGLRRPFGVAVMDITDIIKGKAESDEEKQHFIPFHPVTAENDFLHSLLGKVIASKGDSGGQGLWVTMKML

SEQ ID NO: 68874 - protein, 64 aa, Homo sapiens
MTEAEVRGLCIKSREIFLSQPILLELEAPLKICGIQEQLSGSSGSGSLTRLQLRRDLGLQSSEG

SEQ ID NO: 68875 - protein, 93 aa, Homo sapiens
MAAVAGSGAAAAPSSLLLVVGSEFGSPGLLTYVLEELERGIRSWDVDPGVCNLDEQLKVFVSRHSATFSSIVKDEEIGIEGGRGREISEEGVF

SEQ ID NO: 68876 - protein, 430 aa, Homo sapiens
MEWKLEQSMREQALLKAQLTQLKESLKEVQLERDEYAEHLKGERARWQQRMRKMSQEVCSLKKEKKHDKYRVEKLERSLSKLKHQMAEPLPPEPPAVPSEVELQHLRKELERVAGELQAQVEYNQRISLLNEGQKERLREQEERLQEQQERLPEQEERLQQLAEPQNSFKELNNENKSVLQLEQQVKELQEKLGKERLEAASQQNQQLTAQLSLMALPGEGDGGGHLDSEGEEAPRPIPSIPQDLESREAMSGFMDHLEEKADLSELVEKEELGFFQYYRERCHQKVYHPITKPGGSAKDAAPGGGHHQAGPGQGGDEGEAAGAAGDGVAAGGDYKGHSKFLVTAQNPAHEPSPGAPAPQELGAAHKHGDLCEVSLTDSVEPVQGEAREGSPHDNPTAQPIVQDHQEHPGLGSNCCVPFFCWAWLPRRRR

SEQ ID NO: 68877 - protein, 251 aa, Homo sapiens
MKIPWGSIPVLMLLLLLGLIDISQAQLSCTGPPAIPGIPGIPGTPGPDGQPGTPGIKGEKGLPGLAGDHGEFGEKGDPGIPGNPGKVGPKGPMGPKGGPGAPGAPGPKGESGDYKATQKIAFSATRTINVPLRRDQTIRFDHVITNMNNNYEPRSGKFTCKVPGLYYFTYHASSRGNLCVNLMRGRERAQKVVTFCDYAYNTFQVTTGGMVLKLEQGENVFLQATDKNSLLGMEGANSIFSGFLLFPDMEA

SEQ ID NO: 68878 - protein, 586 aa, Homo sapiens
MLAFAARTVVKPLGFLKPFSLMKASSRFKAHQDALPRLPVPPLQQSLDHYLKALQPILSEWWLKTAYLQYRQPVVIYSSPGVMLPKQDFVDLQGQLRFAAKLIEGVLDFKVMIDNETLPVEYLGGKPLCMNQYYQILSSCRVPGPKQDTVSNFSKTKKPPTHITVVHNYQFFELDVYHSDGTPLTADQIFVQLEKIWNSSLQTNKEPVGILTSNHRNSWAKAYNTLIKDKVNRDSVRSIQKSIFTVCLDATMPRVSEDVYRSHVAGQMLHGGGSRLNSGNRWFDKTLQFIVAEDGSCGLVYEHAAAEGPPIVTLLDYVIEYTKKPELVRSPLVPLPMPKKLRFNITPEIKSDIEKAKQNLSIMIQDLDITVMVFHHFGKDFPKSEKLSPDAFIQMALQLAYYRIYGQACATYESASLRMFHLGRTDTIRSASMDSLTFVKAMDDSSVTEHQKVELLRKAVQAHRGYTDRAIRGEAFDRHLLGLKLQAIEDLVSMPDIFMDTSYAIAMHFHLSTSQVPAKTDCVMFFGPVVPDGYGVCYNPMEAHINFSLSAYNSCAETNAARLAHYLEKALLDMRALLQSHPRAKL

SEQ ID NO: 68879 - protein, 891 aa, Homo sapiens
MALVENVTTLQKSQDLLEAEGEKKTMIKKIMRQIQEEPLDSLSSSVRKQAMEILTQLSHTQPTLGMRERSELVNVCVHSVFSLPSVQAMQEKDEAKAETIQALYHQTLEALQTLLKALFIEDPTPAGLKSILEALGPWMNSGKAHERARAVNTNVSVLNHMLLTLPFFMPLGFPALGLLLGRLILHIGDPDEEIGCEALDGIIILYTILELQKRARDKEETNKKELYESNKHFLGPYNPVSPCQNILRVIEEFGDFLGPQQIKDLLLAALEGLKGSSEAPGKDSREMMQLASEVMLSSVLEWYRHRALEVIPEIMQGIYMQLSHIQEPRARQVALLPVSLLASSFMTEVVVALLMCPLPLNSNGAEMWRQLILCKPSCDVRDLLDLLLGSLKEKPVTKEGRASIVPLAAASGLCELLSVNSCMGRVRRIYPQLLLALLIQVHYHIGLNLPGCVAPPKDTKKGAQPSPFVPVRWVVKVVKTLLLRMGCSYETTFLEDQGGWELMEQVESHHRGVALLARAMVQYSCQELCRILYLLIPLLERGDEKHRITATAFFVELLQMEQVRRIPEEYSLGRMAEGLSHHDPIMKVLSIRGLVILARRSEKTAKVKALLPSMVKGLKNMDGMLVVEAVHNLKAVFKGRDQKLMDSAVYVEMLQILLPHFSDAREVVRSSCINLYGKVVQKLRAPRTQAMEEQLVSTLVPLLLTMQEGNSKVSQKCVKTLLRCSYFMAWELPKRAYSRKPWDNQQQTVAKICKCLVNTHRDSAFIFLSQSLEYAKNSRASLRKCSVMFIGSLVPCMESIMTEDRLNEVKAALDNLRHDPEASVCIYAAQVQDHILASCWQNSWLPHGNSWVCYSATTHRWSPSCENLPTSHQRRSWIMQALGSWKMSLKK

SEQ ID NO: 68880 - protein, 553 aa, Homo sapiens
MKLILWYLVVALWCFFKDVEALLYRQKSDGKIAASRSGGFSYGSSSSGDLDRKKPLFSLEFGSPGETEDKSRQRQDAGSPKSEDTPAGGFFNSSSSSGDSDRTKPFFSLGLGAPGKAEDKSGDSQDAGGSKSEDTPPGGFFYGSSSSGDSDKKKPLFSFEFGATGEDEDKSRERWDAGNSRSEDSPADSTNTRYGAGFSSSGASLDVGFGWGISDEKGLEVSKADGRETRGSGSAGGETIVFGPDAGSSVGTGSSGLKLGAGKGDAAFGFEVSDSNSFGDTGISSKTVEGNQTSSSGGSVSIDLGDTSFRSENQFVGGGSLNSISNLWDSGQEGFGINEIGGNGMSGSVSAEAGFKGFGSDSSSSGDSSARNGFENSSGISEDSGVILGSSDQHEVELSRTGGNRKRSSDPDEAGNLSPGSDVSDSGGNTWSSDSGSGGGGVTSSSEYSTSGPLNTPEKGSHIPEATPKYSETNAIIGEISTWSKGAYKSFNGRIFFFESSCPYTFCRHCIESGGDFNIEIKRNNDSEIEKITVLIDNNDVSIFGDTILVNGE

SEQ ID NO: 68881 - protein, 141 aa, Homo sapiens
MPPMPSAPPVHPPPDGGWGWIVVGAAFISIGFSYAFPKAVTVFFKEIQQIFHTTYSEIAWISSIMLAVMYAGGRIFESFLIFTSLRIQCSFTQSGSCLAAVHNDSSDESGKRRWKIFWKGFAILDNITIIHCYGRRSKYQH

SEQ ID NO: 68882 - protein, 46 aa, Homo sapiens
MLTCNKAGSRMVVDAANSNGPFQPVVLLHIRGTVPTCSVAQPQSSC

SEQ ID NO: 68883 - protein, 138 aa, Homo sapiens
MSVDMNSQGSDSNEEDYDPNCEEEEEEEEDDPGDIEDYYVGVASDVEQQGADAFDPEEYQFTCLTYKESEGALNEHMTSLASVLKVSHSVAKLILVNFHWQVSEILDRYKSNSAQLLVEARVQPNPSKHVPTSHPPHH

SEQ ID NO: 68884 - protein, 247 aa, Homo sapiens
MASAELDYTIEIPDQPCWSQKNSPSPGGKEAETRQPVVILLGWGGCKDKNLAKYSAIYHKRKLLELLFDYEIEKEPLLFHVFSNGGVMLYRYVLELLQTRRFCRLRVVGTIFDSAPGDSNLVGALRALAAILERRAAMLRLLLLVAFALVVVLFHVLLAPITALFHTHFYDRLQDAGSRWPELYLYSRADEVVLARDIERMVEARLARRVLARSVDFVSSAHVSHLRDYPTYYTSLCVDFMRNCVRC

SEQ ID NO: 68885 - protein, 36 aa, Homo sapiens
  MOD_RES (1)..(1): Any amino acid
XMDFTDIIKFFNERAEHHDAQEILRIARDLVHKVLP

SEQ ID NO: 68886 - protein, 67 aa, Homo sapiens
MEPSSWSGSESPAENMERMSDSADKPIDNDAEGVWSPDIEQSFQEALAIYPPCGRRKIILSDEGKMY

SEQ ID NO: 68887 - protein, 217 aa, Homo sapiens
MLRRPLAGLAAAALGRAPPDGMSGPRPVVLSGPSGAGKSTLLKRLLQEHSGIFGFSVSHTTRNPRPGEENGKDYYFVTREVMQRDIAAGDFIEHAEFSGNLYGTSKVAVQAVQAMNRICVLDVDLQGVRNIKATDLRPIYISVQPPSLHVLEQRLRQRNTETEESLVKRLAAAQADMESSKEPGLFDVVIINDSLDQAYAELKEALSEEIKKAQRTG

SEQ ID NO: 68888 - protein, 158 aa, Homo sapiens
RWGRLGGAERPSFLRAAGVLGWILIAVVIIILLIFTSVTRCLSPVSFLQLKFWKIYLEQEQQILKSKATEHATELAKENIKCFFEGSHPKEYNTPSMKEWQQISSLYTFNPKGQYYSMLHKYVNRKEKTHSIRSTEGDTVIPVLGFVDSSGINSTPEL

SEQ ID NO: 68889 - protein, 749 aa, Homo sapiens
MATGGGPFEDGMNDQDLPNWSNENVDDRLNNMDWGAQQKKANRSSEKNKKKFGVESDKRVTNDISPESSPGVGRRRTKTPHTFPHSRYMSQMSVPEQAELEKLKQRINFSDLDQRSIGSDSQGRATAANNKRQLSENRKPFNFLPMQINTNKSKDASTNPPNRETIGSAQCKELFASALSNDLLQNCQVSEEDGRGEPAMESSQIVSRLVQIRDYITKASSMREDLVEKNERSANVERLTHLIDHLKEQEKSYMKFLKKILARENEEEDVRTIDSAVGSGSVAESTSLNIDVQSEASDTTARDPQQEPMEEIENLKKQHDLLKRMLQQQEQLRALQGRQAALLALQHKAEQAIAVMDDSVVAETAGSLSGVSITSELNEELNDLIQRFHNQLRDSQPPAVPDNRRQAESLSLTREVSQSRKPSASERLPDEKVELFSKMRVLQEKKQKMDKLLGELHTLRDQHLNNSSSSPQRSVDQRSTSAPSASVGLAPVVNGESNSLTSSVPYPTASLVSQNESENEGHLNPSEKLQKLNEVRKRLNELRELVHYYEQTSDMMTDAVNENRKDEETEESEYDSEHENSEPVTNIRNPQVASTWNEVNSHSNAQCVSNNRDGRTVNSNCEINNRSAANIRALNMPPSLDCRYNREGEQEIHVAQGEDDEEEEEEAEEEGVSGASLSSHRSSLVDEHPEDAEFEQKINRLMAAKQKLRQLQDLVAMVQDDDAAQGVISASASNLDDFYPAEEDTKQNS

SEQ ID NO: 68890 - protein, 123 aa, Homo sapiens
  MOD_RES (1)..(1): Any amino acid
XLRLRAALTLLGEVPRRPASRGVPGSRRTQKGSGARWEKEKHEDGVKWRQLEHKGPYFAPPYEPLPDGVRFFYEGRPVRLSVAAEEVATFYGRMLDHEYTTKEVFRKNFFNDWRKVLCQTHML

SEQ ID NO: 68891 - protein, 1167 aa, Homo sapiens
  MOD_RES (1)..(1): Any amino acid
XEYASMVPSSQGNLSILSRQESSFFTLTIVPHGYTEVANIPVARPGRRLYNVRNPNASHSDSVLVQIDATEGNKVITLRSPLQIKNHFSIAFIIYKFVKNVKLLERIGIARPEEEFHVPLDSYRCQLFIQPAGILEHQYKESTTYISWKEELHRSREVRCMLQCPSVEVSFLPLIVNTVALPDELSYICTHGEDWDVAYIIHLYPSLTLRNLLPYSLRYLLEGTAETHELAEGSTADVLHSRISGEIMELVLVKYQGKNWNGHFRIRDTLPEFFPVCFSSDSTEVTTVDLSVHVRRIGSRMVLSVFSPYWLINKTTRVLQYRSEDIHVKHPADFRDIILFSFKKKNIFTKNKVQLKISTSAWSSSFSLDTVGSYGCVKCPANNMEYLVGVSIKMSSFNLSRIVTLTPFCTIANKSSLELEVGEIASDGSMPTNKWNYIASSECLPFWPESLSGKLCVRVVGCEGSSKPFFYNRQDNGTLLSLEDLNGGILVDVNTAEHSTVITFSDYHEGSAPALIMNHTPWDILTYKQSGSPEEMVLLPRQARLFAWADPTGTRKLTWTYAANVGEHDLLKDGCGQFPYDANIQIHWVSFLDGRQRVLLFTDDVALVSKALQAEEMEQADYEITLSLHSLGLSLVNNESKQEVSYIGITSSGVVWEVKPKQKWKPFSQKQIILLEQSYQKHQISRDHGWIKLDNNFEVNFDKDPMEMRLPIRSPIKRDFLSGIQIEFKQSSHQRSLRARLYWLQVDNQLPGAMFPVVFHPVAPPKSIALDSEPKPFIDVSVITRFNEYSKVLQFKYFMVLIQEMALKIDQGFLGAIIALFTPTTDPEAERRRTKLIQQDIDALNAELMETSMTDMSILSFFEHFHISPVKLHLSLSLGSGGEESDKEKQEMFAVHSVNLLLKSIGATLTDVDDLIFKLAYYEIRYQFYKRDQLIWSVVRHYSEQFLKQMYVLVLGLDVLGNPFGLIRGLSEGVEALFYEPFQGAVQGPEEFAEGLVIGVRSLFGHTVGGAAGVVSRITGSVGKGLAAITMDKEYQQKRREELSRQPRDFGDSLARGGKGFLRGVVGGVTGIITKPVEGAKKEGAAGFFKGIGKGLVGAVARPTGGIVDMASSTFQGIQRAAESTEEVSSLRPPRLIHEDGIIRPYDRQESEGSDLLEVNFVLHGHE

SEQ ID NO: 68892 - protein, 86 aa, Homo sapiens
MFVASERKMRAHQVLTFLLLFVITSVASENASTSRGCGLDLLPQYVSLCDLDAIWGIVVEAVAGAGALITLLLMLILLVRLPFIKE

SEQ ID NO: 68893 - protein, 746 aa, Homo sapiens [sequence omitted]

SEQ ID NO: 68894 - protein, 133 aa, Homo sapiens
MSKAHKPWPYRRRSQFSSRKYLKKEMNSFQQQPPPFGTVPPQMMFPPNWQGAEKDAAFLAKDFNFLTLNNQPPPGNRSQPRAMGPENNLYSQYEQKVRPCIDLIDSLRALGVEQDLALPAIAVIGDQSSGKSS

SEQ ID NO: 68895 - protein, 136 aa, Homo sapiens
MITVVYGPDLVNISHLNLVAFQEEVAKEWTNEVFSLATNLLAQNMSRDAFLEKAYTKLKLQVTPEGRIPLKNIYRLFSADRKRVETALEACSLPSSRNDSIPQEDFTPEVYRVFLNNLCPRPEIDNIFSEFGAKSK

SEQ ID NO: 68896 - protein, 137 aa, Homo sapiens
MEAVVFVFSLLDCCALIFLSVYFIITLSDLECDYINARSCCSKLNKWVIPELIGHTIVTVLLLMSLHWFIFLLNLPVATWNIYRYIMVPSGNMGVFDPTEIHNRGQLKSHMKEAMIKLGFHLLCFFMYLYSGSNCPC

SEQ ID NO: 68897 - protein, 56 aa, Homo sapiens
  MOD_RES (1)..(1): Any amino acid
XGYGGGGPGYSGGSRGYGSGGQGYGNQGSGYGGSGSYDSYNNGGGGGFGGGSGNKA

SEQ ID NO: 68898 - protein, 69 aa, Homo sapiens
MSGCGLFLRTTAAARACRGLVVSTANRRLLRTSPPVRAFAKELFLGKIKKWTPEKLTRKGKSQMKLWRN

SEQ ID NO: 68899 - protein, 1114 aa, Homo sapiens
MWLKPEEVLLKNALKLWLMERSNDYFVLQRRRGYGEEGGGGLTGLLVGTLDSVLDSTAKVAPFRILHQTPDSQVYLSIACGANREEITKHWDWLEQNIMKTLSVFDSNEDITNFVQGKIRGLIAEEGKHCFAKEDDPEKFREALLKFEKCFGLPEKEKLVTYYSCSYWKGRVPCQGWLYLSTNFLSFYSFLLGSEIKLIISWDEVSKLEKTSNVILTESIHVCSQGENHYFSMFLHINQTYLLMEQLANYAIRRLFDKETFDNDPVLYNPLQITKRGLENRAHSEQFNAFFRLPKGESLKEVHECFLWVPFSHFNTHGKMCISENYICFASQDGNQCSVIIPLREVLAIDKTNDSSKSVIISIKGKTAFRFHEVKDFEQLVAKLRLRCGAASTQYHDISTESTEPSDNFEVQSLTSQRECSKTVNTEALMTVFHPQNLETLNSKMLKEKMKEQSWKILFAECGRGVSMFRTKKTRDLVVRGIPETLRGELWMLFSGAVNDMATNPDYYTEVVEQSLGTCNLATEEIERDLRRSLPEHPAFQSDTGISALRRVLTAYAYRNPKIGYCQAMNILTSVLLLYAKEEEAFWLLVAVCERMLPDYFNRRIIGALVDQAVFEELIRDHLPQLTEHMTDMTFFSSVSLSWFLTLFISVLPIESAVNVVDCFFYDGIKAILQLGLAILDYNLDKLLTCKDDAEAVTALNRFFDNVTNKDSPLPSNVQQGSNVSDEKTSHTRVDITDLIRESNEKYGNIRYEDIHSMRCRNRLYVIQTLEETTKQNVLRVVSQDVKLSLQELDELYVIFKKELFLSCYWCLGCPVLKHHDPSLPYLEQYQIDCQQFRALYHLLSPWAHSANKDSLALWTFRLLDENSDCLINFKEFSSAIDIMYNGSFTEKLKLLFKLHIPPAYTEVKSKDASKGDELSKEELLYFSQLHVSKPANEKEAESAKHSPEKGKGKIDIQAYLSQWQDELFKKEENIKDLPRMNQSQFIQFSKTLYNLFHEDPEEESLYQAIAVVTSLLLRMEEVGRKLHSPTSSAKGFSGTVCGSGGPSEEKTGSHLEKDPCSFREEPQWSFAFEQILASLLNEPALVRFFEKPIDVKAKLENARISQLRSRTKM

SEQ ID NO: 68900 - protein, 263 aa, Homo sapiens
MPKRGKKGAVAEDGDELRTEPEAKKSKTAAKKNDKEAAGEGPALYEDPPDQKTSPSGKPATLKICSWNVDGLRAWIKKKGLDWVKEEAPDILCLQETKCSENKLPAELQELPGLSHQYWSAPSDKEGYSGVGLLSRQCPLKVSYGIGDEEHDQEGRVIVAEFDSFVLVTAYVPNAGRGLVRLEYRQRWDEAFRKFLKGLASRKPLVLCGDLNVAHEEIDLRNPKGNKKNAGFTPQERQGFGELLQAVPLADSFRHLYPNTPYA

SEQ ID NO: 68901 - protein, 167 aa, Homo sapiens
MEWDNGTGIQRNRTVCYDLSPPALATHYMPYGMALTVIGFLLPFAALLACYCLLACRLCRQDGPAEPVAQERRGKAARMAVVVAAAFAISFLPFHITKTAYLAVRSTPGVPCTVLEAFAAAYKGTRPFASANSVLDPILFYFTQKKFRRRPHELLQKLTAKWQRQGR

SEQ ID NO: 68902 - protein, 94 aa, Homo sapiens
MSDEDDLEDSEPDQDDSEKEEDEKETEEGEDYRKEGEEFPEEWLPTPLTEDMMKEGLSLLCKTGNGLAHAYVKLEVKERDLTDIYLLRSYIHLR

SEQ ID NO: 68903 - protein, 52 aa, Homo sapiens
MAYRRDEMWSEGRYEYERIPRERAPPRSHPSDESGYRWTRDDHSASRQPEYR

SEQ ID NO: 68904 - protein, 161 aa, Homo sapiens
MEPKASCPAAAPLMERKFHVLVGVTGSVAALKLPLLVSKLLDIPGLEVAVVTTERAKHFYSPQDIPVTLYSDADEWETCVMRAWDRSKPLLFCPAMNTAMWEHPITAQQVDQLKAFGYVEIPCVAKKLVCGDEGLGAMAEVGTIVDKVKEVLFQHSGFQQS

SEQ ID NO: 68905 - protein, 620 aa, Homo sapiens
MGGRPSSPLDKQQRQHLRGQVDTLLRNFLPCYRGQLAASVLRQISRELGPQEPTGSQLLRSKKLPRVREHRGPLTQLRGHPPRWQPIFCVLRGDGRLEWFSHKEEYENGGHCLGSTALTGYTLLTSQREYLRLLDALCPESLGDHTQEEPDSLLEVPVSFPLFLQHPFRRHLCFSAATREAQHAWRLALQGGIRLQGIVLQRSQAPAARAFLDAVRLYRQHQGHFGDDDVTLGSDAEVLTAVLMREQLPALRAQTLPGLRGAGRARAWAWTELLDAVHAAVLAGASAGLCAFQPEKDELLASLEKTIRPDVDQLLRQRARVAGRLRTDIRGPLESCLRREVDPQLPRVVQTLLRTVEASLEAVRTLLAQGMDRLSHRLRQSPSGTRLRREVYSFGEMPWDLALMQTCYREAERSRGRLGQLAAPFGFLGMQSLVFGAQDLAQQLMADAVATFLQLADQCLTTALNCDQAAQRLERVRGRVLKKFKSDSGLAQRRFIRGWGLCIFLPFVLSQLEPGCKKELPEFEGDVLAVGSQALTTEGIYEDVIRGCLLQRIDQELKKTLGANDVSCTLDGCLEVPWEQEGADEETEAEREGGACPRQPDSGAQIQPLCPPPSPGTFRS

SEQ ID NO: 68906 - protein, 629 aa, Homo sapiens
MFRLWLLLAGLCGLLASRPGFQNSLLQIVIPEKIQTNTNDSSEIEYEQISYIIPIDEKLYTVHLKQRYFLADNFMIYLYNQGSMNTYSSDIQTQCYYQGNIEGYPDSMVTLSTCSGLRGILQFENVSYGIEPLESAVEFQHVLYKLKNEDNDIAIFIDRSLKEQPMDDNIFISEKSEPAVPDLFPLYLEMHIVVDKTLYDYWGSDSMIVTNKVIEIVGLANSMFTQFKVTIVLSSLELWSDENKISTVGEADELLQKFLEWKQSYLNLRPHDIAYLLIYMDYPRYLGAVFPGTMCITRYSAGVALQCGPASCCDFRTCVLKDGAKCYKGLCCKDCQILQSGVECRPKAHPECDIAENCNGSSPECGPDITLINGLSCKNNKFICYDGDCHDLDARCESVFGKGSRNAPFACYEEIQSQSDRFGNCGRDRNNKYVFCGWRNLICGRLVCTYPTRKPFHQENGDVIYAFVRDSVCITVDYKLPRTVPDPLAVKNGSQCDIGRVCVNRECVESRIIKASAHVCSQQCSGHGVCDSRNKCHCSPGYKPPNCQIRSKGFSIFPEEDMGSIMERASGKTENTWLLGFLIALPILIVTTAIVLARKQLKKWFAKEEEFPSSESKSQDSTQTQSSSN

SEQ ID NO: 68907 - protein, 92 aa, Homo sapiens
MVLPQGLLTFRDVAIEFSQEEWKCLDPAQRTLYRDVMLENYRNLVSLDGVFALVAQAGVQWHNLGSPPPPPPGFKRFSRLSLRSCWNYRYFF

SEQ ID NO: 68908 - protein, 114 aa, Homo sapiens
  MOD_RES (1)..(1): Any amino acid
XYGNVVELRINSGGKLPNFGFVVFDDSEPVQKVLSNRPFPQRNVLHITDIWYVSFIGIFLIFYVFEKPVRNTGFDNILKAGKTQIVSSLRVMTTFWCGEIAIGKFDNFDSHWYV

SEQ ID NO: 68909 - protein, 195 aa, Homo sapiens
HLVKVALLEDVNRMSPGALAIIFAPCLLRCPDNSDPLTSMKDVLKITTCVEMLIKEQMRKYKVKMEEISQLEAAESIAFRRLSLLRQNAPWPLKLGFSSPYEGVLNKSPKTRDIQEEELEVLLEEEAAGGDEDREKEILIERIQSIKEEKQDITYRLPELDPRGSDEENLDSETSASTESLLEERAGRGASEGQY

SEQ ID NO: 68910 - protein, 195 aa, Homo sapiens [sequence omitted]

SEQ ID NO: 68911 - protein, 1185 aa, Homo sapiens
MADNLDEFIEEQKARLAEDKAELESDPPYMEMKGKLSAKLSENSKILISMAKENIPPNSQQTRGSLGIDYGLSLPLGEDYERKKHKLKEELRQDYRRYLTQERLKLERNKEYNQFLRGKEESSEKFRQVEKSTEPKSQRNKKPIGQVKPDLTSQIQTSCENSEGPRKDVLTPSEAYEELLNQRRLEEDRYRQLDDEIELRNRRIIKKANEEVGISNLKHQRFASKAGIPDRRFHRFNEDRVFDRRYHRPDQDPEVSEEMDERFRYESDFDRRLSRVYTNDRMHRNKRGNMPPMEHDGDVIEQSNIRISSAENKSAPDNETSKSANQDTCSPFAGMLFGGEDRELIQRRKEKYRLELLEQMAEQQRNKRREKDLELRVAASGAQDPEKSPDRLKQFSVAPRHFEEMIPPERPRIAFQTPLPPLSAPSVPPIPSVHPVPSQNEDLRSGLSSALGEMVSPRIAPLPPPPLLPPLATNYRTPYDDAYYFYGSRNTFDPSLAYYGSGMMGVQPAAYVSAPVTHQLAQPVVNTVGQNELKITSDQVINSGLIFEDKPKPSKQSLQSYQEALQQQIREREERRKKEREEKEEYEAKLEAEMRTYNPWGKGGGGAPLRDAKGNLITDLNRMHRQNIDAYHNPDARTYEDKRAVVSLDPNLATSNAENLEDAANKSSGHMQTQSSPFARGNVFGEPPTELQIKQQELYKNFLRFQIEEKKQREEAERERLRIAEEKEERRLAEQRARIQQEYEEEQEKKREKEEEQRLKNEEHIRLAEERQKEAERKKKEEEEKYNLQLQHYCERDNLIGEETKHMRQPSPIVPALQNKIASKLQRPPSVDSIIRSFIHESSMSRAQSPPVPARKNQLRAEEEKKNVIMELSEMRKQLRSEERRLQERLLHMDSDDEIPIRKKERNPMDIFDMARHRLQAPVRRQSPKGLDAATFQNVHDFNELKDRDSETRVDLKFMYLDPPRDHHTLEIQQQALLREQQKRLNRIKMQEGAKVDLDAIPSAKVREQRMPRDDTSDFLKNSLLESDSAFIGAYGETYPAIEDDVLPPPSQLPSARERRRNKWKGLDIDSSRPNVAPDGLSLKSISSVNVDELRVRNEERMRRLNEFHNKPINTDDESSLVDPDDIMKHIGDDGSNSVATEPWLRPGTSETLKRFMAEQLNQEQQQIPGKPGTFTWQGLSTAHG

SEQ ID NO: 68912 - protein, 677 aa, Homo sapiens
MSSILELSTSRQGVPPSVLDWTTQFLWTLDSAQTRAPSRTLGRAAPAPGSELPVCASCGQRIYDGQYLQALNADWHADCFRCCDCSASLSHQYYEKDGQLFCKKDYWARYGESCHGCSEQITKGLVMVAGELKYHPECFICLTCGTFIGDGDTYTLVEHSKLYCGHCYYQTVVTPVIEQILPDSPGSHLPHTVTLVSIPASSHGKRGLSVSIDPPHGPPGCGTEHSHTVRVQGVDPGCMSPDVKNSIHVGDRILEINGTPIRNVPLDEIDLLIQETSRLLQLTLEHDPHDTLGHGLGPETSPLSSPAYTPSGEAGSSARQKPVLRSCSIDRSPGAGSLGSPASQRKDLGRSESLRVVCRPHRIFRPSDLIHGEVLGKGCFGQAIKVTHRETGEVMVMKELIRFDEETQRTFLKEVKVMRCLEHPNVLKFIGVLYKDKRLNFITEYIKGGTLRGIIKSMDSQYPWSQRVSFAKDIASGMAYLHSMNIIHRDLNSHNCLVRENKNVVVADFGLARLMVDEKTQPEGLRSLKKPDRKKRYTVVGNPYWMAPEMINGRSYDEKVDVFSFGIVLCEIIGRVNADPDYLPRTMDFGLNVRGFLDRYCPPNCPPSFFPITVRCCDLDPEKRPSFVKLEHWLETLRMHLAGHLPLGPQLEQLDRGFWETYRRGESGLPAHPEVPD

SEQ ID NO: 68913 - protein, 96 aa, Homo sapiens
MMQAQESLTLEDVAVDFTWEEWQFLSPAQKDLYRDVMLENYSNLVAVGYQASKPDALSKLERGEETCTTEDEIYSRICSDSGGASGEIRKIDDPLQ

SEQ ID NO: 68914 - protein, 121 aa, Homo sapiens
MDSTACLKSLLLTVSQYKAVKSEANATQLLRHLEVISGQKLTRLFTSNQILTSECLSCLVELLEDPNISASLILSIIGLLSQLAVDIETRDCLQNTYNLNSVLAGVVCRSSHTDSVFLQMN

SEQ ID NO: 68915 - protein, 114 aa, Homo sapiens
MAEDKTKPSELDQGKYDADDNVKIICLGDSAVGKSKLMERFLMDGFQPQQLSTYALTLYKHTATVDGKTILVDFWDTAGQERFQSMHASYYHKAHACIMVFDIQRKVTYRNLST

SEQ ID NO: 68916 - protein, 167 aa, Homo sapiens
CCGAILFPVVWSIRHLQDASGTDGKVAVNLAKLKLFRHYYVMVICYVYFTRIIAILLQVAVPFQWQWLYQLLVEGSTLAFFVLTGYKFQPTGNNPYLQLPQEDEEDVQMEQVVCGEVEGVHVDQAPSSPGPRFPDKPIWKKSPFLPPNIGQPCPYPGTTPPFQLCVQ

SEQ ID NO: 68917 - protein, 228 aa, Homo sapiens
  MOD_RES (1)..(1): Any amino acid
XPQGFPELKNDTFLRAAWGEETDYTPVWCMRQAGRYLPEFRETRAAQDFFSTCRSPEACCELTLQPLRRFPLDAAIIFSDILVVPQALGMEVTMVPGKGPSFPEPLREEQDLERLRDPEVVASELGYVFQAITLTRQRLAGRVPLIGFAGAPALQLFESHAGHLGPQLFNKFALPYIRDVAKQVKARLREAGLAPVPMIIFAKDGHFALEELAQAGYEVVGLDWTVAP

SEQ ID NO: 68918 - protein, 866 aa, Homo sapiens
MPHKIGFVVVSSSGHEDGFSARELMIHAPTVSGWRSPRFCQFPQEIVLQMVERCRIRKLQLLAHQYMISSKIEFYISESLPEYFAPYQAERFRRLGYVSLCDNEKTGCKARELKSVYVDAVGQFLKLIFHQNHVNKYNIYNQVALVAINIIGDPADFSDESNTASREKLIDHYLGHNSEDPALEGTYARKSDYISPLDDLAFDMYQDPEVAQIIRKLDERKREAVQKERYDYAKKLKQAIADLQKVGERLGRYEVEKRCAVEKEDYDLAKEKKQQMEQYRAEVYEQLELHSLLDAELMRRPFDLPLQPLARSGSPCHQKPMPSLPQLEERGTENQFAEPFLQEKPSSYSLTISPQHSAVDPLLPATDPHPKINAESLPYDERPLPAIRKHYGEAVVEPEMSNADISDARRGGMLGEPEPLTEKALREASSAIDVLGETLVAEAYCKTWSYREDALLALSKKLMEMPVGTPKEDLKNTLRASVFLVRRAIKDIVTSVFQASLKLLKMIITQYIPKHKLSKLETAHCVERTIPVLLTRTGDSSARLRVTAANFIQEMALFKEVKSLQIIPSYLVQPLKANSSVHLAMSQMGLLARLLKDLGTGSSGFTIDNVMKFSVSALEHRVYEVRETAVRIILDMYRQHQASILEYLPPDDSNTRRNILYKTIFEGFAKIDGRATDAEMRARRKAATEEAEKQKKEEIKALQGQLAALKEIQAEVQEKESDAVKPKNQDIQGGKAAPAEALGIPDEHYLDNLCIFCGERSESFTEEGLDLHYWKHCLMLTRCDHCKQVVEISSLTEHLLTECDKKDGFGKCYRCSEAVFKEELPRHIKHKDCNPAKPEKLANRCPLCHENFSPGEEVRGLGRRDQ

SEQ ID NO: 68919 - protein, 171 aa, Homo sapiens
MTMTTMPESLNSPVSGKAVFMEFGPPNQQMSPSPMSHGHYSMHCLHSAGHSQPDGAYSSASSFSRPLGYPYVNSVSSHASSPYISSVQSYPGSASLAQSRLEDPGADSEKSTVVEGGEVRFNGKGKKIRKPRTIYSSLQLQALNRRFQQTQYLALPERAELAASLGLTQTQ

SEQ ID NO: 68920 - protein, 960 aa, Homo sapiens
MALLGKRCDVPTNGCGPDRWNSAFTRKDEIITSLVSALDSMCSALSKLNAEVACVAVHDESAFVVGTEKGRMFLNARKELQSDFLRFCRGPPWKDPEAEHPKKVQRGEGGGRSLPRSSLEHGSDVYLLRKMVEEVFDVLYSEALGRASVVPLPYERLLREPGLLAVQGLPEGLAFRRPAEYDPKALMAILEHSHRIRFKLKRPLEDGGRDSKALVELNGVSLIPKGSRDCGLHGQAPKVPPQDLPPTATSSSMASFLYSTALPNHAIRELKQEAPSCPLAPSDLGLSRPMPEPKATGAQDFSDCCGQKPTGPGGPLIQNVHASKRILFSIVHDKSEKWDAFIKETEDINTLRECVQILFNSRYAEALGLDHMVPVPYRKIACDPEAVEIVGIPDKIPFKRPCTYGVPKLKRILEERHSIHFIIKRMFDERIFTGNKFTKDTTKLEPASPPEDTSAEVSRATVLDLAGNARSDKGSMSEDCGPGTSGELGGLRPIKIEPEDLDIIQVTVPDPSPTSEEMTDSMPGHLPSEDSGYGMEMLTDKGLSEDARPEERPVEDSHGDVIRPLRKQVELLFNTRYAKAIGISEPVKVPYSKFLMHPEELFVVGLPEGISLRRPNCFGIAKLRKILEASNSIQFVIKRPELLTEGVKEPIMDSQERDSGDPLVDESLKRQGFQENYDARLSRIDIANTLREQVQDLFNKKYGEALGIKYPVQVPYKRIKSNPGSVIIEGLPPGIPFRKPCTFGSQNLERILAVADKIKFTVTRPFQGLIPKPDEDDANRLGEKVILREQVKELFNEKYGEALGLNRPVLVPYKLIRDSPDAVEVTGLPDDIPFRNPNTYDIHRLEKILKAREHVRMVIINQLQPFAEICNDAKVPAKDSSIPKRKRKRVSEGNSVSSSSSSSSSSSSNPDSVASANQISLVVKLHRFGLRHSSLWPSPLCLAGPSTLGCGPRGRGGTGL

SEQ ID NO: 68921 - protein, 207 aa, Homo sapiens
MSEGNAAGEPSTPGGPRPLLTGARGLIGRRPAPPLTPGRLPSIRSRDLTLGGVKKKTFTPNIISRKIKEEPKEEVTVKKEKRERDRDRQREGHGRGRGRPEVIQSHSIFEQGPAEMMKKKGNWDKTVDVSDMGPSHIINIKKEKRETDEETKQILRMLEKDDFLDDPGLRNDTRNMPVQLPLAHSGWLFKEENDEPDVKPWLAGPKE

SEQ ID NO: 68922 - protein, 36 aa, Homo sapiens
MVGGGGVGGGLLENANPLIYQRSGERPVTAGEEDEQ

SEQ ID NO: 68923 - protein, 136 aa, Homo sapiens
  MOD_RES (1)..(1): Any amino acid
XRAKSASSCPNLLVPETWPHQVSASHAGRSKQPQGGILKINEEHRRGAIQMLKNTSLLYGNHTYISYSKRHLVPRESFVLGRWKTDQNIMEESFMGSSLGSRRMSFLEAWRVPTSLEKASGNQDATRWLSGLETRP

SEQ ID NO: 68924 - protein, 64 aa, Homo sapiens
MATDSWALAVDEQEAAVKSMTNLQIKEEKVKADTNGIIKTSTTAEKTDEEEKVLTQQADQKQPC

SEQ ID NO: 68925 - protein, 37 aa, Homo sapiens
MTAVHAGNINFKWDPKSLEIRTLAVERLLEPLVTQVI

SEQ ID NO: 68926 - protein, 256 aa, Homo sapiens
NMQFLIRSHECKPEGYEFCHNRKVLTIFSASNYYEVGSNRGAYVKLGPALTPHIVQYQANKVTHTLTMRQRISRVEESALRALREKLFAHSSDLLSEFKKHDADKVGLPWRMLRPQLVNSSADNMLEYKSWLKNLAKEQLSRENIQSSLLETLYRNRSNLETIFRIIDSDHSGFISLDEFRQTWKLFSSHMNIDITDDCICDLARSIDFNKDGHIDINEFLEAFRLVEKSCPEGDASECPQATNAKDSGCSSPGAH

SEQ ID NO: 68927 - protein, 53 aa, Homo sapiens
MRDAGDPSPPNKMLRRSDSPENKYSDSTGHSKAKNVHTHRVRERDGVTVETRC

SEQ ID NO: 68928 - protein, 35 aa, Homo sapiens
YAPLPGRPDAFHRCIFLFCCREQPCCAGLRGFVAV

SEQ ID NO: 68929 - protein, 152 aa, Homo sapiens
  MOD_RES (1)..(1): Any amino acid
XYVGNLSRDVTEALILQLFSQIGPCKNCKMIMDTAGNDPYCFVEFHEHRHAAAALAAMNGRKIMGKEVKVNWATTPSSQKKDTSNHFHVFVGDLSPEITTEDIKAAFAPFGRISDARVVKDMATGKSKGYGFVSFFNKWVSSVRSAWIMLKE

SEQ ID NO: 68930 - protein, 109 aa, Homo sapiens
GREWLERRRATIRPWSTFVDQQRFSRPRNLGELCQRLVRNVEYYQSNYVFVFLGLILYCVPRGEPSASVCSGWRHLLPLLLAGWCGLGRLLGAGSHPGGHRLPRCLPPD

SEQ ID NO: 68931 - protein, 146 aa, Homo sapiens
MAATGANAEKAESHNDCPVRLLNPNIAKMKEDILYHFNLTTSRHNFPALFGDVKFVCVGGSPSRMKAFIRCVGAELGLDCPGRDYPNICAGTDRYAMYKVGPVLSVSHGMGIPSISIMLHELIKLLYYARCSNVTIIRIGTSGGIG

SEQ ID NO: 68932 - protein, 92 aa, Homo sapiens
MKVDRTKLKKTPTEAPADCRALIDKLKVCNDEQLLLELQQIKTWNIGKCELYHWVDLLDRFDGILADAGQTVENMSWMLVCDRPEREQLKML

SEQ ID NO: 68933 - protein, 153 aa, Homo sapiens
MSSACPRLAKLLASLLRCPAKAKRTGNGRPPPHPTTGLLSEPRVRSDRDKFVIFLDVKHFSPEDLTVKVQDDFVEIHGKHNERQDDHGYISREFHRRYRLPSNVDQSALSCSLSADGMLTFCGPKIQTGLDATHAERAIPVSREEKPTSAPSS

SEQ ID NO: 68934 - protein, 112 aa, Homo sapiens
MNHSMDAGSPNLSPNPMSPAHNNLDLQPVTYCEPAFWCSISYYELNQRVGETFHASQPSMTVDGFTDPSNSERFCLGLLSNVNRNAAVELTRRHIGRGVRLYYIGGEVFAEC

SEQ ID NO: 68935 - protein, 348 aa, Homo sapiens
MGCSAKARWAAGALGVAGLLCAVLGAVMIVMVPSLIKQQVLKNVRIDPSSLSFNMWKEIPIPFYLSVYFFDVMNPSEILKGEKPQVRERGPYVYREFRHKSNITFNNNDTVSFLEYRTFQFQPSKSHGSESDYIVMPNILVLGAAVMMENKPMTLKLIMTLAFTTLGERAFMNRTVGEIMWGYKDPLVNLINKYFPGMFPFKDKFGLFAELNNSDSGLFTVFTGVQNISRIHLVDKWNGLSKVDFWHSDQCNMINGTSGQMWPPFMTPESSLEFYSPEACRSMKLMYKESGVFEGIPTYRFVAPKTLFANGSIYPPNEGFCPCLESGIQNVSTCRCPLVSLPSSLPQR

SEQ ID NO: 68936 - protein, 2078 aa, Homo sapiens
MGDEMDAMIPEREMKDFQFRALKKVRIFDSPEELPKERSSLLAVSNKYGLVFAGGASGLQIFPTKNLLIQNKPGDDPNKIVDKVQGLLVPMKFPIHHLALSCDNLTLSACMMSSEYGSIIAFFDVRTFSNEAKQQKRPFAYHKLLKDAGGMVIDMKWNPTVPSMVAVCLADGSIAVLQVTETVKVCATLPSTVAVTSVCWSPKGKQLAVGKQNGTVVQYLPTLQEKKVIPCPPFYESDHPVRVLDVLWIGTYVFAIVYAAADGTLETSPDVVMALLPKKEEKHPEIFVNFMEPCYGSCTERQHHYYLSYIEEWDLVLAASAASTEVSILARQSDQINWESWLLEDSSRAELPVTDKSDDSLPMGVVVDYTNQVEITISDEKTLPPAPVLMLLSTDGVLCPFYMINQNPGVKSLIKTPERLSLEGERQPKSPGSTPTTPTSSQAPQKLDASAAAAPASLPPSSPAAPIATFSLLPAGGAPTVFSFGSSSLKSSATVTGEPPSYSSGSDSSKAAPGPGPSTFSFVPPSKASLAPTPAASPVAPSAASFSFGSSGFKPTLESTPVPSVSAPNIAMKPSFPPSTSAVKVNLSENSQSAPPMSPFSSASKPAASGPLSHPTPLSAPPSSVPLKSSVLPSPSGRSAQGSSSPVPSMVQKSPRITPPAAKPGSPQAKSLQPAVAEKQGHQWKDSDPVMAGIGEEIAHFQKELEELKARTSKACFQVGTSEEMKMLRTESDDLHTFLLEIKETTESLHGDISSLKTTLLEGFAGVEEAREQNERNRDSGYLHLLYKRPLDPKSEAQLQEIRRLHQYVKFAVQDVNDVLDLEWDQHLEQKKKQRHLLVPERETLFNTLANNREIINQQRKRLNHLVDSLQQLRLYKQTSLWSLSSAVPSQSSIHSFDSDLESLCNALLKTTIESHTKSLPKVPAKLSPMKQAQLRNFLAKRKTPPVRSTAPASLSRSAFLSQRYYEDLDEVSSTSSVSQSLESEDARTSCKDDEAVVQAPRHAPVVRTPSIQPSLLPHAAPFAKSHLVHGSSPGVMGTSVATSASKIIPQGADSTMLATKTVKHGAPSPSHPISAPQAAAAAALRRQMASQAPAVNTLTESTLKNVPQVVNVQELKNNPATPSTAMGSSVPYSTAKTPHPVLTPVAANQAKQGSLINSLKPSGPTPASGQLSSGDKASGTAKIETAVTSTPSASGQFSKPFSFSPSGTGFNFGIITPTPSSNFTAAQGATPSTKESSQPDAFSSGGGSKPSYEAIPESSPPSGITSASNTTPGEPAASSSRPVAPSGTALSTTSSKLETPPSKLGELLFPSSLAGETLGSFSGLRVGQADDSTKPTNKASSTSLTSTQPTKTSGVPSGFNFTAPPVLGKHTEPPVTSSATTTSVAPPAATSTSSTAVFGSLPVTSAGSSGVISFGGTSLSAGKTSFSFGSQQTNSTVPPSAPPPTTAATPLPTSFPTLSFGSLLSSATTPSLPMSAGRSTEEATSSALPEKPGDSEVSASAASLLEEQQSAQLPQAPPQTSDSVKKEPVLAQPAVSNSGTAASSTSLVALSAEATPATTGVPDARTEAVPPASSFSVPGQTAVTAAAISSAGPVAVETSSTPIASSTTSIVAPGPSAEAAAFGTVTSGSSVFAQPPAASSSSAFNQLTNNTATAPSATPVFGQVAASTAPSLFGQQTGSTASTAAATPQVSSSGFSSPAFGTTAPGVFGQTTFGQASVFGQSASSAASVFSFSQPGFSSVPAFGQPASSTPTSTSGSVFGAASSTSSSSSFSFGQSSPNTGGGLFGQSNAPAFGQSPGFGQGGSVFGGTSAATTTAATSGFSFCQASGFGSSNTGSVFGQAASTGGIVFGQQSSSSSGSVFGSGNTGRGGGFFSGLGGKPSQDAANKNPFSSASGGFGSTATSNTSNLFGNSGAKTFGGFASSSFGEQKPTGTFSSGGGSVASQGFGFSSPNKTGGFGAAPVFGSPPTFGGSPGFGGVPAFGSAPAFTSPLGSTGGKVFGEGTAAASAGGFGFGSSSNTTSFGTLASQNAPTFGSLSQQTSGFGTQSSGFSGFGSGTGGFSFGSNNSSVQGFGGWRS

SEQ ID NO: 68937 - protein, 476 aa, Homo sapiens
MPERLAEMLLDLWTPLIILWITLPPCIYMAPMNQSQVLMSGSPLELNSLGEEQRILNRSKRGWVWNQMFVLEEFSGPEPILVGRLHTDLDPGSKKIKYILSGDGAGTIFQINDVTGDIHAIKRLDREEKAEYTLTAQAVDWETSKPLEPPSEFIIKVQDINDNAPEFLNGPYHATVPEMSILGTSVTNVTATDADDPVYGNSAKLVYSILEGQPYFSIEPETAIIKTALPNMDREAKEEYLVVIQAKDMGGHSGGLSGTTTLTVTLTDVNDNPPKFAQSLYHFSVPEDVVLGTAIGRVKANDQDIGENAQSSYDIIDGDGTALFEITSDAQAQDGIIRLRKPLDFETKKSYTLKVEAANVHIDPRFSGRGPFKDTATVKIVVEDADEPPVFSSPTYLLEVHENAALNSVIGQVTARDPDITSSPIRFSIDRHTDLERQFNINADDGKITLATPLDRELSVWHNITIIATEISHSNC

SEQ ID NO: 68938 - protein, 181 aa, Homo sapiens
MNGQLDLSGKLIIKAQLGEDIRRIPIHNEDITYDELVLMMQRVFRGKLLSNDEVTIKYKDEDGDLITIFDSSDLSFAIQCSRILKLTLFVNGQPRPLESSQVKYLRRELIELRNKVNRLLDSLEPPGEPGPSTNIPENDTVDGREEKSASDSSGKQSTQVMAASMSAFDPLKNQDEINKNV

SEQ ID NO: 68939 - protein, 113 aa, Homo sapiens
MLNIWGVMLFIRLSWIVGEAGIGLGVLIILLSTMVTSITGLSTSAIATNGFVRGGGAYYLISRSLGPEFGGSIGLIFAFANAVAVAMYVVGFAETVVDLLKESDSMMVDPTND

SEQ ID NO: 68940 - protein, 64 aa, Homo sapiens
  MOD_RES (1)..(1): Any amino acid
XTSRFASFPEYLVVQIKKFTFGLDWVPKKFDLLDINHLRARGLQPGEEELPDISPPIVIPDDSK

SEQ ID NO: 68941 - protein, 179 aa, Homo sapiens
  MOD_RES (1)..(1): Any amino acid
XAGRAVRTAGASLPRRRPCPRDLTAGSEGEAVLRPGLDAEPELSPEEQRVLERKLKKERKKEERQRLREAGLVAQHPPARRSGAELALDYLCRWAQKHKNWRFQKTRQTWLLLHMYDSDKVPDEHFSTLLAYLEGLQGRARELTVQKAEALMRELDEEGSDPPLPGRAQRIRQVLQLLS

SEQ ID NO: 68942 - protein, 46 aa, Homo sapiens
MDVIARQNFTEPTAIQAQGWPVALSGLDMVGVAQTGSGKTLSYLLP

SEQ ID NO: 68943 - protein, 3251 aa, Homo sapiens
MEIRLEILTSTGIKQKKPWPRVSWLGKEKEAVFLLDDKFINEINLLSGKIKKKIPSLQPFLKDVIVLTTSSNDAWLAGVLTTGELFLWNKDQDCLKTIPITEKPKEMIKATVASSLRLYLYVSGNGKRIVLITPSGCIFLWEYLELKNILSSKSLSLAGRWSQVIPEEAVLLPSTEDKEAVVNAVFIKNELFGDCCLCSFTFYSGECLKLTFLAIRWHENVFTSVRSLPYHVHWAQQDCHLCSLIPKCESVKSRGALISAFSRDGLTLAVTLNQKDPKATQVLFINTLNFVTLCGSLKGCSNKSPVVPATLIRSYWVGDISWTHDSLFLACMLKRGSLVLLTCQGELLTLITFGCSIEFGPAEFIPLHPLITYRPQQFTFQDSNNSVDSSASDSDPMRQRFSIKAHSRLPYLVISDGYMVTTLRFLDSLSPSVHMRSLLLDSTQRLEKIYQSVILSKPKGKGLNLRSLNSLRSSLLEHQGNESSADFTVPKFLQAEETINENAADFQDFEAEETNEGRHFPDNLCPFWNKRDDVLCSSMKEGRLEFASMFDTIHAKDDSEETDRTITELHSIQKSLLAAWTIGISKTVTEKNLMLNYIVVCITHFFYILQFIKCPFPKLDLVLSKSSRHNAWILCIFQLFHQCLSIHYWDIRYKQDVGHLIKLTSNTVKLLLTQQQKGQLFSEKLLACFYLLKMVADNLNGVYILQPEVISASADGSKITAQDSLVVPIFQMFQDSGFQKNWSWNSFFKIHPQVVNPVQQPGHRLLILWRILYKKTLWYQAQLNRRVPEADSQLTEKMTHEASTVKSLLCHLQANLQSTGDCLNQTLELKSINGEECFLLGSYEKSVQLWKKALQEIEEKGGRRTYFLQIRYYLSLLYCHLYSYNLNDAQGLCDQLAREILRWSQLPVKENKDFSGAAKSHFECGMVGGVHPEAAVRVVQSMARFMAAYFTNQQLCILPPHHVNVLPPLHIKTEQSFRLIPLQHSKVASVVRDQNLSNVWTVEYALELLFIGGLVPEAVWLAYKLGDWKTSVSIGVAFQLFCKRDSNFMRSKKKSLNLPLRMTPAQIFQEKLQCVLGQPASLEAKNEMGSKYKQFTDPIEEEDANLLFGSVQEVLKASVMADADILSETFQLLIDSAKDFSKRLWGLVPFGLYLPAPPLYCPQPAILSEEDGDDLLLKAEKNNRQKVSGILQRVLLLFRAAQCSFPVAQWYILQLRWARKVMQKIRMKGSLPSLSPFPQSLLNYCKGGIAFFRPGAAGDHKLDEVSIRAIGCFRELCALCWMLHVRDKLSYSCRQYQKARENVKGEKDLEVEFDSCMIEHCLSAVEWAYRMLPFSRFFNMEELIQDIILSLIGELPPIRKVAEIFVKAFPYPEDVRVPLRDKYHSLHQRLRHCVVKGPQTEEMMSVVMHSIQKVRVKALKRVQRNIGSFEVNIWEPIEEEKPDEAPGVDRYSLGTSLSRSTLTELGDSVVHSDADTFSEALSVEEKSRINIYQRNAPNHMELTSIHKPTDKRKMCNQKENPTKKEDHEKLSQNTLPVIGVWEFERDDDEYIKFLDLFLSYILERDLPYSRDADIPFLTSFSGKLREHELNSLLFDVHTTLKRHQSKTKSQNVFRAGSCFVVAPESYESEKSSSLNDEYGMHLENQKLSSSVLVNQGIKPFLQYPSNEVNKNEGMSGLFGLKQRSIYKIQDDTREKCLIQRSSNHIFWTPKSIKTRRCIFKAIQCNDINPQEDLPLALNTFGSIGRLLEWMIRWSNRRLLCDSGITESSSEYSPVIRVKTSTAAILTSLWLLEQPYFATYKAKNAIIKMVENRDTGCQIGPNIERESKSDAGGSVAVATPGGTEERNGQNKSCQNILNRMPTEAKNPDIKEINDDIISITHNTKKEFIDIDENLLEVEAFTEEEMDMHISDYEEDIEESVGGFRSPSLAICMMTLPQQLEEEFTEEVQCQREEPLETIMEEKSTEQKGMIEAFSHPGHTTPQSMQVDTSSEISSAQISTYKEKSSSVPLLISNGVNVASQPPAPTPQKTQRNEFTAQLPDCSESVRQMLQDEMFKLVQLQQINFMSLMQIVGSSFANLPDTQQLVQQSQSVHLGESQESNLRGCGDVEDSNKNLKERFFIKPQSMGENAREPRKNSPHCHEGTIPSGQNSTGNVQNVPHGSIPLCQLNGQPRKKGPIPSSQNLPSTSFYPAPAGNTHLYLLSTPSVVQKAPRLIPHAKTFSPGDGFPLLQFKSKQEFQPLFLHTGSIPQVPFRPLPQPREAWGLSDSFQPALPQRAAQTTPASHLNVSQYNTEARKKEVEQKTWAETVITEIPNHVNLDQYVGQENLTPQQDSSVFIKPEKLFDVKPGTLEISPHHSFGLPLLYLPLKPPNMFPSTSRASITVPSTPIQPIAEERKYPRLSLLHSHLSPENRCKKTQLIPLENLIAFKQSQQKLTHNLFEQGDAGHLQLLKVKIEPPEVRQGKDSKKRQRRRAEKELQEKRCEKLRRKPNVTFRPENSIINNDDSEIIKKPKEQQEHCGSHPLDDFDVPFEMLQDDNTSAGLHFMASVKKKAIGSQDASTNTDPEHEPLTAPQLLVPDVYLNLKLSSEMSEKPWSPSIPHTVTNLVGHTYINVIDIEANDLLQELPVREEPSNDNVIKQQSDHLAVPSSAELHYMAASVTNAVPPHNFKSQEVTPACLDGKSLRAGITEVKEPSVTSPTPSDIQQNKGLPKPEFRFKGQSTKSDSAEDYLLWKRLQGVSAACPAPSSAAHQLEHLSAKLQKIDEQLLAIQNIAENIEQDFPKPEMLDLHCDKIGPVDHIEFSSGPEFKKTLASKTISISEEVRFLTHMDEEDQSDKKETSEPEFSITENYSGQKTCVFPTADSAVSLSSSSDQNTTSPGMNSSDELCESVSVHPLQMTGLTDIADIIDDLIIKDGVSSEELGLTEQAMGTSRIQHYSGRHSQRTDKERREIQAWMKRKRKERMAKYLNELAEKRGQEHDPFCPRSNPLYMTSREIRLRQKMKHEKDRLLLSEHYSRRISQAYGLMNELLSESVQLPTLPQKPLPNKPSPTQSSSCQHCPSPRGENQHGHSFLINRPGKVKYMSKPSYIHKRKSFGQPQGSPWPHGTATFTIQKKAGGAKAAVRKATQSPVTFQKGSNAPCHSLQHTKKHGSAGLAPQTKQVCVEYEREETVVSPWTIPSEIHKILHESHNSLLQDLSPTEEEEPEHPFGVGGVDSVSESTGSILSKLDWNAIEDMVASVEDQGLSVHWALDL

SEQ ID NO: 68944 - protein, 170 aa, Homo sapiens
MCSEIILRQEVLKDGFHRDLLIKVKFGESIEDLHTCRLLIKQDIPAGLYVDPYELASLRERNITEAVMVSENFDIEAPNYLSKESEVLIYARRDSQCIDCFQAFLPVHCRYHRPHSEDGEASIVVNNPDLLMFCDQEFPILKCWAHSEVAAPCALENEDICQWNKMKYKS

SEQ ID NO: 68945 - protein, 81 aa, Homo sapiens
  MOD_RES (1)..(1): Any amino acid
XYKVTVAEVQRRLSPPECLNASLLGGVLRRAKSKNGGRSLREKLDKIGLNLPAGRRKAANVTLLTSLVEGAEMAAVLRQEY

SEQ ID NO: 68946 - protein, 227 aa, Homo sapiens
MSCPVPACCALLLVLGLCRARPRNALLLLADDGGFESGAYNNSAIATPHLDALARRSLLFRNAFTSVSSCSPSRASLLTGLPQASSGRSTWGRRPCTRLTLRTRRRMAPSSRWGGTSLELSCSSGNSCRLRMTGLSSSTSPSTTPTAVGTPSPSTEPSVRSLATERAAWVVSQTGPPRPTTHWTCWCLTSSPTPRQPEPTWPLSTPPSAAWTKELDWCSRSCVTPVS

SEQ ID NO: 68947 - protein, 35 aa, Homo sapiens
MAGPPRLLLLPLLLALARGLPGALAAQAGACVGST

SEQ ID NO: 68948 - protein, 160 aa, Homo sapiens
MHLFVAVDEYSVGCCKEILRTVYKAVPELHFIFLIVPSYMSLGSTLITVFDQVGNIPCLTYEEDFAVHICHRHSHYPQLHVRKARVEDHDDLMPIFMRYDTILKETYGEYFLAELIEAQDEENHAVVCEVEGTAVGFMSVCSRVNMQLLHECFDLGPFHG

SEQ ID NO: 68949 - protein, 380 aa, Homo sapiens
MQVHSMSASAPAAEGEGTPTQPASEKEPEMPGPREESEEEEDEDDEEEEEEEKEKSLIVEGKREKKKVERLTMQVSSLQREPFTIAQGKGQKLCEIERIHFFLSKKKTDELRNLHKLLYNRPGTVSSLKKNVGQFSGFPFEKGSVQYKKKEEMLKKFRNAMLKSICEVLDLERSGVNSELVKRILNFLMHPKPSGKPLPKSKKTCSKGSKKERNSSGMARKAKRTKCPEILSDESSSDEDEKKNKEESSDDEDKESEEEPPKKTAKREKPKQKATSKSKKSVKSANVKKADSSTTKKNQNSSKKESESEDSSDDEPLIKKLKKPPTDEELKETIKKLLASANLEEVTMKQICKKVYENYPTYDLTERKDFIKTTVKELIS

SEQ ID NO: 68950 - protein, 179 aa, Homo sapiens
  MOD_RES (1)..(1): Any amino acid
XSLDLSGLELLSEHLDPKLLCRLTQLQELDLSNNHLETLPDNLGLSHLRVLRCANNQLGDVTALCQFPKLEELSLEGNPFLTVNDNLKVSFLLPTLRKVNGKDASSTYSQVENLNRELTSRVTAHWEKFMATLGPEEEAEKAQADFVKSAVRDVRYGPESLSEFTQWRGWGHLGLCPAS

SEQ ID NO: 68951 - protein, 192 aa, Homo sapiens
NSFSSLLLRPSFCRTCAPKGLAIIPSLALWLIALEMAKIHTIHANGSLPKPILWHKMHNYFTLVKNEINPSLSADVPKVEVLERELAWLKEHLSQLESPVVFCHNDLLCKNIIYDSIKGHVRFIDYEYAGYNYQAFDIGNHFNEFAGVNEVDYCLYPARETQLQWLHYYLQAQKGMAVTPREVQRLYVQVNK

SEQ ID NO: 68952 - protein, 219 aa, Homo sapiens
SRVAPAEPQEAPDSTAAGGSASKRMALVLERVCSTLLGLEEHLNALDRAAGDGDCGTTHSRAARAIQEWLKEGPPPASPAQLLSKLSVLLLEKMGGSSGALYGLFLTAAAQPLKAKTSLPAWSAAMDAGLEAMQKYGKAAPGDRTMLDSLWAAGQELQAWKSPGADLLQVLTKAVKIRSGPNPKISPPLGESCDHRVYLLKTLFPPLHLRVGDPTALTN

SEQ ID NO: 68953 - protein, 410 aa, Homo sapiens [sequence omitted]

SEQ ID NO: 68954 - protein, 174 aa, Homo sapiens
MSVSARSAAAEERSVNSSTMVAQQKNLEGYVGFANLPNQVYRKSVKRGFEFTLMVVGESGLGKSTLINSLFLTDLYSPEYPGPSHRIKKTVQVEQSKVLIKEGGVQLLLTIVDTPGFGDAVDNSNCWQPVIDYIDSKFEDYLNAESRVNRRQMPDNRVQCCLYFIAPSGHGSVP

SEQ ID NO: 68955 - protein, 36 aa, Homo sapiens
MRWFLPWTLAAVTAAAASTVLATMLWVRWRHGTGTA

SEQ ID NO: 68956 - protein, 156 aa, Homo sapiens
MAAQGVGPGPGSAAPPGLEAARQKLALRRKKVLSTEEMELYELAQAAGGAIDPDVILVDLLKLNVAPLAVFQMLKSMCAGQRLASEPQDPAAVSLPTSSVPETRGRNKGSAALGGALALAERSSREGSSQRMPRQPSATRLPKGGGPGKSPTRGST

SEQ ID NO: 68957 - protein, 74 aa, Homo sapiens
MYHSLSETRHPLQPEEQEVGIDPLSSYSNKSGGDSNKNGRRTSSTLDSEGTFNSYRKEWEELFVNNNYLATIRQ

SEQ ID NO: 68958 - protein, 210 aa, Homo sapiens
MDPLFQQTHKQVHEIQSCMGRLETADKQSVHKNEIQASIDQIFSRLERLEILSSKEPPNKRQNARLRVDQLKYDVQHLQTALRNFQHRRHAREQQERQREELLSRTFTTNDSDTTIPMDESLQFNSSLQKVHNGMDDLILDGHNILDGLRTQRLTLKGTQKKILDIANMLGLSNTVMRLIEKRAFQDKYFMIGGMLLTCVVMFLVVQYLT

SEQ ID NO: 68959 - protein, 88 aa, Homo sapiens
MLSVQPDTKPKGCAGCNRKIKDRYLLKALDKYWHEDCLKCACCDCRLGEVGSTLYTKANLILCRRDYLRLFGVTGNCAACSKLIPAFE

SEQ ID NO: 68960 - protein, 187 aa, Homo sapiens
MTQTHRAKSASSCPNLLVPETWPHQVSASHAGRSKQPQGGILKINEEHRRGAIQDLLASPGFTFGKRVVFDSHCLKRQHTFADGLHSSCTSNAEEYQPPIWKSYLYQLQQEAPRPKRIICPREVENRPKYYGREFHGIISREQADELLGGVEGAYILRESQRQPGCYTLALRFGNQTLNYRLFHDGK

SEQ ID NO: 68961 - protein, 269 aa, Homo sapiens
MKATWIRLLKRAKGGRLKNSDICGSADSYTSRPSDSDVSLEEDREAVRREAERQAQAQLEKAKTKPVAFAVRTNVSYSAAHEDDVPVPGMAISFEAKDFLHVKEKFNNDWWIGRLVKEGCEIGFIPSPVKLENMRLQHEQRAKQGKFYSSKSGGNSSSSLGDIVPSSRKSTPPSSAIDIDATGLDAEENDIPANHRSPKPSANSVTSPHSKEKRMPFFKKTEHTPPYDVVPSMRPVVLVGPSLKGYEVTDMMQKALFDFLKHRFEGRTI

SEQ ID NO: 68962 - protein, 426 aa, Homo sapiens
MASSSGSKAEFIVGGKYKLVRKIGSGSFGDIYLAINITNGEEVAVKLESQKARHPQLLYESKLYKILQGGVGIPHIRVLFLLPRQECNSVISAHCNLGLPGSSNFPASAFQVAGLQHVKLISLALKNLYCSFNLSATLTLPFMTAHAPKWFAPAWWYGQEKDYNVLVMDLLGPSLEDLFNFCSRRFTMKTVLMLADQMISRIEYVHTKNFIHRDIKPDNFLMGIGRHCNKLFLIDFGLAKKYRDNRTRQHIPYREDKNLTGTARYASINAHLGIEQSRRDDMESLGYVLMYFNRTSLPWQGLKAATKKQKYEKISEKKMSTPVEVLCKGFPAEFAMYLNYCRGLRFEEAPDYMYLRQLFRILFRTLNHQYDYTFDWTMLKQKAAQQAASSSGQGQQAQTPTGKQTDKTKSNMKAFFFTVDSKAGKI

SEQ ID NO: 68963 - protein, 244 aa, Homo sapiens
MAPRVATGTPEPNGGGGGKIDNTVEITPTSNGQVGTLGDAVPTEQLQGEREREREGEGDAGGDGLGSSLSLAVPPGPLSFEALLAQVGALGGGQQLQLGLCCLPVLFVALGMASDPIFTLAPPLHCHYGAFPPNASGWEQPPNASGVSVASAALAASAASRVATSTDPSCSGFAPPDFNHCLKDWDYNGLPVLTTNAIGQIWPSRDCAADLGAGGPLWSRRGCCRLLHRRHGPPIPLGLSACRC

SEQ ID NO: 68964 - protein, 103 aa, Homo sapiens
MKLCVTVLSLLVLVAAFCSLALSAPMGSDPPTACCFSYTARKLPRNFVVDYYETSSLCSQPAVVYRESASSAARGRIPSTRAAPHGPWSGRGRCLPQARDKAR

SEQ ID NO: 68965 - protein, 698 aa, Homo sapiens
MMQESATETISNSSMNQNGMSTLSSQLDAGSRDGRSSGDTSSEVSTVELLHLQQQQALQAARQLLLQQQTSGLKSPKSSDKQRPLQVPVSVAMMTPQVITPQQMQQILQQQVLSPQQLQALLQQQQAVMLQQLLQQQQQQQQQQQQQQQQQQQQQQQQQQQQQQQQQQQQQQQQHPGKQAKEQQQQQQQQQQLAAQQLVFQQQLLQMQQLQQQQHLLSLQRQGLISIPPGQAALPVQSLPQAGLSPAEIQQLWKEVTGVHSMEDNGIKHGGLDLTTNNSSSTTSSNTSKASPPITHHSIVNGQSSVLSARRDSSSHEETGASHTLYGHGVCKWPGCESICEDFGQFLKHLNNEHALDDRSTAQCRVQMQVVQQLEIQLSKERERLQAMMTHLHMRPSEPKPSPKPLNLVSSVTMSKNMLETSPQSLPQTPTTPTAPVTPITQGPSVITPASVPNVGAIRRRHSDKYNIPMSSEIAPNYEFYKNADVRPPFTYATLIRQAIMESSDRQLTLNEIYSWFTRTFAYFRRNAATWKNAVRHNLSLHKCFVRVENVKGAVWTVDEVEYQKRRSQKITGSPTLVKNIPTSLGYGAALNASLQAALAESSLPLLSNPGLINNASSGLLQAVHEDLNGSLDHIDSNGNSSPGCSPQPHIHSIHVKEEPVIAEDEDCPMSLVTTANHSPELEDDREIEEEPLSEDLE

SEQ ID NO: 68966 - protein, 119 aa, Homo sapiens
MAAAYLDPNLNHTPNSSTKTHLGTGMERSPGAMERVLKVFHYFESNSEPTTWASIIRHGDATDVRGIIQKIVDSHKVKHVACYGFRLSHLRSEEVHWLHVDMGVSSVREKYELAHPPEE

SEQ ID NO: 68967 - protein, 148 aa, Homo sapiens
MYAVYKQAHPPTGLEFSMYCNFFNNSERNLVVAGTSQLYVYRLNRDAEALTKNDRSTEGKAHREKLELAASFSFFGNVMSMASVQLAGAKRDALLLSFKDAKLSVVEYDPGTHDLKTLSLHYFEEPELRDRAAGVGACDLHEDSVSAQ

SEQ ID NO: 68968 - protein, 34 aa, Homo sapiens
MGSELETAMETLINVFHAHSGKEGDKYKLSKKEL

SEQ ID NO: 68969 - protein, 111 aa, Homo sapiens
MSLALRSELVVDKTKRKKRRELSEEQKQEIKDAFELFDTDKDEAIDYHELKVAMRALGFDVKKADVLKILKDYDREATGKITFEDFNEVGVYFNSLCNQQLLGNCLINITF

SEQ ID NO: 68970 - protein, 104 aa, Homo sapiens
SALTRLASFARVGGRLFRSGCARTAGDGGVRHAGGGVHIEPRYRQFPQLTRSQVFQSEFFSGLMWFWILWRFWHDSEEVLGHFPYPDPSQWTDEELGIPPDDED

SEQ ID NO: 68971 - protein, 72 aa, Homo sapiens
MFSINPLENLKVYISSRPPLVVFMISVSAMAIAFLTLGYFFKIKEIKSPEMAEDWNTFLLRFNDLDLCVSEN

SEQ ID NO: 68972 - protein, 33 aa, Homo sapiens
MEGLLSPMRTKMTEGRRCQVHLLDDRKLELLVQ

SEQ ID NO: 68973 - protein, 152 aa, Homo sapiens
MDPAGGPRGVLPRPCRVLVLLNPRGGKGKALQLFRSHVQPLLAEAEISFTLMLTERRNHARELVRSEELGRWDALVVMSGDGLMHEVVNGLMERPDWETAIQKPLCSLPAGSGNALAASLNHYAGYEQVTNEDLLTNCTLLLCRRLLSPMNL

SEQ ID NO: 68974 - protein, 90 aa, Homo sapiens
MKMLPGVGVFGTGSSARVLVPLLRAEGFTVEALWGKTEEEAKQLAEEMNIAFYTSRTDDILLHQDVDLVCISIPPPLTRQISVKALESSL

SEQ ID NO: 68975 - protein, 51 aa, Homo sapiens
MDLRVGQRPPVEPPPEPTLLALQRPQRLHHHLFLAGLQQQRSVEPMRLSMD

SEQ ID NO: 68976 - protein, 203 aa, Homo sapiens
  MOD_RES (1)..(1): Any amino acid
XVTGKFTAHHCLSGCPLAERNQSRLKAELSDSEASARKKNLSGFSPRKKPRHHGRIGRPPKYRKIPQEDFQTLTPDVVHQSLFMSALSAHPDRSLSVCWEQHCKLLPGVAGISASTVAKWTIDETLTGCEDQARLFKDEARIVRVTHVSGKTLVWTVAQLGDLVCSDHLQEGKGILETGVHSLLCSLPTHLLAKLSFASDSQY

SEQ ID NO: 68977 - protein, 414 aa, Homo sapiens
MLAKGLPPRSVLVKGCQTFLSAPREGLGRLRVPTGEGAGISTRSPRPFNEIPSPGDNGWLNLYHFWRETGTHKVHLHHVQNFQKYGPIYREKLGNVESVYVIDPEDVALLFKSEGPNPERFLIPPWVAYHQYYQRPIGVLLKKSAAWKKDRVALNQEVMAPEATKNFLPLLDAVSRDFVSVLHRRIKKAGSGNYSGDISDDLFRFAFESITNVIFGERQGMLEEVVNPEAQRFIDAIYQMFHTSVPMLNLPPDLFRLFRTKTWKDHVAAWDVIFSKADIYTQNFYWELRQKGSVHHDYRGILYRLLGDSKMSFEDIKANVTEMLAGGVDTTSMTLQWHLYEMARNLKVQDMLRAEVLAARHQAQGDMATMLQLVPLLKASIKETLRHWCKWPSMLWAESPPSSSTRKILTQPDG

SEQ ID NO: 68978 - protein, 18 aa, Homo sapiens
  MOD_RES (1)..(1): Any amino acid
XNNNDMRFGAGTRLTVKP

SEQ ID NO: 68979 - protein, 62 aa, Homo sapiens
MSESELGRKWDRCLADAVVKIGRMWPLAFGSGMGLGMAYSNCQHDFQAPYLLHGKYVKEQEQ

SEQ ID NO: 68980 - protein, 201 aa, Homo sapiens
MRLLLALLGVLLSVPGPPVLSLEASEEVELEPCLAPSLEQQEQELTVALGQPVRLCCGRAERGGHWYKEGSRLAPAGRVRGWRGRLEIASFLPEDAGRYLCLARGSMIVLQNLTLITGDSLTSSNDDEDPKSHRDPSNRHSYPQQAPYWTHPQRMEKKLHAVPAGNTVKFRCPAAGNPTPTIRWLKDGQAFHGENRIGGIR

SEQ ID NO: 68981 - protein, 150 aa, Homo sapiens
  MOD_RES (1)..(1): Any amino acid
XAAAAASSSCSSGSCSSGSSPSLKASLSYEEGHPSHSETDLLQRQSFAASHQLPGYAPTPQPTGMHSSAATELFATGPLPSTGTLPPSLSAYQHPTTFSNRNFATTSPLVLQDSTFNTTSNGILSHHDPLLQIKTSQGTVPTALAFERLG

SEQ ID NO: 68982 - protein, 74 aa, Homo sapiens
  MOD_RES (1)..(1): Any amino acid
XNCGLNDHGDFVTPPFRKCSSGQCNPDGAELCSPCGGGAVTPTPAAGGGRTPWRCREAPWRQGTHGRRPHYFHS

SEQ ID NO: 68983 - protein, 38 aa, Homo sapiens
  MOD_RES (1)..(1): Any amino acid
XTADSEVLEERQKRLPYVPEPYYPESGWDRLRELFGKE

SEQ ID NO: 68984 - protein, 92 aa, Homo sapiens
SHTDSHLHTRQHCSLFDVSHMLQDKVRELQNQGRDVGLEVLDNALLALQDLGAGSGGSSPGNSYSEKPRGEAGRAGSQGQPAPGGRPLPVWE

SEQ ID NO: 68985 - protein, 53 aa, Homo sapiens
DASSIVFLCDLHIHFPPNILDGIRKHCVEGRLAFAPVVMRLSCGSSPRDPHGS

SEQ ID NO: 68986 - protein, 95 aa, Homo sapiens
MVEAISWAAWRPSWLNRYCWAGRWWSYAVKASTFLAISTETSVIPGFPPQADEHQPFPRPLPLPGPQPHLLADRARYAAPQNQARPGRSGPSQGV

SEQ ID NO: 68987 - protein, 2004 aa, Homo sapiens
MAAEEGVASAASAGGSWGTAAMGRVLPMLLVPVPAEAMGQLGSRAQLRTQPEALGSLTAAGSLQVLSLTPGSRGGGRCCLEGPFWHFLWEDSRNSSTPTEKPKLLALGENYELLIYEFNLKDGRCDATILYSCSREALQKLIDDQDISISLLSLRILSFHNNTSLLFINKCVILHIIFPERDAAIRVLNCFTLPLPAQAVDMIIDTQLCRGILFVLSSLGWIYIFDVVDGTYVAHVDLALHKEDMCNEQQQEPAKISSFTSLKVSQDLDVAVIVSSSNSAVALNLNLYFRQHPGHLLCERILEDLPIQGPKGVDEDDPVNSAYNMKLAKFSFQIDRSWKAQLSSLNETIKNSKLEVSCCAPWFQDILHLESPESGNHSTSVQSWAFIPQDIMHGQYNVLQKDHAKTSDPGRSWKIMHISEQEEPIELKCVSVTGFTALFTWEVERMGYTITLWDLETQGMQCFSLGTKCIPVDSSGDQQLCFVLTENGLSLILFGLTQEEFLNRLMIHGSASTVDTLCHLNGWGRCSIPIHALEAGIENRQLDTVNFFLKSKENLFNPSSKSSVSDQFDHLSSHLYLRNVEELIPALDLLCSAIRESYSEPQSKHFSEQLLNLTLSFLNNQIKELFIHTEELDEHLQKGVNILTSYINELRTFMIKFPWKLTDAIDEYDVHENVPKVKESNIWKKLSFEEVIASAILNNKIPEAQTFFRIDSHSAQKLEELIGIGLNLVFDNLKKNNIKEASELLKNMGFDVKGQLLKICFYTTNKNIRDFLVEILKEKNYFSEKEKRTIDFVHQVEKLYLGHFQENMQIQSFPRYWIKEQDFFKHKSVLDSFLKYDCKDEFNKQDHRIVLNWALWWDQLTQESILLPRISPEEYKSYSPEALWRYLTARHDWLNIILWIGEFQTQHSYASLQQNKWPLLTVDVINQNTSCNNYMRNEILDKLARNGVFLASELEDFECFLLRLSRIGGVIQDTLPVQNYKTKEGWDFHSQFILYCLEHSLQHLLYVYLDCYKLSPENCPFLEKKELHEAHPWFEFLVQCRQVASNLTDPKLIFQASLANAQILIPTNQASVSSMLLEGHTLLALATTMYSPGGVSQVVQNEENENCLKKVDPQLLKMALTPYPKLKTALFPQCTPPSVLPSDITIYHLIQSLSPFDPSRLFGWQSANTLAIGDAWSHLPHFSSPDLVNKYAIVERLNFAYYLHNGRPSFAFGTFLVQELIKSKTPKQLIQQVGNEAYVIGLSSFHIPSIGAACVCFLELLGLDSLKLRVDMKVANIILSYKCRNEDAQYSFIRESVAEKLSKLADGEKTTTEELLVLLEEGTWNSIQQQEIKRLSSESSSQWALVVQFCRLHNMKLSISYLRECAKANDWLQFIIHSQLHNYHPAEVKSLIQYFSPVIQDHLRLAFENLPSVPTSKMDSDQVCNKCPQELQGSKQEMTDLFEILLQCSEEPDSWHWLLVEAVKQQAPILSVLASCLQGASAISCLCVWIITSVEDNVATEAMGHIQDSTEDHTWNLEDLSVIWRTLLTRQKSKTLIRGFQLFFKDSPLLLVMEMYELCMFFRNYKEAEAKLLEFQKSLETLNTAATKVHPVIPAMWLEDQVCFLLKLMLQQCKTQYELGKLLQLFVEREHLFSDGPDVKKLCILCQILKDTSIAINHTIITSYSIENLQHECRSILERLQTDGQFALARRVAELAELPVDNLVIKEITQEMQTLKHIEQWSLKQARIDFWKKCHENFKKNSISSKAASSFFSTQAHVACEHPTGWSSMEERHLLLTLAGHWLAQEDVVPLDKLEELEKQIWLCRITQHTLGRNQEETEPRFSRQISTSGELSFDSLASEFSFSKLAALNTSKYLELNSLPSKETCENRLDWKEQESLNFLIGRLLDDGCVHEASRVCRYFHFYNPDVALVLHCRALASGEASMEDLHPEIHALLQSAELLEEEAPDIPLRRVHSTSSLDSQKFVTVPSSNEVVTNLEVLTSKCLHGKNYCRQVLCLYDLAKSS

SEQ ID NO: 68988 - protein, 130 aa, Homo sapiens
MLENYRNLVFVGIAASKPDLITCLEQGKEPWNVKRHEMVTEPPVVYSYFAQDLWPKQGKKNYFQKVILRTYKKCGRENLQLRKYCKSMDECKVHKECYNGLNQCLTTTQNKIFQYDKYVKVFHKFSNSNR

SEQ ID NO: 68989 - protein, 184 aa, Homo sapiens
MSGGEQKPERYYVGVDVGTGSVRAALVDQSGVLLAFADQPIKNWEPQFNHHEQSSEDIWAACCVVTKKVVQGIDLNQIRGLGFDATCSLVVLDKQFHPLPVNQEGDSHRNVIMWLDHRAVSQVNRINETKHSVLQYVGGVMSVEMQAPKLLWLKENLREICWDKAGHFFDLPDFLSWKATGVTA

SEQ ID NO: 68990 - protein, 356 aa, Homo sapiens
MRPTLLWSLLLLLGVFAAAAAAPPAQLTLETYQEWCNDSAATHDPLSQLPAPQHPKIRLYNAEQVLSWEPVALSNSTRPVVYQVQFKYTDSKWFTADIMSIGVNCTQITATECDFTAASPSAGFPMDFNVTLRLRAELGALHSAWVTMPWFQHYRNVTVGPPENIEVTPGEGSLIIRFSSPFDIADTSTAFFCYYVHYWEKGGIQQVKGPFRSNSISLDNLKPSRVYCLQVQAQLLWNKSNIFRVGHLSNISCYETMADASTELQQVILISVGTFSLLSVLAGACFFLVLKYRGLIKYWFHTPPSIPLQIEEYLKDPTQPILEALDKDSSPKDDVWDSVSIISFPEKEQEDVLQTL

SEQ ID NO: 68991 - protein, 697 aa, Homo sapiens
MDLTKMGMIQLQNPSHPTGLLCKANQMRLAGTLCDVVIMVDSQEFHAHRTVLACTSKMFEILFHRNSQHYTLDFLSPKTFQQILEYAYTATLQAKAEDLDDLLYAAEILEIEYLEEQCLKMLETIQASDDNDTEATMADGGAEEEEDRKARYLKNIFISKHSSEESGYASVAGQSLPGPMVDQSPSVSTSFGLSAMSPTKAAVDSLMTIGQSLLQGTLQPPAGPEEPTLAGGGRHPGVAEVKTEMMQVDEVPSQDSPGAAESSISGGMGDKVEERGKEGPGTPTRSSVITSARELHYGREESAEQVPPPAEAGQAPTGRPEHPAPPPEKHLGIYSVLPNHKADAVLSMPSSVTSGLHVQPALAVSMDFSTYGGLLPQGFIQRELFSKLGELAVGMKSESRTIGEQCSVCGVELPDNEAVEQHRNRLEFYFHIGCSADCAMESLLVARKLHSGMKTYGCELCGKRFLDSLRLRMHLLAHSAGAKAFVCDQCGAQFSKEDALETHRQTHTGTDMAVFCLLCGKRFQAQSALQQHMEVHAGVRSYICSECNRTFPSHTALKRHLRSHTGDHPYECEFCGSCFRDESTLKSHKRIHTGEKPYECNGCGKKFSLKHQLETHYRVHTGEKPFECKLCHQRSRDYSAMIKHLRTHNGASPYQCTICTEYCPSLSSMQKHMKGHKPEEIPPDWRIEKTYLYLCYV

SEQ ID NO: 68992 - protein, 104 aa, Homo sapiens
MGPGARLAALLAVLALGTGDPERAAARGDTFSALTSVARALAPERRLLGLLRRYLRGEEARLRDLTRFYDKVLSLHEDSTTPVANPLLAFTLIKRLQSDWRNVL

SEQ ID NO: 68993 - protein, 89 aa, Homo sapiens
MLVGNKIDKENREVDRNEGLKFARKHSMLFIEASAKTCDGVQCAFEELVEKIIQTPGLWESENQNKGVKLSHREEGQGGGACGGYCSVL

SEQ ID NO: 68994 - protein, 526 aa, Homo sapiens
MQGPLLLPGLCFLLSLFGAVTQKTKTSCAKCPPNASCVNNTHCTCNHGYTSGSGQKLFTFPLETCNAIETQAITDNCSEERKTFNLNVQMNSMDIRCSDIIQGDTQGPSAIAFISYSSLGNIINATFFEEMDKKDQVYLNSQVVSAAIGPKRNVSLSKSVTLTFQHVKMTPSTKKVFCVYWKSTGQGSQWSRDGCFLIHVNKSHTMCNCSHLSSFAVLMALTSQEEDPVLTVITYVGLSVSLLCLLLAALTFLLCKAIRNTSTSLHLQLSLCLFLAHLLFLVGIDRTEPKVLCSIIAGALHYLYLAAFTWMLLEGVHLFLTARNLTVVNYSSINRLMKWIMFPVGYGVPAVTVAISAASWPHLYGTADRCWLHLDQGFMWSFLGPVCAIFSANLVLFILVFWILKRKLSSLNSEVSTIQNTRMLAFKATAQLFILGCTWCLGLLQVGPAAQVMAYLFTIINSLQGFFIFLVYCLLSQQVQKQYQKWFREIVKSKSESETYTLSSKMGPDSKPSEGDVFPGQVKRKY

SEQ ID NO: 68995 - protein, 1231 aa, Homo sapiens
MWPSQLLIFMMLLAPIIHAFSRAPIPMAVVRRELSCESYPIELRCPGTDVIMIESANYGRTDDKICDSDPAQMENIRCYLPDAYKIMSQRCNNRTQCAVVAGPDVFPDPCPGTYKYLEVQYECVPYKVEQKVFLCPGLLKGVYQSEHLFESDHQSGAWCKDPLQASDKIYYMPWTPYRTDTLTEYSSKDDFIAGRPTTTYKLPHRVDGTGFVVYDGALFFNKERTRNIVKFDLRTRIKSGEAIIANANYHDTSPYRWGGKSDIDLAVDENGLWVIYATEQNNGKIVISQLNPYTLRIEGTWDTAYDKRSASNAFMICGILYVVKSVYEDDDNEATGNKIDYIYNTDQSKDSLVDVPFPNSYQYIAAVDYNPRDNLLYVWNNYHVVKYSLDFGPLDSRSGQAHHGQVSYISPPIHLDSELERPSVKDISTTGPLGMGSTTTSTTLRTTTLSPGRSTTPSVSGRRNRSTSTPSPAVEVLDDMTTHLPSASSQIPALEESCEAVEAREIMWFKTRQGQIAKQPCPAGTIGVSTYLCLAPDGIWDPQGPDLSNCSSPWVNHITQKLKSGETAANIARELAEQTRNHLNAGDITYSVRAMDQLVGLLDVQLRNLTPGGKDSAARSLNKLQKRERSCRAYVQAMVETVNNLLQPQALNAWRDLTTSDQLRAATMLLHTVEESAFVLADNLLKTDIVRENTDNIKLEVARLSTEGNLEDLKFPENMGHGSTIQLSANTLKQNGRNGEIRVAFVLYNNLGPYLSTENASMKLGTEALSTNHSVIVNSPVITAAINKEFSNKVYLADPVVFTVKHIKQSEENFNPNCSFWSYSKRTMTGYWSTQGCRLLTTNKTHTTCSCNHLTNFAVLMAHVEVKHSDAVHDLLLDVITWVGILLSLVCLLICIFTFCFFRGLQSDRNTIHKNLCISLFVAELLFLIGINRTDQPIACAVFAALLHFFFLAAFTWMFLEGVQLYIMLVEVFESEHSRRKYFYLVGYGMPALIVAVSAAVDYRSYGTDKVCWLRLDTYFIWSFIGPATLIIMLNVIFLGIALYKMFHHTAILKPESGCLDNIKSWVIGAIALLCLLGLTWAFGLMYINESTVIMAYLFTIFNSLQGMFIFIFHCVLQKKVRKEYGKCLRTHCCSGKSTESSIGSGKTSGSRTPGRYSTGSQSRIRRMWNDTVRKQSESSFITGDINSSASLNREPYRETSMGVKLNIAYQIGASEQCQGYKCHGYSTTEW

SEQ ID NO: 68996 - protein, 177 aa, Homo sapiens
MRTLRRLKFMSSPSLSDLGKREPAAAADERGTQQRRACANATWNSIHNGVIAVFQRKGLPDQELFSLNEGVRQLLKTELGSFFTEYLQNQLLTKGMVILRDKIRFYEGICPRQSGPVVMAPMPTGQKLLDSLAETWDFFFSDVLPMLQAIFYPVQGKEPSVRQLALLHFRNAITLSV

SEQ ID NO: 68997 - protein, 76 aa, Homo sapiens
MKYSCCALVLAVLGTELLGSLCSTVRSPRFRGRIQQERKNIRPNIILVLTDDQDVELGSLQVMNKTRKIMEHGGAT

SEQ ID NO: 68998 - protein, 38 aa, Homo sapiens
CVPGAYNFPYCEGAVWWDGTSVAAEGAGRCVFSGRPCG

SEQ ID NO: 68999 - protein, 266 aa, Homo sapiens
MREDLADNWHIRAVTVYDKPASFFKETPLDLQHRLFMKLGSMHSPFRARSEPEDPVTERSAFTERDAGSGLVTRLRERPALLVSSTSWTEDEDFSILLAALEKFEQLTLDGHNLPSLVCVITGKGPLREYYSRLIHQKHFQHIQVCTPWLEAEDYPLLLGSADLGVCLHTSSSGLDLPMKVVDMFGCCLPVCAVNFKCLHELVKHEENGLVFEDSEELAAQLQMLFSNFPDPAGKLNQFRKNLRESQQLRWDESWVQTVLPLVMDT

SEQ ID NO: 69000 - protein, 25 aa, Homo sapiens
MDFSFSFMQGIMGNTIQQPPQLIDS

SEQ ID NO: 69001 - protein, 108 aa, Homo sapiens
MAVQVPLWHHYLQAIRSREAPRAQDFQRAENVLLTVLERVHALDPRFIVDYSRGLEAFQFALRSSEDPMDMEVPLWVDAEALLIEEPEATQPEDGLELCHLGVPREGA

SEQ ID NO: 69002 - protein, 164 aa, Homo sapiens
MKRFPAKKRSFRSLPELKDAVLDQYSMWGNKFGVLLFLYSVLLTKGIENIKNEIEDASEPLIDPVYGHGSQSLINLLLTGHAVSNVWDGDRECSGMKLLGIHEQAAVGFLTLMEALRYCKVGSYLKSPKFPIWIVGSETHLTVFFAKDMALVAPEAPSEQARRV

SEQ ID NO: 69003 - protein, 201 aa, Homo sapiens
GSRSADNLSCPSPLNVTELMQEQSYLKSELGLGLGEMGFEIPPGESSESVFSQATSESSSVCSGPSHANRRTGVPSTASVGKSKTPLVARKKVFRASVALTPTAPSRTGSVQTPPDLESSEEVDAAEGAPEVVGPKSEVEEGHGKLPSMPAAEEMHKNVEQDELQQVIREVGMDPISCVILELSMICTGGGVICALEDTCC

SEQ ID NO: 69004 - protein, 15 aa, Homo sapiens
MKKEGTTLGLTVSGG

SEQ ID NO: 69005 - protein, 78 aa, Homo sapiens
LKGKKMRKKEAEQVLQKFVQNKWLIEKEGEFTLHGRAILEMEQYIRETYPDAVKICNICHSLLIQKSSTLRRRGSLVS

SEQ ID NO: 69006 - protein, 128 aa, Homo sapiens
MLSRPKPGESEVDLLHFQSQFLAAGAAPAVQLVKKGNRGGGDANSDRPPLQDHRDVVMLDNLPDLPPALVPSPPKRARPSPGHCLPEDEDPEERLRRHDQHITAVLTKIIERDTSSVAVNLPVPSGVA

SEQ ID NO: 69007 - protein, 926 aa, Homo sapiens
ACELMNQGILALVSSIGCTSAGSLQSLADAMHIPHLFIQRSTAGTPRSGCGLTRSNRNDDYTLSVRPPVYLHDVILRVVTEYAWQKFIIFYDSEYDIRGIQEFLDKVSQQGMDVALQKVENNINKMITTLFDTMRIEELNRYRDTLRRAILVMNPATAKSFITEVVETNLVAFDCHWIIINEEINDVDVQELVRRSIGRLTIIRQTFPVPQNISQRCFRGNHRISSTLCDPKDPFAQNMEISNLYIYDTVLLLANAFHKKLEDRKWHSMASLSCIRKNSKPWQGGRSMLETIKKGGVSGLTGELEFGENGGNPNVHFEILGTNYGEELGRGVRKLGCWNPVTGLNGSLTDKKLENNMRGVVLRVVTVLEEPFVMVSENVLGKPKKYQGFSIDVLDALSNYLGFNYEIYVAPDHKYGSPQEDGTWNGLVGELVFKRADIGISALTITPDRENVVDFTTRYMDYSVGVLLRRAEKTVDMFACLAPFDLSLWACIAGTVLLVGLLVYLLNWLNPPRLQMGSMTSTTLYNSMWFVYGSFVQQGGEVPYTTLATRMMMGAWWLFALIVISSYTANLAAFLTITRIESSIQSLQDLSKQTEIPYGTVLDSAVYEHVRMKGLNPFERDSMYSQMWRMINRSNGSENNVLESQAGIQKVKYGNYAFVWDAAVLEYVAINDPDCSFYTIGNTVADRGYGIALQHGSPYRDVFSQRILELQQNGDMDILKHKWWPKNGQCDLYSSVDTKQKGGALDIKSFAGVFCILAAGIVLSCFIAMLETWWNKRKGSRVPSKEDDKEIDLEHLHRRVNSLCTDDDSPHKQFSTSSIDLTPLDIDTLPTRQALEQISDFRNTHITTTTFIPEQIQTLSRTLSAKAASGFTFGNVPEHRTGPFRHRAPNGGFFRSPIKTMSSIPYQPTPTLGLNLGNDPDRGTSI

SEQ ID NO: 69008 - protein, 174 aa, Homo sapiens
KRREEDEKRRRKEEEERRMKLEMEAKRKQEEEERKKREDDEKRIQAEVEAQLARQKEEESQQQAVLEQERRDRELALRIAQSEAELISDEAQADLALRSLDSYPVTSKNDGTRPKMTPGPAVLATKAAAGTKKYDLSKWKYAELRDTINTSCDIELLAACREEFHRRLKVYHAW

SEQ ID NO: 69009 - protein, 267 aa, Homo sapiens
MNDTHVNEDLKAIKFSEADYFGNVLQTRKYLAQSDFFWLRKAVPKTEWFTNPTTVNAFYSASTNQIRFPAGELQKPFFWGTEYPRSLSYGAIGVIVGHEFTHGFDNNGRKYDKNGNLDPWWSTESEEKFKEKTKCMINQYSNYYWKKAGLNVKGKRTLGENIADNGGLREAFRAYRKWINDRRQGLEEPLLPGITFTNNQLFFLSYAHVRCNSYRPEAAREQVQIGAHSPPQFRVNGAISNFEEFQKAFNCPPNSTMNRGMDSCRLW

SEQ ID NO: 69010 - protein, 249 aa, Homo sapiens
  MOD_RES (1)..(1): Any amino acid
XEVAPVRQQGSVAGARAGVVSLLGCRSSWTAAMELSAEYLREKLQRDLEAEHVEVEDTTLNRCSCSFRVLVVSAKFEGKPLLQRHSLDPSMTIHCDMVITYGLDQLENCQTCGTDYIISVLNLLTLIVEQINTKLPSSFVEKLFIPSSKLLFLRYHKEKEVVAVAHAVYQAMLSLKNIPVLETAYKLILGEMTCALNNLLHSLQLPEACSEIKHEAFKNHVFNVDNAKFVVKFDLSALTTIGNAKNSSL

SEQ ID NO: 69011 - protein, 489 aa, Homo sapiens
MTNYSFHCNVCHHSGNTYFLRKQANLKEMCLSALANLTWQSRTQDEHPKTMFSKDKDIIPFIDKYWECMTTRQRPGKMTWPNNIVKTMSKERDVFLVKEHPDPGSKDPEEDYPKFGLLDQDLSNIGPAYDNQKQSSAVSTSGNLNGGIAAGSSGKGRGAKRKQQDGGTTGTTKKARSDPLFSAQRLPPHGYPLEHPFNKDGYRYILAEPDPHAPDPEKLELDCWAGKPIPGDLYRACLYERVLLALHDRAPQLKISDDRLTVVGEKGYSMVRASHGVRKGAWYFEITVDEMPPDTAARLGWSQPLGNLQAPLGYDKFSYSWRSKKGTKFHQSIGKHYSSGYGQGDVLGFYINLPEDTETAKSLPDTYKDKALIKFKSYLYFEEKDFVDKAEKSLKQTPHSEIIFYKNGVNQGVAYKDIFEGVYFPAISLYKSCTVSINFGPCFKYPPKDLTYRPMSDMGWGAVVEHTLADVLYHVETEVDGRRSPPWEP

SEQ ID NO: 69012 - protein, 21 aa, Homo sapiens
MLENLALISSLGCWCGSKDEE

SEQ ID NO: 69013 - protein, 80 aa, Homo sapiens
MDDDIAALVVDNGSGMCKAGFAGDDAPRAVFPSIVGRPRHQGVMVGMGQKDSYVGDEAQSKRGILTLKYPIEHGIVTNWD

SEQ ID NO: 69014 - protein, 196 aa, Homo sapiens
MAQRAFPNPYADYNKSLAEGYFDAAGRLTPEFSQRLTNKIRELLQQMERGLKSADPRDGTGYTGWAGIAVLYLHLYDVFGDPAYLQLAHGYVKQSLNCLTKRSITFLCGDAGPLAVAAVLYHKMNNEKQAEDCITRLIHLNKIDPHAPNEMLYGRIGYIYALLFVNKNFGVEKIPQSHIQQICETILTSGENLARK

SEQ ID NO: 69015 - protein, 859 aa, Homo sapiens
TYGLSAYSGKVRYICSALGCRQWDSDEMEQEEDILLLQRTQKTVRAVGPRSGNEKWNFSVGHFELRYIPDMETRAGFIESTFKPNENTEESKIISDVEEQEAAIMDIVIKVSVADWKVMAFSKKGGHLEWEYQFCTPIASAWLLKDGKVIPISLFDDTSYTSNDDVLEDEEDIVEAARGATENSVYLGMYRGQLYLQSSVRISEKFPSSPKALESVTNENAIIPLPTIKWKPLIHSPSRTPVLVGSDEFDKCLSNDKFSHEEYSNGALSILQYPYDNGYYLPYYKRERNKRSTQITVRFLDNPHYNKNIRKKDPVLLLHWWKEIVATILFCIIATTFIVRRLFHPHPHRQRKESETQCQTENKYDSVSGEANDSSWNDIKNSGYISRYLTDFEPIQCLGRGGFGVVFEAKNKVDDCNYAIKRIRLPNRELAREKVMREVKALAKLEHPGIVRYFNAWLEAPPEKWQEKMDEIWLKDESTDWPLSSPSPMDAPSVKIRRMDPFATKEHIEIIAPSPQRSRSFSVGISCDQTSSSESQFSPLEFSGMDHEDISESVDAAYNLQDSCLTDCDVEDGTMDGNDEGHSFELCPSEASPYVRSRERTSSSIVFEDSGCDNASSKEEPKTNRLHIGNHCANKLTAFKPTSSKSSSEATLSISPPRPTTLSLDLTKNTTEKLQPSSPKVYLYIQMQLCRKENLKDWMNGRCTIEERERSVCLHIFLQIAEAVEFLHSKGLMHRDLKIHGNSYSHKVDIFSLGLILFELLYPFSTQMERVRTLTDVRNLKFPPLFTQKYPCEYVMVQDMLSPSPMERPEAINIIENAVFEDLDFPGKTVLRQRSRSLSSSGTKHSRQSNNSHSPLPSN

SEQ ID NO: 69016 - protein, 186 aa, Homo sapiens
  MOD_RES (1)..(1): Any amino acid
XKAVGGGARRARERRRGDAGFCLRPCPALLCALCPRRRRLSLGPALRARPEDAEEAEHRGAERRPESFTTPEGPKPRSRCSDWASAVEEDEMRTRVNKEMARYKRKLLINDFGRERKSSSGSSDSKESMSTVPADFETDESVLMRRQKQINYGKNTIAYDRYIKEVPRHLRQPGIHPKTPNKFKKY

SEQ ID NO: 69017 - protein, 188 aa, Homo sapiens
VGLDIEMAFNYHYHEVMEEIADTMVQIFKGLQERFQTEIQTVNKQFPCEPFKFLEPTLRLEYCEALAMLREAGVEMGDEDDLSTPNEKLLGHLVKEKKQSNSYDMFMRGEEILSGAQRIHDPQLLTERALHHGIDLEKIKAYIDSFRFGAPPHAGGGIGLERVTMLFLGLHNVRQTSMFPRDPKRLTP

SEQ ID NO: 69018 - protein, 107 aa, Homo sapiens
  MOD_RES (1)..(1): Any amino acid
XLFKNNENKVSLPKSPKMVQPRRDGYFEGIEEDPIHKDTTANEKLERNREYTYQWLHTQVGVHETTSSRNMKCNHFLPELDPDVLNGGRVQLVVRNVLKVTEKCCRH

SEQ ID NO: 69019 - protein, 371 aa, Homo sapiens
MDNITRQNQFYDTQVIKQENESGYERRPLEMEQQQAYRPEMKTEMKQGAPTSFLPPEASQLKPDRQQFQSRKRPYEENRGRGYFEHREDRRGRSPQPPAEEDEDDFDDTLVAIDTYNCDLHFKVARDRSSGYPLTIEGFAYLWSGARASYGVRRGRVCFEMKINEEISVKHLPSTEPDPHVVRIGWSLDSCSTQLGEEPFSYGYGGTGKKSTNSRFENYGDKFAENDVIGCFADFECGNDVELSFTKNGKWMGIAFRIQKEALGGQALYPHVLVKNCAVEFNFGQRAEPYCSVLPGFTFIQHLPLSERIRGTVGPKSKAECEILMMVGLPAAGKTTWAIKHAASNPSKKYNILGTNAIMDKMRVMGLRRQR

SEQ ID NO: 69020 - protein, 1301 aa, Homo sapiens
MWRRKHPRTSGGTRGVLSGNRGVEYGSGRGHLGTFEGRWRKLPKMPEAVGTDPSTSRKMAELEEVTLDGKPLQALRVTDLKAALEQRGLAKSGQKSALVKRLKGALMLENLQKHSTPHAAFQPNSQIGEEMSQNSFIKQYLEKQQELLRQRLEREAREAAELEGKSSSISEEKGDSDDEKPRKGERRSSRVRQARAAKLSEGSQPAEEEEDQETPSRNLRVRADRNLKTEEEEEEEEEEEEDDEEEEGDDEGQKSREAPILKEFKEEGEEIPRVKPEEMMDERPKTRSQEQEVLERGGRFTRSQEEARKSHLARQQQEKEMKTTSPLEEEEREIKSSQGLKEKSKSPSPPRLTEDRKKASLVALPEQTASEEETPPPLLTKEASSPPPHPQLHSEEEIEPMEGPAPAVLIQLSPPNTDADTRELLVSQHTVQLVGGLSPLSSPSDTKAESPAEKVPEESVLPLVQKSTLADYSAQKDLEPESDRSAQPLPLKIEELALAKGITEECLKQPSLEQKEGRRASHTLLPSHRLKQSADSSSSRSSSSSSSSSRSRSRSPDSSGSRSHSPLRSKQRDVAQARTHANPRGRPKMGSRSTSESRSRSRSRSRSASSNSRKSLSPGVSRDSSTSYTETKDPSSGQEVATPPVPQLQVCEPKERTSTSSSSVQARRLSQPESAEKHVTQRLQPERGSPKKCEAEEAEPPAATQPQTSETQTSHLPESERIHHTVEEKEEVTMDTSENRPENDVPEPPMPIADQVSNDDRPEGSVEDEEKKESSLPKSFKRKISVVSATKGVPAGNSDTEGGQPGRKRRWGASTATTQKKPSISITTESLKSLIPDIKPLAGQEAVVDLHADDSRISEDETERNGDDGTHDKGLKICRTVTQVVPAEGQENGQREEEEEEKEPEAEPPVPPQVSVEVALPPPAEHEVKKVTLGDTLTRRSISQQKSGVSITIDDPVRTAQVPSPPRGKISNIVHISNLVRPFTLGQLKELLGRTGTLVEEAFWIDKIKSHCFVTYSTVEEAVATRTALHGVKWPQSNPKFLCADYAEQDELDYHRGLLVDRPSETKTEEQGIPRPLHPPPPPPVQPPQHPRAEQREQERAVREQWAEREREMERRERTRSEREWDRDKVREGPRSRSRSRDRRRKERAKSKEKKSEKKEKAQEEPPAKLLDDLFRKTKAAPCIYWLPLTDSQIVQKEAERAERAKEREKRRKEQEEEEQKEREKEAERERNRQLEREKRREHSRERDRERERERERDRGDRDRDRERDRERGRERDRRDTKRHSRSRSRSTPVRDRGGRR

SEQ ID NO: 69021 - protein, 200 aa, Homo sapiens
  MOD_RES (1)..(1): Any amino acid
XNMSTKKLCIVGGILLVFQIIAFLVGGLIGENAEVSMDVSLAYRDDAFAEWTEMAHERVPRKLKCTFTSPKTPEHEGRYYECDVLPFMEIGSVAHKFYLLNIRLPVNEKKKINVGIGEIKDIRLVGIHQNGGFTKVWFAMKTFLTPSIFIIMVWYWRRITMMSRPPVLLEKVIFALGISMTFINIPVEWFSIGFDWTWML

SEQ ID NO: 69022 - protein, 112 aa, Homo sapiens
MAEWLLSASWQRRAKAMTAAAGSAGRAAVPLLLCALLAPGGAYVLDDSDGLGREFDGIGAVSGGGATSRLLVNYPEPYRSQILDYLFKPNFGASLHILKVEIGGDGQTTDIL

SEQ ID NO: 69023 - protein, 156 aa, Homo sapiens
  MOD_RES (1)..(1): Any amino acid
XLEAEEWCKHLCMECLGTRLNDISLGEPDLLAAGVQREQNERFNVYLMPTPNLDIYGECTMQITHENIYLWDIHNAKVKLVMWPLSSLRRYGRDSTWFTFESGRMCDTGEGLFTFQTREGEMIYQKVHSATLAIAEQHERLMLEMEQKARVRPLPW

SEQ ID NO: 69024 - protein, 105 aa, Homo sapiens
MHWLRKVQGLCTLWGTQMSSRTLYINSRQLVSLQWGHQEVPAKFNFASDVLDHWADMEKAGKRLPSPALWWVNGKGKELMWNFRELSENSQQAANVLSGACGLQR

SEQ ID NO: 69025 - protein, 269 aa, Homo sapiens
MAKFMTPVIQDNPSGWGPCAVPEQFRDMPYQPFSKGDRLGKVADWTGATYQDKRYTNKYSSQFGGGSQYAYFHEEDESSFQLVDTARTQKTAYQRNRMRFAQRNLRRDKDRRNMLQFNLQILPKSAKQKERERIRLQKKFQKQFGVRQKWDQKSQKPRDSSVEVRSDWEVKEEMDFPQLMKMRYLEVSEPQDIECCGALEYYDKAFDRITTRSEKPLRSIKRIFHTVTTTDDPVIRKLAKTQGNVFATDAILATLMSCTRSVYSWDIVV

SEQ ID NO: 69026 - protein, 52 aa, Homo sapiens
MKPHRIRMTHNLLLNYGLYRKMEIYRPHKATAEEMTKYHSDEYIKFLRSIRP

SEQ ID NO: 69027 - protein, 107 aa, Homo sapiens
MLETYNHLVSLEIPSSKPKLIAQLERGEAPWREERKCPLDLCPESKPEIQLSPSCPLIFSSQQALSQHVWLSHLSQLFSSLWAGNPLHLGKHYPEDQKQQQDPFCFS

SEQ ID NO: 69028 - protein, 166 aa, Homo sapiens
ERGDGPICLVLAPTRELAQQVQQVAAEYCRACRLKSTCIYGGAPKGPQIRDLERGVEICIATPGRLIDFLECGKTNLRRTTYLVLDEADRMLDMGFEPQIRKIVDQIRPDRQTLMWSATWPKEVRQLAEDFLKDYIHINIGALELSANHNILQIVDVCHDVEKDEK

SEQ ID NO: 69029 - protein, 59 aa, Homo sapiens
  MOD_RES (1)..(1): Any amino acid
XVESRVTQEEIKKEPEKPIDREKTCPLLLRVFTTNNGRHHRMDEFSRGNVPSSELQIYT

SEQ ID NO: 69030 - protein, 250 aa, Homo sapiens
MGGKQMTQNYSTIFAEGNISQPVLMDINAVLCCPPIALRNLIIITWEIILRGQPSCTKAYKKETNETKETNCTVERITWVSRPDQNSDLQIRPVDTTHDGYYRGIVVTPDGNFHRGYHLQVLVTPEVNLFQSRNITAVCKAVTGKPAAQISWIPEGSILATKQEYWGNGTVTVKSTCPWEGHKSTVTCHVSHLTGNKSLSVKLNSGLRTSGSPALSLLIILYVKLSLFVVILVTTGFVFFQRINHVSKFL

SEQ ID NO: 69031 - protein, 186 aa, Homo sapiens
  MOD_RES (1)..(1): Any amino acid
XGHAGPRRCSSPPVSSGGLLPSHPTTSPRGSLTLLLCGECGLVSALEQAFQHGFKSPRLFKNVFIWDFLEKAQTYYETLEKNEVVPEENWHTRARNFCRFVTAINNTPRNIGKDGKFQMLVCLGARDHLLHHWIALLADCPITAHMYEDVALIKDHTLVNSLIRVLQTLQEFNITLETSLVKGIDI

SEQ ID NO: 69032 - protein, 198 aa, Homo sapiens
MPIPASPLHPPLPSLLLYLLLELAGVTHVFHVQQTEMSQTVSTGESIILSCSVPNTLPNGPVLWFKGTGPNRKLIYNFKQGNFPRVKEIGDTTKPGNTDFSTRIREISLADAGTYYCVKFIKGRAIKEYQSGRGTQVFVTAEQNPRPPKNRPAGRAGSRAHHDAHTCLSALPERNSTNYFVQPCCCLRLLGLTGLLSK

SEQ ID NO: 69033 - protein, 191 aa, Homo sapiens
MKVFCEVLEELYKKVLLGATLENDSHDYIFYLNPAVSDQDCSTATSLEWANTCGIQGRHQPISVGVAPIAVAPVCLKTNSQMSGSREVMLLQLTVIKVMTTRILSVKTEFHAKEQYRDVIKILLESAKVDSKLICMFQNSDKLLSHMAAQCLALLLYFQLREKITLSNSWIAFCQKNLSEYSESNKAIYCL

SEQ ID NO: 69034 - protein, 110 aa, Homo sapiens
MATGTPDSTAPITIWRSESPTGKGQGSKVIKKVKKKKEKEKDKEEMDEKAKLKKKAKKGQLTKKKSPVKLEPSPPDVSRSLSARQLARMSESSPESREELESEDSYNGRG

SEQ ID NO: 69035 - protein, 66 aa, Homo sapiens
MGATMAAINSIYSNTDANILFYVVGLRNTLTRIRKWIEHSKLREINFKIVEFNPMVLKGKIRPDSS

SEQ ID NO: 69036 - protein, 1471 aa, Homo sapiens
QMRQKSKQQAKIEATQKLEQVKNEQQQQQQQQFGSQHLLVQSGSDTPSSGIQSPLTPQPGNGNMSPAQSFHKELFTKQPPSTPTSTSSDDVFVKPQAPPPPPAPSRIPIQDSLSQAQTSQPPSPQVFSPGSSNSRPPSPMDPYAKMVGTPRPPPVGHSFSRRNSAAPVENCTPLSSVSRPLQMNETTANRPSPVRDLCSSSTTNNDPYAKPPDTPRPVMTDQFPKSLGLSRSPVVSEQTAKGPIAAGTSDHFTKPSPRADVFQRQRIPDSYARPLLTPAPLDSGPGPFKTPMQPPPSSQDPYGSVSQASRRLSVDPYERPALTPRPIDNFSHNQSNDPYSQPPLTPHPAVNESFAHPSRAFSQPGTISRPTSQDPYSQPPGTPRPVVDSYSQSSGTARSNTDPYSQPPGTPRPTTVDPYSQQPQTPRPSTQTDLFVTPVTNQRHSDPYAHPPGTPRPGISVPYSQPPATPRPRISEGFTRSSMTRPVLMPNQDPFLQAAQNRGPALPGPLVRPPDTCSQTPRPPGPGLSDTFSRVSPSAARDPYDQSPMTPRSQSDSFGTSQTAHDVADQPRPGSEGSFCASSNSPMHSQGQQFSGVSQLPGPVPTSGVTDTQNTVNMAQADTEKLRQRQKLREIILQQQQQKKIAGRQEKGSQDSPAVPHPGPLQHWQPENVNQAFTRPPPPYPGNIRSPVAPPLGPRYAVFPKDQRGPYPPDVASMGMRPHGFRFGFPGGSHGTMPSQERFLVPPQQIQGSGVSPQLRRSVSVDMPRPLNNSQMNNPVGLPQHFSPQSLPVQQHNILGQAYIELRHRAPDGRQRLPFSAPPGSVVEASSNLRHGNFIPRPDFPGPRHTDPMRRPPQGLPNQLPVHPDLEQVPPSQQEQGHSVHSSSMVMRTLNHPLGGEFSEAPLSTSVPSETTSDNLQITTQPSDGLEEKLDSDDPSVKELDVKDLEGVEVKDLDDEDLENLNLDTEDGKVVELDTLDNLETNDPNLDDLLRSGEFDIIAYTDPELDMGDKKSMFNEELDLPIDDKLDNQCVSVEPKKKEQENKTLVLSDKHSPQKKSTVTNEVKTEVLSPNSKVESKCETEKNDENKDNVDTPCSQASAHSDLNDGEKTSLHPCDPDLFEKRTNRETAGPSANVIQASTQLPAQDVINSCGITGSTPVLSSLLANEKSDNSDIRPSGSPPPPTLPASPSNHVSSLPPFIAPPGRVLDNAMNSNVTVVSRVNHVFSQGVQVNPGLIPGQSTVNHSLGTGKPATQTGPQTSQSGTSSMSGPQQLMIPQTLAQQNRERPLLLEEQPLLLQDLLDQERQEQQQQRQMQAMIRQRSEPFFPNIDFDAITDPIMKAKMVALKGINKVMAQNNLGMPPMVMSRFPFMGQVVTGTQNSEGQNLGPQAIPQMIHSVSSMKSGSRRPNSCFKCSRSILKNKLVLTENLRRPFQLNNVLPRKLGVNFQRKMQNNSSMLLNSKAWFRNS

SEQ ID NO: 69037 - protein, 289 aa, Homo sapiens
  MOD_RES (1)..(1): Any amino acid
XGCQHGTCHQPWQCICHSGWAGKFCDKGFHGRDCERKAGPCEQAGSPCRNGGQCQDDQGFALNFTCRCLVGFVGARCEVNVDDCLMRPCANGATCLDGINRFSCLCPEGFAGRFCTINLDDCASRPCQRGARCRDRVHDFDCLCPSGYGGKTCELVLPVPDPPTTVDTPLGPTSAVVVPATGPAPHSAGAGLLRISVKEVVRRQEAGLGEPSLVALVVFGALTAALVLATVLLTLRAWRRGVCPPGPCCYPAPHYAPACQDQECQVSMLPAGLPLPRDLPPEPGKTTAL

SEQ ID NO: 69038 - protein, 97 aa, Homo sapiens
MSGGSADYNSREHGGPEGMDPDGVIESNWNEIVDNFDDMNLKESLLRGIYAYGFEKPSAIQQRAIIPCIKDPKGNSGTWRLYGSHLSCLHWWNKCSK

SEQ ID NO: 69039 - protein, 94 aa, Homo sapiens
MRTHNGEKPFMCHESGCGKQFTTAGNLKNHRRIHTGEKPFLCEAQGCGRSFAEYSSLRKHLVVHSGEKPHQCQVCGKTFSQSGSRNVHMRKHHL

SEQ ID NO: 69040 - protein, 88 aa, Homo sapiens; identical to SEQ ID NO: 54084

SEQ ID NO: 69041 - protein, 165 aa, Homo sapiens
MTSGANSSGSYLPSEIRSSKIDDNYLKELNEDLKLRKQELLEMLKPLEDKNNLLFQKLMSNLEEKQRSLQIMRQIMAGKGCEESSVMELLKEAEEMKQNLERKNKMLRKEMEMLWNKTFEAEELSDQQKAPQTKNKADLQDGKRLFLPPGKATEENGMGQVSGTK

SEQ ID NO: 69042 - protein, 173 aa, Homo sapiens
MEKDLCVKGWNWGTVKFGGQLLSFDIGDQPVFEIPLSNVSQCTTGKNEVTLEFHQNDDAEVSLMEVRFYVPPTQEDGVDPVEAFAQNVLSKADVIQATGDAICIFRELQCLTPRGRYDIRIYPTFLHLHGKTFDYKIPYTTVLRLFLLPHKDQRQMFFVISLDPPIKQGQTRY

SEQ ID NO: 69043 - protein, 209 aa, Homo sapiens
MSRRYDSRTTIFSPEGRLYQVEYAMEAIGHAGTCLGILANDGVLLAAERRNIHKLLDEVFFSEKIYKLNEDMACSVAGITSDANVLTNELRLIAQRYLLQYQEPIPCEQLVTALCDIKQAYTQFGGKRPFGVSLLYIGWDKHYGFQLYQSDPSGNYGGWKATCIGNNSAAAVSMLKQDYKEGEMTLKSALALAIKVLNKTMDVSKLSAE

SEQ ID NO: 69044 - protein, 128 aa, Homo sapiens
MEFQAVVMAVGGGSRMTDLTSSIPKPLLPVGNKPLIWYPLNLLERVGFEEVIVVTTRDVQKALCAEFKMKMKPDIVCIPDDADMGTADSLRYIYPKLKLPKPLSLTYQERLLVHSFSQALDRCAGAEL

SEQ ID NO: 69045 - protein, 31 aa, Homo sapiens
MPRRKKKVKEVSESRNLEKKDVETTSSVSVK

SEQ ID NO: 69046 - protein, 304 aa, Homo sapiens [sequence omitted]

SEQ ID NO: 69047 - protein, 142 aa, Homo sapiens
MAELQEVQITEEKPLLPGQTPEAAKTHSVETPYGSVTFTVYGTPKPKRPAILTYHDVGLNYKSCFQPLFQFEDMQEIIQNFVRVHVDAPGMEEGAPVFPLGYQYPSLDQLADMIPCVLQYLNFSTIIGVGVGAGAYILARYA

SEQ ID NO: 69048 - protein, 122 aa, Homo sapiens
MKVRKSSTPEEVKKRKKAVLFCLSEDKKNIILEEGKEILVGDVGQTVDDPYATFVKMLPDKDCRYALYDATYETKESKKEDLVFIFWAPESAPLKSKMIYASSKDAIKKKLTGIKHELQANC

SEQ ID NO: 69049 - protein, 681 aa, Homo sapiens
MESMLNKLKSTVTKVTADVTSAVMGNPVTREFDVGRHIASGGNGLAWKIFNGTKKSTKQEVAVFVFDKKLIDKYQKFEKDQIIDSLKRGVQQLTRLRHPRLLTVQHPLEESRDCLAFCTEPVFASLANVLGNWENLPSPISPDIKDYKLYDVETKYGLLQVSEGLSFLHSSVKMVHGNITPENIILNKSGAWKIMGFDFCVSSTNPSEQEPKFPCKEWDPNLPSLCLPNPEYLAPEYILSVSCETASDMYSLGTVMYAVFNKGKPIFEVNKQDIYKSFSRQLDQLSRLGSSSLTNIPEEVREHVKLLLNVTPTVRPDADQMTKIPFFDDVGAVTLQYFDTLFQRDNLQKSQFFKGLPKVLPKLPKRVIVQRILPCLTSEFVNPDMVPFVLPNVLLIAEECTKEEYVKLILPELGPVFKQQEPIQILLIFLQKMDLLLTKTPPDEIKNSVLPMVYRALEAPSIQIQELCLNIIPTFANLIDYPSMKNALIPRIKNACLQTSSLAVRVNSLVCLGKILEYLDKWFVLDDILPFLQQIPSKEPAVLMGILGIYKCTFTHKKLGITKEQLAGKVLPHLIPLSIENNLNLNQFNSFISVIKEMLNRLESEHKTKLEQLHIMQEQQKSLDIGNQMNVSEEMKVTNIGNQQIDKVFNNIGADLLTGSESENKEDGLQNKHKRASLTLE

SEQ ID NO: 69050 - protein, 85 aa, Homo sapiens
PAQEAGTSKPNEEISGPAEPASPPETTTTAQETSAAAVQGTAKVTSSRQELNPLKQALAKAGKGMHGGVPGGKQFIESECIPRWK

SEQ ID NO: 69051 - protein, 782 aa, Homo sapiens
MEKLTFYALSAPEKLDRIGAYLSERLIRDVGRHRYGYVCIAMEALDQLLMACHCQSINLFVESFLKMVAKLLESEKPNLQILGTNSFVKFANIEEDTPSYHRSYDFFVSRFSEMCHSSHDDLEIKTKIRMSGIKGLQGVVRKTVNDELQANIWDPQHMDKIVPSLLFNLQHVEEAESRSPSPLQAPEKEKESPAELAERCLRELLGRAAFGNIKNAIKPVLIHLDNHSLWEPKVFAIRCFKIIMYSIQPQHSHLVIQQLLGHLDANSRSAATVRAGIVEVLSEAAVIAATGSVGPTVLEMFNTLLRQLRLSIDYALTGSYDGAVSLGTKIIKEHEERMFQEAVIKTVGSFASTLPTYQRSEVILFIMSKVPRPSLHQAVDTGRTGENRNRLTQIMLLKSLLQVSTGFQCNNMMSALPSNFLDRLLSTALMEDAEIRLFVLEILISFIDRHGNRHKFSTISTLSDISVLKLKVDKCSRQDTVFMKKHSQQLYRHIYLSCKEETNVQKHYEALYGLLALISIELANEEVVVDLIRLVLAVQDVAQVNEENLPVYNRCALYALGAAYLNLISQLTTVPAFCQHIHEVIETRKKEAPYMLPEDVFVERPRLSQNLDGVVIELLFRQSKISEVLGGSGYNSDRLCLPYIPQLTDEDRLSKRRSIGETISLQVEVESRNSPEKEERVPAEEITYETLKKAIVDSVAVEEQERERRRQVVEKFQKAPFEEIAAHCGARASLLQSKLNQIFEITIRPPPSPSGTITAAYGQPQNHSIPVYEMKFPDLCVY

SEQ ID NO: 69052 - protein, 1258 aa, Homo sapiens
  MOD_RES (1)..(1): Any amino acid
XKRSTTDETWDSPEELKKPEEDFDSHGDAGGKWKTVSSGLPEDPEKAGQKASLSVSQTGSWRRGMSAQGGAPSRQKAGTSALKTPGKTDDAKASEKGKAPLKGSSLQRSPSDAGKSSGDEGKKPPSGIGRSTATSSFGFKKPSGVGSSAMITSSGATITSGSATLGKIPKSAAIGGKSNAGRKTSLDGSQNQDDVVLHVSSKTTLQYRSLPRPSKSSTSGIPGRGGHRSSTSSIDSNVSSKSAGATTSKLREPTKIGSGRSSPVTVNQTDKEKEKVAVSDSESVSLSGSPKSSPTSASACGAQGLRQPGSKYPDIASPTFRRYTPSSRQANQEEGKEWLRSHSTGGLQDTGNQSPLVSPSAMSSSAAGKYHFSNLVSPTNLSQFNLPGPSMMRSNSIPAQDSSFDLYDDSQLCGSATSLEERPRAISHSGSFRDSMEEVHGSSLSLVSSTSSLYSTAEEKAHSEQIHKLRRELVASQEKVATLTSQLSANAHLVAAFEKSLGNMTGRLQSLTMTAEQKESELIELRETIEMLKAQNSAAQAAIQGALNGPDHPPKDLRIRRQHSSESVSSINSATSHSSIGSGNDADSKKKKKKNWVNSRGSELRSSFKQAFGKKKSTKPPSSHSDIEELTDSSLPASPKLPHNAGDCGSASMKPSQSASAICECTEAEAEIILQLKSELREKELKLTDIRLEALSSAHHLDQIREAMNRMQNEIEILKAENDRLKAETGNTAKPTRPPSESSSSTSSSSSRQSLGLSLNNLNITEAVSSDILLDDAGDATGHKDGRSVKIIVSISKGYGRAKDQKSQAYLIGSIGVSGKTKWDVLDGVIRRLFKEYVFRIDTSTSLGLSSDCIASYCIGDLIRSHNLEVPELLPCGYLVGDNNIITVNLKGVEENSLDSFVFDTLIPKPITQRYFNLLMEHHRIILSGPSGTGKTYLANKLAEYVITKSGRKKTEDAIATFNVDHKSSKELQQYLANLAEQCSADNNGVELPVVIILDNLHHVGSLSDIFNGFLNCKYNKCPYIIGTMNQGVSSSPNLELHHNFRWVLCANHTEPVKGFLGRYLRRKLIEIEIERNIRNNDLVKIIDWIPKTWHHLNSFLETHSSSDVTIGPRLFLPCPMDVEGSRVWFMDLWNYSLVPYILEAVREGLQMYGKRTPWEDPSKWVLDTYPWSSATLPQESPALLQLRPEDVGYESCTSTKEATTSKHIPQTDTEGDPLMNMLMKLQEAANYSSTQSCDSESTSHHEDILDSSLESTL

SEQ ID NO: 69053 - protein, 184 aa, Homo sapiens
MAEDEPDAKSPKTGGRAPPGGAEAGEPTTLLQRLRGTISKAVQNKVEGILQDVQKFSDNDKLYLYLQLPSGPTTGDKSSEPSTLSNEEYMYAYRWIRNHLEEHTDTCLPKQSVYDAYRKYCESLACCRPLSTANFGKIIREIFPDIKARRLGGRGQSKYCYSGIRRKTLVSMPPLPGLDLKGSE

SEQ ID NO: 69054 - protein, 83 aa, Homo sapiens
RLLRGPIADQSPSPFRSPRPLRWGLLQGWRCEDHDRRPSAEHWQEGQGGTEEEEKRRIRRERNKMAAAKCRNRRRELTDTLQA

SEQ ID NO: 69055 - protein, 214 aa, Homo sapiens
MVKLANPLYTEWILEAIKKVKKQKQRPSEERICNAVSSSHGLDRKTVLEQLELSVKDGTILKVSNKGLNSYKDPDNPGRIALPKPRNHGKLDNKQNVDWNKLIKRAVEGLAESGGSTLKSIERFLKGQKDVSALFGGSAASGFHQQLRLAIKRAIGHGRLLKDGPLYRLNTKATNVDGKESCESLSCLPPVSLLPHEKDKVRMAYASGFIELMI

SEQ ID NO: 69056 - protein, 86 aa, Homo sapiens
MVHAFLIHTLRAPNTEDTGLCRVLYSCVFGAEKSPDDPRPHGAERDRLLRKEQILAVARQVESMCRLQQQASGRPPMDLQPQSSDE

SEQ ID NO: 69057 - protein, 73 aa, Homo sapiens
WLPKTSRKSVSQSVFCGTSTYCVLNTVPPIEDDHGNSNSSHVKIFLPKKLLECLPKCSSLPKERHRWNTNERS

SEQ ID NO: 69058 - protein, 36 aa, Homo sapiens
MSFKDKDERISCLEAYVTLTSKSSRFTDGKSFHFNK

SEQ ID NO: 69059 - protein, 280 aa, Homo sapiens
MAEAASPHLSLPSGLLELCALLGAPRDSLRSLEQVAYKKGVKHLSALLDPEVLSIFVPPFISKEDSQMAGANCGTLGKTRMRSLRKKREKPRPEQWKGLPGPPRAPEPEDVAVPGGVDLLTLPQLCFPGGVCVATEPKEDCVHFLVLTDVCGNRTYGVVAQYYRPLHVFNMKSLQIVLPARADPESPILDLDLHLPLLCFRPEKVLQILTCILTEQRIVFFSSDWALLTLVTECFMAYLYPLQWQHPFVPILSDQMLDFVMAPTSFLMGCHLDHFEEVSK

SEQ ID NO: 69060 - protein, 160 aa, Homo sapiens
MQRNASVPNLRGSEERLLALKKPALPALSRTTELQDELSHLRSQIAKIVAADAASASLTPDFLSPGSSNVSSPLPCFGSSFHSTTSFVISDITEETEVEVPELPSVPLLCSASPECCKPEHKAACSSSEEDDCVSLSKASSFADMMGILKDFHRMKQSQD

SEQ ID NO: 69061 - protein, 190 aa, Homo sapiens
MNDFHISDDEEKNPSKLLFLKTNKSNGNITKDEPVCAIKNEEEMAPDGCEDIVVKSFSESQNKDEEFEKDKIKMKPKPRILSIKSTSSENNSLDTDDHFKPSPRPRSMLKKKSHMEEKDGLEDKETALSEELELHSAPSSLPTPNGIQLEAEKKAFSENLDPEVSTTTKLLNCVLEFMLFYLIMKKRRRE

SEQ ID NO: 69062 - protein, 50 aa, Homo sapiens
MAASKTQGAVARMQEDRDGSCSTVGGVGYGVRIVSWSRFPCQKVQVAPPL

SEQ ID NO: 69063 - protein, 709 aa, Homo sapiens
MSYGEIEGKFLGPREEVTSEPRCKKLKSTTESYVFHNHSNADFHRIQEKTGNDWVPVTIIDVRGHSYLQENKIKTTDLHRPLHDEMPGNRPDVIESIDSQVLQEARPPLVSADDEIYSTSKAFIGPIYKPPEKKKRNEGRNEAHVLNGINDRGGQKEKQKFNSEKSEIDNELFQFYKEIEELEKEKDGFENSCKESEPSQEQFVPFYEGHNNGLLKPDEEKKDLSNKAMPSHCDYQQNLGNEPDKYPCNGQVIPTFCDTSFTSFRPEWQSVYPFIVPYGPPLPSLNYHLNIQRFSGPPNPPSNIFQAQDDSQIQNGYYVNNCHVNWNCMTFDQNNEYTDCSENRSSVHPSGNGCSMQDRYVSNGFCEVRERCWKDHCMDKHNGTDRFVNQQFQEEKLNKLQKLLILLRGLPGSGKTTLSRILLGQNRDGIVFSTDDYFHHQDGYRYNVNQLGDAHDWNQNRAKQAIDQGRSPVIIDNTNIQAWEMKPYVEVAIGKGYRVEFHEPETWWKFDPEELEKRNKHGVSRKKIAQMLDRYEYQMSISIVMNSVEPSHKSTQRPPPPQGRQRERVLKKTGHRLSKTKQKRNRKRNKKQNSQNRIMEENSLEFLSDLTPGDQDPSQSEEEDIEKTRRESEYPFIDGLQNEVGDFVTGYKEKRWKNKDPKDSFQNVMSIVELDNTPKNYLSKEGDNLFVSLLLRPNEISVTCPILTQ

SEQ ID NO: 69064 - protein, 89 aa, Homo sapiens
LAKCVSSPHFQVAERALYYWNNEYIMSLISDNAAKILPIMFPSLYRNSKTHWNKTIHGLIYNALKLFMEMNQKLFDDCTQQFKAEKLKS

SEQ ID NO: 69065 - protein, 174 aa, Homo sapiens
  MOD_RES (1)..(1): Any amino acid
XVSQDPGLSHLMMSEQAREENVATFRGSEYLCYDLSQNPIQSSSDEITLSFKTWQRNGLILHTGKSADYVNLALKDGAVSLVINLGSGAFEAIVEPVNGKFNDNAWHDVKVTRNLRQHSGIGHAMVTISVDGILTTTGYTQEDYTMLGSDDFFYVGGSPSTADLPGSPVSNNFM

SEQ ID NO: 69066 - protein, 175 aa, Homo sapiens
  MOD_RES (1)..(1): Any amino acid
XFTVPVTHPRQSGAGAMGAAKPDRAHRSKGCFTPKGGGAQCQPSQAARNPSGANVPLAILPGTQGRGQVYVGQVVGWGGGRGGGGCMGTLGASNSGEMTGLIPVWSRRLVLAVATAVSGSLVGGLSVGRALGDPSSSAQRDISHWDKVKVLLNRICRRSHHHPEPPAPPDGSDPR

SEQ ID NO: 69067 - protein, 51 aa, Homo sapiens
MILIPRMLLVLFLLLPILSSAKAQVNPAICRYPLGMSGGQIPDEDITASSQ

SEQ ID NO: 69068 - protein, 55 aa, Homo sapiens
MWQYDTAGQERFRTLTPSYYRGAQGVILVYDVTRRDTFVKLDNWLNELETYCTRN

SEQ ID NO: 69069 - protein, 142 aa, Homo sapiens
MDMRWHCENLQTTDDILVASAECPSDDEDIDPCEPSSGGLANPTRAGGREPYPGSAEVIRESSSTTGMVVGIVAAAALCILILLYAMYKYRNRDEGSYHVDESRNYISNSAQSNGAVVKEKQPSSAKSSNKNKKNKDKEYYV

SEQ ID NO: 69070 - protein, 167 aa, Homo sapiens
  MOD_RES (1)..(1): Any amino acid
XSAAPGLTRTSDTIVLSQKEHLPVTQIVMTDTGQPHSEADYTLGPLLCRGDTRLLKVWRRESVIFEIFPSLFGRLRWEDGLSQGVQHKPGQDESFWNSASFNTETSYLHFPAFHGELTADVCFFFKTTVSSGVFMENLGITDFIRIELRGRLATLDKSQGTHYLAIK

SEQ ID NO: 69071 - protein, 527 aa, Homo sapiens
RGLQPECCAVFRLLHEHKGKKARLDWNTDAASLIGEELQVDFLDHVPLTTHNFARKTFLKLAFCDICQKFLLNGFRCQTCGYKFHEHCSTKVPTMCVDWSNIRQLFSQHRYSTPHAFTFNTSSPSSEGSLSQRQRSTSTPNVHMVSTTLPVDSRMIEDAIRSHSESASPSALSSSPNNLSPTGWSQPKTPVPAQRERAPVSGTQEKNKIRPRGQRDSSYYWEIEASEVMLSTRIGSGSFGTVYKGKWHGDVAVKILKVVDPTPEQFQAFRNEVAVLRKTRHVNILLFMGYMTKDNLAIVTQWCEGSSLYKHLHVQETKFQMFQLIDIARQTAQGMDYLHAKNIIHRDMKSNNIFLHEGLTVKIGDFGLATVKSRWSGSQQVEQPTGSVLWMAPEVIRMQDNNPFSFQSDVYSYGIVLYELMTGELPYSHINNRDQIIFMVGRGYASPDLSKLYKNCPKAMKRLVADCVKKVKEERPLFPQILSSIELLQHSLPKINRSASEPSLHRAAHTEDINACTLTTSPRLPVF

SEQ ID NO: 69072 - protein, 406 aa, Homo sapiens
MISFCPDCGKSIQAAFKFCPYCGNSLPVEEHVGSQTFVNPHVSSFQGSKRGLNSSFETSPKKVKWSSTVTSPRLSLFSDGDSSESEDTLSSSERSKGSGSRPPTPKSSPQKTRKSPQVTRGSPQKTSCSPQKTRQSPQTLKRSRVTTSLEALPTGTVLTDKSGRQWKLKSFQTRDNQGILYEAAPTSTLTCDSGPQKQKFSLKLDAKDGRLFNEQNFFQRAAKPLQVNKWKKLYSTPLLAIPTCMGFGVHQDKYRFLVLPSLGRSLQSALDVSPKHVLSERSVLQVACRLLDALEFLHENEYVHGNVTAENIFVDPEDQSQVTLAGYGFAFRYCPSGKHVAYVEGSRSPHEGDLEFISMDLHKGCGPSRRSDLQSLGYCMLKWLYGFLPWTNCLPNTEDIMKQKQK

SEQ ID NO: 69073 - protein, 367 aa, Homo sapiens
MHPLPGYWSCYCLLLLFSLGVQGSLGAPSAAPEQVHLSYPGEPGSMTVTWTTWVPTRSEVQFGLQPSGPLPLRAQGTFVPFVDGGILRRKLYIHRVTLRKLLPGVQYVYRCGSAQGWSRRFRFRALKNGAHWSPRLAVFGDLGADNPKAVPRLRRDTQQGMYDAVLHVATSLTTRLASACRGIMRACGTGNVGVLGDWPSPLKDGRCRGALVPDPCPLTPPAGIWVPPTSSPSPPRSISFSIMAATWYRGSFAGWRATSRKPIRTGQPGRGSSLWGTGPCTAPTQIWTTAHDMKARSAKASKASCTGWRIFSTNMEWICSCGLMSTRMNDCGQFTTTRYLTAAERCPTPTREGLSTSSQDLLAVRSG

SEQ ID NO: 69074 - protein, 109 aa, Homo sapiens
  MOD_RES (1)..(1): Any amino acid
XASLSWRPLHLPSADWQRAALSLWTHRTFREVLKEEDVHLTYQDWLHLELEIQPEADALSDTERQDFHQWAIHEHFLPESSASGGCDGDLQAACTILVNALMDFHQRRW

SEQ ID NO: 69075 - protein, 56 aa, Homo sapiens
MKAQRERLQIPGLTLDLTPRSLSPTPSSPGSPCSPLLAFHFWSPVCPNAGRTSPLG

SEQ ID NO: 69076 - protein, 121 aa, Homo sapiens
  MOD_RES (1)..(1): Any amino acid
XYPPRKDLVRAVSIQTGYLIQSTGPKSCVITYLAQVDPKGSLPKWVVNKSSQFLAPKVSGLGILGRGVEDWKEDYGMRWVESSLEPEGQAWWLMPVIPALWEALAGGLPEVGSSRPAWPTW

SEQ ID NO: 69077 - protein, 11 aa, Homo sapiens
MEEDDSYEAEG

SEQ ID NO: 69078 - protein, 210 aa, Homo sapiens
MSDKDDIETPLLTEAAPILEDGNCEPAKNSESVDQGAKPESKSEPVVSTRKRPETKPSSDLETSKVLPIQDNVSKDVPQTRWGYWGSWGKSILSSASATVATVGQGISNVIEKAETSLGIPGPSEISTEVKYVAGETNAKENENSSPVAGAFGVFSTISTAVQSTGKSVISGGLDALEFIGKKTMDVIAEGDPGFKRTKGLMNRNATLSQ

SEQ ID NO: 69079 - protein, 63 aa, Homo sapiens
  MOD_RES (1)..(1): Any amino acid
XGERHPQTIVLMSDLATTLDAQGRFDEAYIYMQRASDLARQINHPELHMVLSNLAAVLMHRGR

SEQ ID NO: 69080 - protein, 163 aa, Homo sapiens
MMAQKSQGSDNLQEGQEKSKREILKCTKSAWAPLDEWLPPDPEEESQSLTIPMLEDSKQESIQQWLDSGFFVSANENFQQVIDRTVSLYEQGMVQMTVKDYMRSLHQFSETPILSRGTSFNSCYSTASVPQSIPEWLEFWEIDPVEILLDLGFGADEPDICMQ

SEQ ID NO: 69081 - protein, 140 aa, Homo sapiens
MEQFNPSLRNFIAMGKNYEKALAGVTYAAKGYFDALVKMGELASESQGSKELGDVLFQMAEVHRQIQNQLEEMLKSFHNELLTQLEQKVELDSRYLSAALKKYQTEQRSKGDALDKCQAELKKLRKKSQGSKNPQKYSDK

SEQ ID NO: 69082 - protein, 39 aa, Homo sapiens
MAATGTAAAAATGRLLLLLLVGLTAPALALAGYIEWVNL

SEQ ID NO: 69083 - protein, 68 aa, Homo sapiens
SYRASEQKLRVELLSASSLLPLDSNAWCLLSRAARLGHASCSPCWTTTRWGPTTWKARPSCRCVRCPG

SEQ ID NO: 69084 - protein, 117 aa, Homo sapiens
MNSRQAWRLFLSQGRGDRWVSRPRGHFSPALRREFFTTTTKEGYDRRPVDITPLEQRKLTFDTHALVQDLETHGFDKTQAETIVSALTALSNVSLDTIYKEMVTQAQQVIFILFSRK

SEQ ID NO: 69085 - protein, 243 aa, Homo sapiens
MLLENLTDNESENTNLKKKVFEKEAHIQELSCLFQSEKSLETKIAKWNLQSRMNKNEAIVMKEASRQKTVALKKASKVYKQRLDHFTGAIEKLTSQIRDQEAKLSETISASNAWKSHYEKIVIEKTELEVQIETMKKQIINLLEDLKKMEDHGKNSCEEILRKVHSIEYENETLNLENTKLKTTLAALKDEVVSVENELSELQEVEKKQKTLIEMYKTQVQKLQEAAEIVKSRCENLLHKNNQ

SEQ ID NO: 69086 - protein, 118 aa, Homo sapiens
MRKRTEPVALEHERCAAAGSSSSGSAAAALDADCRLKQNLRLTGPAAAEPRCAADAGMKRALGRRKGVWLRLRKILFCVLGLYIAIPFLIKLCPGIQAKLIFLNFGPCAPSQLEDFLC

SEQ ID NO: 69087 - protein, 65 aa, Homo sapiens
MDKEYVGFAALPNQLHRKSVKKGFDFTLMVAGESGLGKSTLINSLFLTNLYEDRQVPEASAGFRW

SEQ ID NO: 69088 - protein, 45 aa, Homo sapiens
  MOD_RES (1)..(1): Any amino acid
XNKKLSEQLQQKIETILSKSLLLCYLTTLLIHEDSYHGPPESCFL

SEQ ID NO: 69089 - protein, 83 aa, Homo sapiens
MKNCVTGESSASKVSANVDSRIEMDSNKGLFIPFPNREIKDSLSTSATQGNGTRDQKLDTFPLGTQTQEVARREMPSDNHQED

SEQ ID NO: 69090 - protein, 178 aa, Homo sapiens
MVSQSTVRQDSPVEPWEGISDHSGIIDGSPRLLNTDHPPCQLDIRLMRHKAVWINPQDVQQQPQDLQSQVPAAGNSGTHFVTDAASPSGPSPSCLGDSLAETTLSEDTTDSVGSASPHGSSEKSSSFSLSSTEVHMVRPGYSHRVSLPTSPGILATSPYPETDSAFFEPSHLTSAADE

SEQ ID NO: 69091 - protein, 35 aa, Homo sapiens
GVEDDSRLLLGIYEHGYGNWELIKTDPELKLTDKL

SEQ ID NO: 69092 - protein, 191 aa, Homo sapiens
MALDIFSSYTGRDIPELPEREEGEGEESELQNTAYSNWNQPRRVELWREPSKSLGISIVGGRGMGSRLSNGEVMRGIFIKHVLEDSPAGKNGTLKPGDRIVEAPSQSESEPEKAPLCSVPPPPPSAFAEMGSDHTQSSASKISQDVDKEDEFGYSWKNIRERYGTLTGELHMIELEKGHSGLGLSLAGNKD

SEQ ID NO: 69093 - protein, 130 aa, Homo sapiens
MSRTNRPPLSLSRMIRKMKLPGRENKTAVVVGTITDDVRVQEVPKLKVCALRVTSRARSRILRAGGKILTFDQLALDSPKGCGTVLLSGPRKGREVYRHFGKAPGTPHSHTKPYVRSKGRKFERARGRRA

SEQ ID NO: 69094 - protein, 265 aa, Homo sapiens
  MOD_RES (1)..(1): Any amino acid
XYKDLWNMSDDKPFLCTAPGCGQRFTNEDHLAVHKHKHEMTLKFGPARNDSVIVADQTPTPTRFLKNCEEVGLFNELASPFENEFKKASEDDIKKMPLDLSPLATPIIRSKIEEPSVVETTHQDSPLPHPESTTSDEKEVPLAQTAQPTSAIVRPASPAHTTPQTQSTSGRRRRAANEDPDEKRRKFLERNRAAASRCRQKRKVWVQSLEKKAEDLSSLNGQLQLLIKMIVQKTFQCRVVHIQKLYSIVRSAHPMESVQPPRQKL

SEQ ID NO: 69095 - protein, 39 aa, Homo sapiens
MNWAAFGGSEFFIPEGIQIDSRCPLSRNITECERKLPIL

SEQ ID NO: 69096 - protein, 273 aa, Homo sapiens
MDPVPGTDSAPLAGLAWSSASAPPPRGFSAISCTVEGAPASFGKSFAQKSGYFLCLSSLGSLENPQENVVADIQIVVDKSPLPLGFSPVCDPMDSKASVSKKKRMCVKLLPLGATDTAVFDVRLSGKTKTVPGYLRIGDMGGFAIWCKKAKAPRPVPKPRGLSRDMQGLSLDAASQPSKGGLLERTASRLGSRASTLRRNDSIYEASSLYGISAMDGVPFTLHPRFEGKSCSPLAGLPSSRNTLKAARQTHIRCLESGGFGCSPRTSLALRLT

SEQ ID NO: 69097 - protein, 70 aa, Homo sapiens
HCAQIQVKLANPFRIGQAHTVRVDGEPWAQGPCTVTITHKTHAMMLYFSGEQTDDDISSTSDQEDIKATE

SEQ ID NO: 69098 - protein, 182 aa, Homo sapiens
MVTGFLGFGAILWERKGCLSTYFCLLLVIFLVELVAGVLAHVYYQRLSDELKQHLNRTLAENYGQPGATQITASVDRLQQDFKCCGSNSSADWQHSTYILLREAEGRQVPDSCCKTVVVRCGQRAHPSNIYKVEGGCLTKLEQFLADHLLLMGAVGIGVACLQICGMVLTCCLHQRLQRHFY

SEQ ID NO: 69099 - protein, 173 aa, Homo sapiens
MYPELQIARVEQATQAIPMERWCGGSRSGSCAHPHHQVVPFRCLPGEFVSEALLVPEGCRFLHQERMDQCESSTRRHQEAQEACSSQGLILHGSGMLLPCGSDRFRGVEYVCCPPPGTPDPSGTAVGDPSTRSWPPGSRVEGAEDEEEEESFPQPVDDYFVEPPQAEEEEETV

SEQ ID NO: 69100 - protein, 134 aa, Homo sapiens
VASPVVAGAVTLLVSTVQKRELVNPASMKQALIASARRLPGVNMFEQGHGKLDLLRAYQILNSYKPQARSVHRPADGSFSPSLGSGRIFPLHKIQASKQKMMTKHRILGVLGEVLLLLLQGAAGRTGSCFRLLM

SEQ ID NO: 69101 - protein, 139 aa, Homo sapiens
  MOD_RES (1)..(1): Any amino acid
XHPQPILDRYTEPFAIFQLPYEKACKNKLFCVAELQLATTVSQQELVVGLTKELTLNINLTNSGEDSYMTSMALNYPRNLQLKRMQKAHVSVVWQLEENAFPNRTADITVTVTKPSIMYVNTGQGLSHHKEFLFHVHGE

SEQ ID NO: 69102 - protein, 127 aa, Homo sapiens
MKLPSISCPHECFEAILSLDTGYRAPVTLVRKGCWTGPPAGQTQSNADALPPDYSVVRGCTTDKCNAHLMTHDALPNLSQAPDPPTLSGAECYACIGVHQDDCAIGRSRRVQCHQDQTACFQGNGRM

SEQ ID NO: 69103 - protein, 150 aa, Homo sapiens
  MOD_RES (1)..(1): Any amino acid
XARLVLLAGAAALASGSQGDREPVYRDCVLQCEEQNCSGGALNHFRSRQPIYMSLAGWTCRDDCKYECMWVTVGLYLQEGHKVPQFHGKWPFSRFLFFQEPASAVASFLNGLASLVMLCRYRTFVPASSPMYHTCVAFAWMRKLRHSKAK

SEQ ID NO: 69104 - protein, 1390 aa, Homo sapiens
MPSGSFMLVNASGRPEGQRAHLLLPQLKENDTHCIDFHYFVSSKSNSPPGLLNVYVKVNNGPLGNPIWNISGDPTRTWNRAELAISTFWPNFYQVIFEVITSGHQGYLAIDEVKVLGHPCTRTPHFLRIQNVEVNAGQFATFQCSAIGRTVAGDRLWLQGIDVRDAPLKEIKVTSSRRFIASFNVVNTTKRDAGKYRCMIRTEGGVGISNYAELVVKEPPVPIAPPQLASVGATYLWIQLNANSINGDGPIVAREVEYCTASGSWNDRQPVDSTSYKIGHLDPDTEYEISVLLTRPGEGGTGSPGPALRTRTKCADPMRGPRKLEVVEVKSRQITIRWEPFGYNVTRCHSYNLTVHYCYQVGGQEQVREEVSWDTENSHPQHTITNLSPYTNVSVKLILMNPEGRKESQELIVQTDEDLPGAVPTESIQGSTFEEKIFLQWREPTQTYGVITLYEITYKAVSSFDPEIDLSNQSGRVSKLGNETHFLFFGLYPGTTYSFTIRASTAKGFGPPATNQFTTKISAPSMPAYELETPLNQTDNTVTVMLKPAHSRGAPVSVYQIVVEEERPRRTKKTTEILKCYPVPIHFQNASLLNSQYYFAAEFPADSLQAAQPFTIGDNKTYNGYWNTPLLPYKSYRIYFQAASRANGETKIDCVQVATKGAATPKPVPEPEKQTDHTVKIAGVIAGILLFVIIFLGVVLVMKKRKLAKKRKETMSSTRQEMTVMVNSMDKSYAEQGTNCDEAFSFMDTHNLNGRSVSSPSSFTMKTNTLSTSVPNSYYPDETHTMASDTSSLVQSHTYKKREPADVPYQTGQLHPAIRVADLLQHITQMKCAEGYGFKEEYESFFEGQSAPWDSAKKDENRMKNRYGNIIAYDHSRVRLQTIEGDTNSDYINGNYIDGYHRPNHYIATQGPMQETIYDFWRMVWHENTASIIMVTNLVEVGRVKCCKYWPDDTEIYKDIKVTLIETELLAEYVIRTFAVEKRGVHEIREIRQFHFTGWPDHGVPYHATGLLGFVRQVKSKSPPSAGPLVVHCSAGAGRTGCFIVIDIMLDMAEREGVVDIYNCVRELRSRRVNMVQTEEQYVFIHDAILEACLCGDTSVPASQVRSLYYDMNKLDPQTNSSQIKEEFRTLNMVTPTLRVEDCSIALLPRNHEKNRCMDILPPDRCLPFLITIDGESSNYINAALMDSYKQPSAFIVTQHPLPNTVKDFWRLVLDYHCTSVVMLNDVDPAQLCPQYWPENGVHRHGPIQVEFVSADLEEDIISRIFRIYNAARPQDGYRMVQQFQFLGWPMYRDTPVSKRSFLKLIRQVDKWQEEYNGGEGRTVVHCLNGGGRSGTFCAISIVCEMLRHQRTVDVFHAVKTLRNNKPNMVDLLDQYKFCYEVALEYLNSG

SEQ ID NO: 69105 - protein, 245 aa, Homo sapiens
LRTGDIILHSWSSFPDELEEMLNPMGTVQTNPYTENATALHVKFPENKKQPYYYPPFDKSRGGKKFLPVLKEILDRDPLSQLCENEMDLIWTLRQDCREIFPQSLPKLLLSIKWNKLEDVAQLQALLQIWPKLPPREALELLDFNYPDQYVREYAVGCLRQMSDEELSQYLLQLVQVLKYEPFLDCALSRFLLERALGNRRIGQFLFWHLRSEVHIPAVSVQFGVILEAYCRGSVGHMKVLSKQC

SEQ ID NO: 69106 - protein, 357 aa, Homo sapiens
SPERFLQLGAKVPKGALLLGPPGCGKTLLAKAVATEAQVPFLAMAGPEFVEVIGGLGAARVRSLFKEARARAPCIVYIDEIDAVGKKRSTTMSGFSNTEEEQTLNQLLVEMDGMGTTDHVIVLASTNRADILDGALMRPGRLDRHVFIDLPTLQERREIFEQHLKSLKLTQSSTFYSQRLAELTPGFSGADIANICNEAALHAAREGHTSVHTLNFEYAVERVLAGTAKKSKILSKEEQKVVAFHESGHALVGWMLEHTEAVMKVSITPRTNAALGFAQMLPRDQHLFTKEQLFERMCMALGGRASEALSFNEVTSGEEQRRGPWRGTGRPEEGHPHRLLHGEAVWDGTWHRAHLLP

SEQ ID NO: 69107 - protein, 866 aa, Homo sapiens
MSGARGEGPEAGAGGAGGRAAPENPGGVLSVELPGLLAQLARSFALLLPVYALGYLGLSFSWVLLALALLAWCRRSRGLKALRLCRALALLEDEERVVRLGVRACDLPAWVHFPDTERAEWLNKTVKHMWPFICQFIEKLFRETIEPAVRGANTHLSTFSFTKVDVGQQPLRINGVKVYTENVDKRQIILDLQISFVGNCEIDLEIKRYFCRAGVKSIQIHGTMRVILEPLIGDMPLVGALSIFFLRKPLLEINWTGLTNLLDVPGLNGLSDTIILDIISNYLVLPNRITVPLVSEVQIAQLRFPVPKGVLRIHFIEAQDLQGKDTYLKGLVKGKSDPYGIIRVGNQIFQSRVIKENLSPKWNEVYEALVYEHPGQELEIELFDEDPDKDDFLGSLMIDLIEVEKERLLDEWFTLDEVPKGKLHLRLEWLTLMPNASNLDKVLTDIKADKDQANDGLSSALLILYLDSARNLPSNPLEFNPDVLKKTAVQRALKSGKKISSNPNPVVQMSVGHKAQESKIRYKTNEPVWEENFTFFIHNPKRQDLEVEVRDEQHQCSLGNLKVPLSQLLTSEDMTVSQRFQLSNSGPNSTIKMKIALRVLHLEKRERPPDHQHSAQVKRPSVSKEGRKTSIKSHMSGSPGPGGSNTAPSTPVIGGSDKPGMEEKAQPPEAGPQGLHDLGRSSSSLLASPGHISVKEPTPSIASDISLPIATQELRQRLRQLENGTTLGQSPLGQIQLTIRHSSQRNKLIVVVHACRNLIAFSEDGSDPYVRMYLLPDKRRSGRRKTHVSKKTLNPVFDQSFDFSVSLPEVQRRTLDVAVKNSGGFLSKDKGLLGKVLVALASEELAKGWTQWYDLTEDGTRPQAMT

SEQ ID NO: 69108 - protein, 121 aa, Homo sapiens
MEKLASKEKFKAPARALPQLSMVSTKPHWQQAAPSFHLSVKQDDESPEPFSVKNEQSHAEYMERFGKKGKLPHQVDDSYVGPSTSKSKGKSPHKERENFRSTLVNVIMQQDADLDSAVPDG

SEQ ID NO: 69109 - protein, 104 aa, Homo sapiens
MMMGSARVAELLLLHGAEPNCADPATLTRPVHDAAREGFLDTLVVLHRAGARLDVRDAWGRLPVDLAEELGHRDVARYLRAAAGGTRGSNHARIDAAEGPSGED

SEQ ID NO: 69110 - protein, 175 aa, Homo sapiens
MFPSWPTCLELERYLQTEPRRISETFGEDLDCFLHASPPPCIEESFRRLDPLLLPVEAAICEKSSAVDILLSRDKLLSETCLSLQPASSSLDSYTAVNQAQLNAVTSLTPPSSPELSRHLVKTSQTLSAVDGTVTLKLVAKKAALSSVKVGGVATAAAAVTAAGAVKSGQSDSDQ

SEQ ID NO: 69111 - protein, 181 aa, Homo sapiens
MGSLSTANVEFCLDVFKELNSNNIGDNIFFSSLSLLYALSMVLLGARGETEEQLEKVLHFSHTVDSLKPGFKDSPKCSQAGRIHSEFGVEFSQINQPDSNCTLSIANRLYGTKTMAFHQQYLSCSEKWYQARLQTVDFEQSTEETRKTINAWVENKTNGKVANLFGKSTIDPSSVMVLVNA

SEQ ID NO: 69112 - protein, 72 aa, Homo sapiens
MDWKLEGSTQKVESPVLQGQEGILEETGEDGLPEGFQLLQIDAEGECQEGEILATGSTAWCSFSNNFVFWII

SEQ ID NO: 69113 - protein, 81 aa, Homo sapiens
MLLAPQGRSFSKKRMGLNRWKRFTRKPSPKRVEKASEFAVSNAFFTRNSDLPRSPWGQITDLKTSEQIEDHDEIYAEGAGQ

SEQ ID NO: 69114 - protein, 124 aa, Homo sapiens
MARDLVMFRDVAVDFSQEEWECLNSYQRNLYRDVILENYSNLVSLGCSISKPDVITLLEQGKEPWMVVRDEKRRWTLDLESRYDTKKLFQGKDIYEMNLSQWKVMERIKSCGLEEQESPHEVCF

SEQ ID NO: 69115 - protein, 381 aa, Homo sapiens
MGGFLPKAEGPGSQLQKLLPSFLVREQDWDQHLDKLHMLQQKRILESPLLRASKENDLSVLRQLLLDCTCDVRQRGALGETALHIAALYDNLEAALVLMEAAPELVFEPTTCEAFAGQTALHIAVVNQNVNLVRALLTRRASVSARATGTAFRHSPRNLIYFGEHPLSFAACVNSEEIVRLLIEHGADIRAQDSLGNTVLHILILQPNKTFACQMYNLLLSYDGHGDHLQPLDLVPNHQGLTPFKLAGVEGNTVMFQHLMQKRRHIQWTYGPLTSILYDLTEIDSWGEELSFLELVVSSDKREARQILEQTPVKELVSFKWNKYGRPYFCILAALYLLYMICFTTCCVYRPLKFRGGNRTHSRDITILQQKLLQVILLRRG

SEQ ID NO: 69116 - protein, 143 aa, Homo sapiens
  MOD_RES (1)..(1): Any amino acid
XAAHLWPQLTGLGRIERGQPCNACGDQCPGFALHKWRKICLHCKCPQEEHMVTVMPLEMEKTISKLMFDFQRNSTSDDDSGCALEEYAWVPPGLKPEQVHQYYSCLPEEKVPYVNSPGEKLRIKQLLHQLPPHDNEVRYCNSL

SEQ ID NO: 69117 - protein, 1622 aa, Homo sapiens
MADRSLEGMALPLEVRARLAELELELSEGDITQKGYEKKRSKLIGAYLPQPPTANGAAVVRCRLQHSEGAPRRTFRSAHIGVCDVREAAARERVASTAGNRPLFYFRFGVDQALPQERRAPVTPSSASRYHRRRSSGSRDERYRSDVHTEAVQAALAKHKERKMAVPMPSKRRSLVVQTSMDAYTPPDTSSGSEDEGSVQGDSQGTPTSSQGSINMEHWISQAIHGSTTSTTSSSSTQSGGSGAAHRLADVMAQTHIENHSAPPDVTTYTSEHSIQVERPQGSTGSRTAPKYGNAELMETGDGVPVSSRVSAKIQQLVNTLKRPKRPPLREFFVDDFEELLEVQQPDPNQPKPEGAQMLAMRGEQLGVVTNWPPSLEAALQRWGTISPKAPCLTTMDTNGKPLYILTYGKLWTRSMKVAYSILHKLGTKQEPMVRPGDRVALVFPNNDPAAFMAAFYGCLLAEVVPVPIEVPLTRKDAGSQQIGFLLGSCGVTVALTSDACHKGLPKSPTGEIPQFKGWPKLLWFVTESKHLSKPPRDWFPHIKDANNDTAYIEYKTCKDGSVLGVTVTRTALLTHCQALTQACGYTEAETIVNVLDFKKDVGLWHGILTSVMNMMHVISIPYSLMKVNPLSWIQKVCQYKAKVACVKSRDMHWALVAHRDQRDINLSSLRMLIVADGANPWSISSCDAFLNVFQSKGLRQEVICPCASSPEALTVAIRRPTDDSNQPPGRGVLSMHGLTYGVIRVDSEEKLSVLTVQDVGLVMPGAIMCSVKPDGVPQLCRTDEIGELCVCAVATGTSYYGLSGMTKNTFEVFPMTSSGAPISEYPFIRTGLLGFVGPGGLVFVVGKMDGLMVVSGRRHNADDIVATALAVEPMKFVYRGRIAVFSVTVLHDERIVIVAEQRPDSTEEDSFQWMSRVLQAIDSIHQVGVYCLALVPANTLPKTPLGGIHLSETKQLFLEGSLHPCNVLMCPHTCVTNLPKPRQKQPEIGPASVMVGNLVSGKRIAQASGRDLGQIEDNDQARKFLFLSEVLQWRAQTTPDHILYTLLNCRGAIANSLTCVQLHKRAEKIAVMLMERGHLQDGDHVALVYPPGIDLIAAFYGCLYAGCVPITVRPPHPQNIATTLPTVKMIVEVSRSACLMTTQLICKLLRSREAAAAVDVRTWPLILDTDDLPKKRPAQICKPCNPDTLAYLDFSVSTTGMLAGVKMSHAATSAFCRSIKLQCELYPSREVAICLDPYCGLGFVLWCLCSVYSGHQSILIPPSELETNPALWLLAVSQYKVRDTFCSYSVMELCTKGLGSQTESLKARGLDLSRVRTCVVVAEERPRIALTQSFSKLFKDLGLHPRAVSTSFGCRVNLAICLQPHRLWTLAEQGTSGPDPTTVYVDMRALRHDRVRLVERGSPHSLPLMESGKILPGVRIIIANPETKGPLGDSHLGEIWVHSAHNASGYFTIYGDESLQSDHFNSRLSFGDTQTIWARTGYLGFLRRTELTDANGERHDALYVVGALDEAMELRGMRYHPIDIETSVIRAHKSVTECAVFTWTNLLVVVVELDGSEQEALDLVPLVTNVVLEEHYLIVGVVVVVDIGVIPINSRGEKQRMHLRDGFLADQLDPIYVAYNM

SEQ ID NO: 69118 - protein, 571 aa, Homo sapiens
MARLTKRRQADTKAIQHLWAAIEIIRNQKQIANIDRITKYMSRVHGMHPKETTRQLSLAVKDGLIVETLTVGCKGSKAGIEQEGYWLPGDEIDWETENHDWYCFECHLPGEVLICDLCFRVYHSKCLSDEFRLRDSSSPWQCPVCRSIKKKNTNKQEMGTYLRFIVSRMKERKVNEGKYRSYEEFKADAQLLLHNTVIFYGADSEQADIARMLYKDTCHELDELQLCKNCFYLSNARPDNWFCYPCIPNHELVWAKMKGFGFWPAKVMQKEDNQVDVRFFGHHHQRAWIPSENIQDITVNIHRLHVKRSMGWKKACDELELHQRFLREGRFWKSKNEDRGEEEAESSISSTSNEQLKVTQEPRAKKGRRNQSVEPKKEEPEPETEAVSSSQEIPTMPQPIEKVSVSTQTKKLSASSPRMLHRSTQTTNDGVCQSMCHDKYTKIFNDFKDRMKSDHKRETERVVREALEKLRSEMEEEKRQAVNKAVANMQGEMDRKCKQVKEKCKEEFVEEIKKLATQHKQLISQTKKKQWCYNCEEEAMYHCCWNTSYCSIKCQQEHWHAEHKRTCRRKR

SEQ ID NO: 69119 - protein, 18 aa, Homo sapiens
  MOD_RES (1)..(1): Any amino acid
XFGDQINNDNWTESLLPW

SEQ ID NO: 69120 - protein, 88 aa, Homo sapiens
MTRDEALPDSHSAQDFYENYEPKEILGRGVSSVVRRCIHKPTSQEYAVKVIDVTGGGSFSPEEVRELREATLKEVDILRKVSGHPNIR

SEQ ID NO: 69121 - protein, 93 aa, Homo sapiens
MQPISLPRVQQVPQQVQPVQHVYPAQVQYVEGGDAVYTNGAIRTAYTYNPEPQMYAPSSTASYFEAPGGAQVTVAASSPPAVPSHSMVGITMD

SEQ ID NO: 69122 - protein, 141 aa, Homo sapiens
MQMVPKFCFPFDVEREPPSPAVQHFTFALTDLAGNRRFGFCRLRAGTQSCLCILSHLPWFEVFYKLLNTVGDLLAQDQVTEAEELLQNLFQQSLSGPQASVGLELGSGVTVSSGQGIPPPTRGNSKPLSCFVAPDSGRLPS

SEQ ID NO: 69123 - protein, 375 aa, Homo sapiens
METSRSPSPQFAPQKLTDKPPLLIQDEDSTRIERVMDNNTTVKMVPIKIVHSESQPEKESRQSLACPAEPPALPHGLEKDQIKTLSTSEQFYSRFCLYTRQGAEPEAPHRAQPAEPQPLGTQVPPEKDRCTSPPGLSYMKAKEKTVEDLKSEELAREIVGKDKSLADILDPSVKIKTTMDLMEGIFPKDEHLLEEAQQRRKLLPKIPSPRSTEERKEEPSVPAAVSLATNSTYYSTSAPKAELLIKMKDLQEQQEHEEDSGSDLDHDLSVKKQELIESISRKLQVLREARESLLEDVQANTVLGAEVEAIVKGVCKPSEFDKFRMFIGDLDKVVNLLLSLSGRLARVENALNNLDDGASPGDRQSLLEKQRVLIQ

SEQ ID NO: 69124 - protein, 64 aa, Homo sapiens
MASVALEDVAVNFTREEWALLGPCQKNLYKDVMQETIRNLDCVVMKWKDQNIEDQYRYPRKNLR

SEQ ID NO: 69125 - protein, 153 aa, Homo sapiens
MEADLSGFNIDAPRWDQRTFLGRVKHFLNITDPRTVFVSERELDWAKVMVEKSRMGVVPPGTQVEQLLYAKKLYDSAFHPDTGEKMNVIGRMSFQLPGGMIITGFMLQFYRTMPAVIFWQWVNQSFNALVNYTNRNAASPTSVSLAASHHGKA

SEQ ID NO: 69126 - protein, 79 aa, Homo sapiens
MMATPNQTACNAESPVALEEAKTSGAPGSPQTPPERHDSGGSLPLTPRMESHSEDEDLAGAVGGLGWNSRSPRTQSPGG

SEQ ID NO: 69127 - protein, 1012 aa, Homo sapiens
MKNKLQDPSNQKCGGRKKTVSFSSMPSEKKISSANDCISFMQAGCELKKVRPNSRIYNRFFTLDTDLQALRWEPSKKDLEKAKLDISAIKEIRLGKNTETFRNNGLADQICEDCAFSILHGENYESLDLVANSADVANIWVSGLRYLVSRSKQPLDFMEGNQNTPRFMWLKTVFEAADVDGNGIMLEDTSVELIKQLNPTLKEAKIRLKFKEIQKSKEKLTTRVTEEEFCEAFCELCTRPEVYFLLVQISKNKEYLDANDLMLFLEAEQGVTHITEDICLDIIRRYELSEEGRQKGFLAIDGFTQYLLSSECDIFDPEQKKVAQDMTQPLSHYYINASHNTYLIEDQFRGPADINGYIRALKMGCRSVELDVSDGSDNEPILCNRNNMTTHVSFRSVIEVINKFAFVASEYPLILCLGNHCSLPQQKVMAQQMKKVFGNKLYTEAPLPSESYLPSPEKLKRMIIVKGKKLPSDPDVLEGEVTDEDEEAEMSRRMSVDYNGEQKQIRLCRELSDLVSICKSVQYRDFELSMKSQNYWEMCSFSETEASRIANEYPEDFVNYNKKFLSRIYPSAMRIDSSNLNPQDFWNCGCQIVAMNFQTPGPMMDLHTGWFLQNGGCGYVLRPSIMRDEVSYFSANTKGILPGVSPLALHIKIISGQNFPKPKGACAKGDVIDPYVCIEIHGIPADCSEQRTKTVQQNSDNPIFDETFEFQVNLPELAMIRFVVLDDDYIGDEFIGQYTIPFECLQPGYRHVPLRSFVGDIMEHVTLFVHIAITNRSGGGKAQKRSLSVRMGKKVREYTMLRNIGLKTIDDIFKIAVHPLREAIDMRENMQNAIVSIKELCGLPPIASLKQCLLTLSSRLITSDNTPSVSLVMKDSFPYLEPLGAIPDVQKKMLTAYDLMIQESRFLIEMADTVQEKIVQCQKAGMEFHEELHNLGAKEGLKGRKLNKATESFAWNITVLKGQGDLLKNAKNEAIENMKQIQLACLSCGLSKAPSSSAEAKSKRSLEAIEEK

SEQ ID NO: 69128 - protein, 536 aa, Homo sapiens
  MOD_RES (1)..(1): Any amino acid
XQSRGKRVWWKEMTPSLSAEENRMYNKMWHQTQEALGALLDKEPQKMIEPQRNQVFIFQTLATFYVKYVQIFRNLENVYDQFVHPQKRILIRKVLDGVMGRILELKNEMVELELTEFHYFDDILQDLKLAPQQLDIPIPKYFLKEKLEVIKGREKILAQILADSGIDTSDMKYPVKSIPFDEAVKLIQIAERARQGRLRALFMKQIYLQEYRAKQSKMLGKKVTDTWAAALRIQKVWRRFHQRKETEKLREEEMIFLGMNPPPLFNEVSATVIQAEKVDRLRNEVQIKHEEDYREALVTIKNDLKLIEGVDIKENLQDQIRHWFIECRNLTGTFPDYPDVEEGGSAIIFSDKTIQQVIEDIIANQEEEEKNKKKKKKKEKQPKKAKKQKKGTKEKNKEEDEKWKMSPSLFLPAMKEGCNAYKEIWMKKDESWNFSQDYDPELIKEEKRKELQSEIRIQVDELMRQELKNLKLAVDRERERPVKAGKKKDKKKGKKGKKKEKKAKKDKDLTADRTIESLYKELVEEGLLIQALKVNL

SEQ ID NO: 69129 - protein, 122 aa, Homo sapiens
MASYYEILDVPRSASADDIKKAYRRKALQWHPDKNPDNKEFAEKKFKEVAEAYEVLSDKHKREIYDRYGREGLTGTGTGPSRAEAGSGGPGFTFTFRSPEEVFREFFGSGDPFAELFDDLGP

SEQ ID NO: 69130 - protein, 213 aa, Homo sapiens
MATTVSTQRGPVYIGELPQDFLRITPTQQQRQVQLDAQAAQQLQYGGAVGTVGRLNITVVQRAFSMDDRIAWTHITIPESLRQGKVEDKWYSLSGRQGDDKEGMINLVMSYALLPAAMVMPPQPVVLMPTVYQQGVGYVPITGMPAVCSPGMVPVALPPAAVNAQPRCSEEDLKAIQDMFPNMDQEVIRSVLEAQRGNKDAAINSLLQMGEEP

SEQ ID NO: 69131 - protein, 729 aa, Homo sapiens
MKKMSRNVLLQMEEEEDDDDGDIVLENLGQTIVPDLGSLESQHDFRTPEFEEFNGKPDSLFFNDGQRRIDFVLVYEDESRKETNKKGTNEKQRRKRQAYESNLICHGLQLEATRSVLDDKLVFVKVHAPWEVLCTYAEIMHIKLPLKPNDLKNRSSAFGTLNWFTKVLSVDESIIKPEQEFFTAPFEKNRMNDFYIVDRDAFFNPATRSRIVYFILSRVKYQVINNVSKFGINRLVNSGIYKAAFPLHDCKFRRQSEDPSCPNERYLLYREWAHPRSIYKKQPLDLIRKYYGEKIGIYFAWLGYYTQMLLLAAVVGVACFLYGYLNQDNCTWSKEVCHPDIGGKIIMCPQCDRLCPFWKLNITCESSKKLCIFDSFGTLVFAVFMGVWVTLFLEFWKRRQAELEYEWDTVELQQEEQARPEYEARCTHVVINEITQEEERIPFTAWGKCIRITLCASAVFFWILLIIASVIGIIVYRLSVFIVFSAKLPKNINGTDPIQKYLTPQTATSITASIISFIIIMILNTIYEKVAIMITNFELPRTQTDYENSLTMKMFLFQFVNYYSSCFYIAFFKGKFVGYPGDPVYWLGKYRNEECDPGGCLLELTTQLTIIMGGKAIWNNIQEVLLPWIMNLIGRFHRVSGSEKITPRWEQDYHLQPMGKLGLFYEYLEMSHDHSFHVGHDPPPSVLLVLLRPSLRGPHFLHHGRVHQQHSLHLQSRRLQKQKQGKPVL

SEQ ID NO: 69132 - protein, 113 aa, Homo sapiens
MVQSIEFTQIEMKVMEGLQFGNECLNKMHQVMSIEEVERILDETQEAVEYQRQIDELLAGSFTQEDEDAILEELSAITQEQIELPEVPSEPLPEKIPENVPVKARPRQAELVA

SEQ ID NO: 69133 - protein, 149 aa, Homo sapiens
GWAASDDPIEKVIEGINRGLSNAEREVGKALDGINSGITHAGREVEKVFNGLSNMGSHTGKELDKGVQGLNHGMDKVAHEINHGIGQAGKEAEKLGHGVNNAAGQGNHQSGSSSHQGGATTTPLASGASVNTPFINLPALWRSVANIMP

SEQ ID NO: 69134 - protein, 1270 aa, Homo sapiens
MEERRPHLDARPRNSHTNHRGPVDGELPPRARNQANNPPANALRGGASHPGRHPRANNHPAAYWQREERFRAMGRNPHQGRRNQEGHASDEARDQRHDQENDTRWRNGNQDCRNRRPPWSNDNFQQWRTPHQKPTEQPQQAKKLGYKFLESLLQKDPSEVVITLATSLGLKELLSHSSMKSNFLELICQVLRKACSSKMDRQSVLHVLGILKNSKFLKVCLPAYVVGMITEPIPDIRNQYPEHISNIISLLQDLVSVFPASSVQETSMLVSLLPTSLNALRASGVDIEEETEKNLEKVQTIIEHLQEKRREGTLRVDTYTLVQPEAEDHVESYRTMPIYPTYNEVHLDERPFLRPNIISGKYDSTAIYLDTHFRLLREDFVRPLREGILELLQSFEDQGLRKRKFDDIRIYFDTRIITPMCSSSGIVYKVQFDTKPLKFVRWQNSKRLLYGSLVCMSKDNFETFLFATVSNREQEDLCRGIVQLCFNEQSQQLLAEVQPSDSFLMVETTAYFEAYRHVLEGLQEVQEEDVPFQRNIVECNSHVKEPRYLLMGGRYDFTPLIENPSATGEFLRNVEGLRHPRINVLDPGQWPSKEALKLDDSQMEALQFALTRELAIIQGPPGTGKTYVGLKIVQALLTNESVWQISLQKFPILVVCYTNHALDQFLEGIYNCQKTSIVRVGGRSNSEILKQFTLRELRNKREFRRNLPMHLRRAYMSIMTQMKESEQELHEGAKTLECTMRGVLREQYLQKYISPQHWESLMNGPVQDSEWICFQHWKHSMMLEWLGLGVGSFTQSVSPAGPENTAQAEGDEEEEGEEESSLIEIAEEADLIQADRVIEEEEVVRPQRRKKEESGADQELAKMLLAMRLDHCGTGTAAGQEQATGEWQTQRNQKKKMKKRVKDELRKLNTMTAAEANEIEDVWQLDLSSRWQLYRLWLQLYQADTRRKILSYERQYRTSAERMAELRLQEDLHILKDAQVVGMTTTGAAKYRQILQKVEPRIVIVEEAAEVLEAHTIATLSKACQHLILIGDHQQLRPSANVYDLAKNFNLEVSLFERLVKVNIPFVRLNYQHRMCPEIARLLTPHIYQDLENHPSVLKYEKIKAKSNSCRALATGMRRKHKISGMILSFFKLTIRSARFQLLLSGSWTTASFPFSRSRFAVLICRDNKRMPAVKPVSTNTGSHGLQMPGALMGETFQKGSTSRDAAACLLSSLVNKIPPRSLTWASDCCISFSSASSCRTAYTSFSIFSILSRNLRMTSQWEKIKRIYK

SEQ ID NO: 69135 - protein, 246 aa, Homo sapiens
MRECISIHVGQAGVQIGNACWELYCLEHGIQPDGQMPSDKTIGGGDDSFNTFFSETGAGKHVPRAVFVDLEPTVIDEVRTGTYRQLFHPEQLITGKEDAANNYARGHYTIGKEIIDLVLDRIRKLADQCTGLQGFLVSTAVVEPYNSILTTHTTLEHSDCAFMVDNEAIYDICRRNLDIERPTYTNLNRLISQIVSSITASLRFDGALNVDLTEFQTNLVPYPRIHFPLATYAPVISAEKAYHEQL

SEQ ID NO: 69136 - protein, 122 aa, Homo sapiens
  MOD_RES (1)..(1): Any amino acid
XPNHVSLGLTSSQISTGINPALSYTQPQGIPDTESPVPVINLKDGTRLAGDDAPKRKDLEKWLKEHPGYVEDLGAFIPRMQLHEGRPKQKRHRCRNPNKLDVNSLTGEERVQLINRRNARKA

SEQ ID NO: 69137 - protein, 185 aa, Homo sapiens
  MOD_RES (1)..(1): Any amino acid
XKNVVKIQKHVTFNQVKGIFGFTDSDCIGKISFPAIQAAPSFSNSFPQIFRDRTDIQCLIPCAIDQDPYFRMTRDVAPRIGYPKPALLHSTFFPALQGAQTKMSASDPNSSIFLTDTAKQIKTKVSSGPGRGQPAGSETCPGGHTHTHTTAQCFGPQPPSHRSNAELQDCQLCSLQNSRQPVLPT

SEQ ID NO: 69138 - protein, 157 aa, Homo sapiens
AAAASAEPKIMKVTVKTPKEKEEFAVPENSSVQQTLELARNPAMMQEMMRNQDRALSNLESIPGGYNALRRMYTDIQEPMLSAAQEQFGGNPFASLVSNTSSGEGSQPSRTENRDPLPNPWAPQTSQSSSASSGTASTVGGTTGSTASGTSGQSTTA

SEQ ID NO: 69139 - protein, 110 aa, Homo sapiens
MYHSLSETRHPLQPEEQEVGIDPLSSYSNKSGGDSNKNGRRTSSTLDSEGTFNSYRKEWEELFVNNNYLATIRQKGINGQLRSSRFRSICWKLFLCVLPQDKSQWISRIE

SEQ ID NO: 69140 - protein, 46 aa, Homo sapiens
MPNIKIFSGSSHQDLSQKIADRLGLELGKVVTKKFSNQETWYCQPF

SEQ ID NO: 69141 - protein, 227 aa, Homo sapiens
  MOD_RES (1)..(1): Any amino acid
XKPYTSSARPFERKFESPKFNHNLLPSETAHKPDLSSKTPTSPKTLVKSHSLAQPPEFDSGVETFSIHAEKPKYQINNISTVPKAIPVSPSAVEEDEDEDGHTVVATARGIFNSNGGVLSSIETGVSIIIPQGAIPEGVEQEIYFKVCRDNSILPPLDKEKGETLLSPLVMCGPHGLKFLKPVELRLPHCASMTPDGDPKTWQNKCLPGDPNYLVGANCVSVLIDHF

SEQ ID NO: 69142 - protein, 97 aa, Homo sapiens
MGAAVLCASFMSFGVKRRWFALGAALQLAISTYAAYIGGYVHYGDWLKVRMYSRTVAIIGGFLVLASGAGELYRRKPRSRSLQSTGQVFLGIYLICV

SEQ ID NO: 69143 - protein, 183 aa, Homo sapiens
KIRLCVHCLQAVFPFKPPQRIEARTHLQLGSVLYHHTKNSEQARSHLEKANSVDAAKPLLRKAIQISQQTPYWHCRLLFQLAQLHTLEKDLVSACDLLGVGAEYARVVGSEYTRALFLLSKGMLLLMERKLQEVHPLLTLCGQIVENWQGNPIQKESLRVFFLVLQVTHYLDAGQVKSVKPCL

SEQ ID NO: 69144 - protein, 121 aa, Homo sapiens
MTEMSFLSSEVLVGDLMSPFDQSGLGAEESLGLLDDYLEVAKHFKPHGFSSDKAKAGSSEWLAVDGLVSPSNNSKEDAFSGTDWMLEKMDLKEFDLDALLGIDDLETMPDDLLTTLDDTCD

SEQ ID NO: 69145 - protein, 85 aa, Homo sapiens
MELVTFRDVAIEFSPEEWKCLDPAQQNLYRDVMLENYRNLVSLGFVISNPDLVTCLEQIKEPCNLKIHETAAKPPVVQHFWSLQF

SEQ ID NO: 69146 - protein, 58 aa, Homo sapiens
  MOD_RES (1)..(1): Any amino acid
XVKLEKRLDDSLLYLRDALPEYSTFDVNMKPVVQEPNQKVPVNEPGAIKYKTTGPRDS

SEQ ID NO: 69147 - protein, 102 aa, Homo sapiens
MIRSASWVWLLPPAGVRPCRAGAPRSRWRVRAEARSCGSRRRRRSSVLPSVLAPGRHHAGAHLPPAGLVPFALLEGRDGADARGAAVLGQDHLRQCHRDQES

SEQ ID NO: 69148 - protein, 112 aa, Homo sapiens
HLRWKGRYSENDVKNWTPELQKYLNFDPRTAQKIDNGIFWISWDDLCQYYDVIYLSWNPGLFKESTCIHRMILRIIENLSQWLYTRLMGKKFITQLTHLHTLMEFELTALII

SEQ ID NO: 69149 - protein, 1253 aa, Homo sapiens
MEDGKPVWAPHPTDGFQMGNIVDIGPDSLTIEPLNQKGKTFLALINQVFPAEEDSKKDVEDNCSLMYLNEATLLHNIKVRYSKDRIYTYVANILIAVNPYFDIPKIYSSEAIKSYQGKSLGTRPPHVFAIADKAFRDMKVLKMSQSIIVSGESGAGKTENTKFVLRYLTESYGTGQDIDDRIVEANPLLEAFGNAKTVRNNNSSRFGKFVEIHFNEKSSVVGGFVSHYLLEKSRICVQGKEERNYHIFYRLCAGASEDIREKLHLSSPDNFRYLNRGCTRYFANKETDKQILQNRKSPEYLKAGSMKDPLLDDHGDFIRMCTAMKKIGLDDEEKLDLFRVVAGVLHLGNIDFEEAGSTSGGCNLKNKSAQSLEYCAELLGLDQDDLRVSLTTRVMLTTAGGTKGTVIKVPLKVEQANNARDALAKTVYSHLFDHVVNRVNQCFPFETSSYFIGVLDIAGFEYFEHNSFEQFCINYCNEKLQQFFNERILKEEQELYQKEGLGVNEVHYVDNQDCIDLIEAKLVGILDILDEENRLPQPSDQHFTSAVHQKHKDHFRLTIPRKSKLAVHRNIRDDEGFIIRHFAGAVCYETTQFVEKNNDALHMSLESLICESRDKFIRELFESSTNNNKDTKQKAGKLSFISVGNKFKTQLNLLLDKLRSTGASFIRCIKPNLKMTSHHFEGAQILSQLQCSGMVSVLDLMQGGYPSRASFHELYNMYKKYMPDKLARLDPRLFCKALFKALGLNENDYKFGLTKVFFRPGKFAEFDQIMKSDPDHLAELVKRVNHWLTCSRWKKVQWCSLSVIKLKNKIKYRAEACIKMQKTIRMWLCKRRHKPRIDGLVKVGTLKKRLDKFNEVVSVLKDGKPEMNKQIKNLEISIDTLMAKIKSTMMTQEQIQKEYDALVKSSEELLSALQKKKQQEEEAERLRRIQEEMEKERKRREEDEKRRRKEEEERRMKLEMEAKRKQEEEERKKREDDEKRIQAEVEAQLARQKEEESQQQAVLEQERRDRELALRIAQSEAELISDEAQADLALRRGPAVLATKAAAGTKKYDLSKWKYAELRDTINTSCDIELLAACREEFHRRLKVYHAWKSKNKKRNTETEQRAPKSVTDYAQQNPAAQIPARQREIEMNRQQRFFRIPFIRPADQYKDPQSKKKGWWYAHFDGPWIARQMELHPDKPPILLVAGKDDMEMCELNLEETGLTRKRGAEILPRQFEEIWERCGGIQYLQNAIESRQARPTYATAMLQSLLK

SEQ ID NO: 69150 - protein, 178 aa, Homo sapiens
MGPTSVPLVKAHRSSVSDYVNYDIIVRHYNYTGKLNISADKENSIKLTSVVFILICCFIILENIFVLLTIWKTKKFHRPMYYFIGNLALSDLLAGVAYTANLLLSGATTYKLTPAQWFLREGSMFVALSASVFSLLAIAIERYITMLKMKLHNGSNNFRLFLLISACWVISLILGGLP

SEQ ID NO: 69151 - protein, 109 aa, Homo sapiens
MSDNPPRMEVCPYCKKPFKRLKSHLPYCKMIGPTIPTDQKVYQSKPATLPRAKKMKGPIKDLIKAKGKELETENEERNSKLVVDKPEQTVKTFPLPAVGLERAATTKAD

SEQ ID NO: 69152 - protein, 1607 aa, Homo sapiens [sequence omitted]

SEQ ID NO: 69153 - protein, 55 aa, Homo sapiens
MYSMANCLLLMKLASMHIRTRRGSAHDGKEHAAASATFRLAEIRLQKSLLVAEWL

SEQ ID NO: 69154 - protein, 58 aa, Homo sapiens
MAQDSVDLSCDYQFWMQKLSVWDQASTLETQQDTCLHVAQFQEFLRKMYEALKEMDSN

SEQ ID NO: 69155 - protein, 95 aa, Homo sapiens
MGDERPHYYGKHGTPQKYDPTFKGPIYNRGCTDIICCVFLLLAIVGYVAVGIIAWTHGDPRKVIYPTDSRGEFCGQKGTKNENISLLHGVLPTAW

SEQ ID NO: 69156 - protein, 105 aa, Homo sapiens
MSKCRKTPVQQLASPASFSPDILADIFELFAKNFSYGKPLNNEWQLPDPSEIFTCDHTELNAFLDLKNSLNEVKNLLSDKKLDEWHEHTAFTNKAGKIISHVRKS

SEQ ID NO: 69157 - protein, 83 aa, Homo sapiens
  MOD_RES (1)..(1): Any amino acid
XQKYHTVNGHNCEVRKALSKQEMASASSSQRGGYGGGGPGYSGGSRGYGSGGQGYGNQGSGYGGSGSYDSYNNGGGGGFGGGS

SEQ ID NO: 69158 - protein, 221 aa, Homo sapiens
MRVRAAAARPRHVRPCKLKASMGAFLPNQDWITSHPEAPQDFEQFFSDPYRKTPSPNKRSIYIQSIGSLGNTRIISEEYIKWLTGYCKAYFYGLRVKLLEPVPVSVTRCSFRVNENTHNLQIHAGDILKFLKKKKPEDAFCVVGITMIDLYPRDSWNFVFGQASLTDGVGIFSFARYGSDFYSMHYKGKVKKLKKTSSSDYSIFDNYYIPEITSVLLLRSC

SEQ ID NO: 69159 - protein, 229 aa, Homo sapiens
MQKKKKTKPIIFVSDRANSNKELGVDQESEEGKGKTSPDKQKQSPQPQPGSSDQESEEQQQFRNIFKQIAGDDMEICADELKKVLNTVVNKHKDLKTHGFTLESCRSMIALMDTDGSGKLNLQEFHHLWNKIKAWQKIFKHYDTDQSGTINSYEMRNAVNDAGFHLNNQLYDIITMRYADKHMNIDFDSFICCFVRLEGMFRAFHAFDKDGDGIIKLNVLEWLQLTMYA

SEQ ID NO: 69160 - protein, 263 aa, Homo sapiens
MATAAETSASEPEAESKAGPKADGEEDEVKAARTRRKVLSRAVAAATYKTMGPAWDQQEEGVSESDGDEYAMASSAESSPGEYEWEYDEEEEKNQLEIERLEEQLSINVYDYNCHVDLIRLLRLEGELTKVRMARQKMSEIFPLTEELWLEWLHDEISMAQDGLDREHVYDLFEKAVKDYICPNIWLEYGQYSVGGIGQKGGLEKVRSVFERALSSVGLHMTKGLALWEAYREFESAIVEAARIWRPHLQSMKNGQKTQYQSQ

SEQ ID NO: 69161 - protein, 206 aa, Homo sapiens
  MOD_RES (1)..(1): Any amino acid
XGNLTLVLAQRRDPSIHYSPQFHKASTAMRGWCPWPCGASCGGARVSRSAWGPTPSWRLCASTATPSLSSSPWWSCGSSLCLGCSGSLGRWPWACQPPGWYSPSGPWSVRTPGWWPQCCCPWSCCSTPSWPWAVSCTSSSRCLRRTWLLHPKSHLCPQTSRCPLPCRSPWPPPRKARVPQATPKWTNPSACPAPQTMTEGSFDTLR

SEQ ID NO: 69162 - protein, 67 aa, Homo sapiens
MQPRTPLVLCVLLSQTPVRPTIYLCQNLQFIKNKARDSNSLADHKGKRIQVNRLLPGLLFHDELSGI

SEQ ID NO: 69163 - protein, 299 aa, Homo sapiens
  MOD_RES (1)..(1): Any amino acid
XSKAGGGRSSHGIRSSGTSSGVLMVGPNFRVGKKIGCGNFGELRLGKNLYTNEYVAIKLVSRPLHPTPADVPPRDFRAATRSPGDSLLCPQEPIKSRAPQLHLEYRFYKQLSATEGVPQVYYFGPCGKYNAMVLELLGPSLEDLFDLCDRTFTLKTVLMIAIQLITRMEYVHTKSLIYRDVKPENFLVGRPGTKRQHAIHIIDFGLAKEYIDPETKKHIPYREHKSLTGTARYMSINTHLGKEQSRRDDLEALGHMFMYFLRGSLPWQGLKADTLKERYQKIGDTKRATPIEVLCENFP

SEQ ID NO: 69164 - protein, 60 aa, Homo sapiens
MSAHNRGTELDLSWISKIQVNHPAVLRRAEQIQARRTVKKEWQALLQPPFVFIPPGCVML

SEQ ID NO: 69165 - protein, 249 aa, Homo sapiens
MTEDSQRNFRSVYYEKVGFRGVEEKKSLEILLKDDRLDTEKLCTFSQRFPLPSMYRALVWKVLLGILPPHHESHAKVMMYRKEQYLDVLHALKVVRFVSDATPQAEVYLRMYQLESGKLPRSPSFPLEPDDEVFLAIAKAMEEMVEDSVDCYWITRRFVNQLNTKYRDSLPQLPKAFEQYLNLEDGRLLTHLRMCSAAPKLPYDLWFKRCFAGCLPESSLQRVWDKVVSGSCKILVFVAVEILLTFKIK

SEQ ID NO: 69166 - protein, 191 aa, Homo sapiens
MSQSRHRAEAPPLEREDSGTFSLGKMITAKPGKTPIQVLHEYGMKTKNIPVYECERSDVQIHVPTFTFRVTVGDITCTGEGTSKKLAKHRAAEAAINILKANASICFAVPDPLMPDPSKQPKNQLNPIGSLQELAIHHGWRLPEYTLSQEGGPAHKREYTTICRLESFMETDKCSRTFFRMYLAFLEEFSW

SEQ ID NO: 69167 - protein, 215 aa, Homo sapiens
MTHWFHRNPLKATAPVSFNYYGVVTGPSASKICNDLRSSRARLLELFTDLSCNPEMMKNAADSYFSLLQGFINSLDESTQESKLRYIQNFKWTDTLQGQVPSAQQDAVFELISMGFNVALWYTKYASRLAGKENITEDEAKEVHRSLKIAAGIFKHLKESHLPKLITPAEKGRDLESRLIEAYVIQCQAEAQEVTIARAIELKHAPGLIAALAYE

SEQ ID NO: 69168 - protein, 686 aa, Homo sapiens
GTSFGLPQTRRISLASPRQLFKASNMTQRWQHREISNFEYLMFLNTIAGRSYNDLNQYPVFPWVITNYESEELDLTLPTNFRDLSKPIGALNPKRAAFFAERYESWEDDQVPKFHYGTHYSTASFVLAWLLRIEPFTTYFLNLQGGKFDHADRTFSSISRAWRNSQRDTSDIKELIPEFYYLPEMFVNFNNYNLGVMDDGTVVSDVELPPWAKTSEEFVHINRLALESEFVSCQLHQWIDLIFGYKQQGPEAVRALNVFYYLTYEGAVNLNSITDPVLREAVEAQIRSFGQTPSQLLIEPHPPRGSAMQVYLLLQSPLMFTDKAQQDVIMVLKFPSNSPVTHVAANTQPGLATPAVITVTANRLFAVNKWHNLPAHQGAVQDQPYQLPVEIDPLIASNTGMHRRQITDLLDQSIQVHSQCFVITSDNRYILVCGFWDKSFRVYSTDTGRLIQVVFGHWDVVTCLARSESYIGGNCYILSGSRDATLLLWYWNGKCSGIGDNPGSETAAPRAILTGHDYEVTCAAVCAELGLVLSGSQEGPCLIHSMNGDLLRTLEGPENCLKPKLIQASREGHCVIFYENGLFCTFSVNGKLQATMETDDNIRAIQLSRDGQYLLTGGDRGVVVVRQVSDLKQLFAYPGCDAGIRAMALSYDQRRPRSLQKFLSSVISVHHFWHGFRKHCAILQRL

SEQ ID NO: 69169 - protein, 205 aa, Homo sapiens
MGRVIRGQRKGAGSVFRAHVKHRKGAARLRAVDFAERHGYIKGIVKDIIHDPGRGAPLAKVVFRDPYRFKKRTELFIAAEGIHTGQFVYCGKKAQLNIGNVLPVGTMPEGTIVCCLEEKPGDRGKLARASGNYATVISHNPETKKTRVKLPSGSKKVISSANRAVVGVVAGGGRIDKPILKAGRAYHKYKAKRNCWPRVRGVAMN

SEQ ID NO: 69170 - protein, 663 aa, Homo sapiens
MLVGSQSFSPGGPNGIIRSQSFAGFSGLQERRSRCNSFIENSSALKKPQAKLKKMHNLGHKNNNPPKEPQPKRVEEVYRALKNGLDEYLEVHQTELDKLTAQLKDMKRNSRLGVLYDLDKQIKTIERYMRRLEFHISKVDELYEAYCIQRRLQDGASKMKQAFATSPASKAARESLTEINRSFKEYTENMCTIEVELENLLGEFSIKMKGLAGFARLCPGDQYEIFMKYGRQRWKLKGKIEVNGKQSWDGEETVFLPLIVGFISIKVTELKGLATHILVGSVTCETKELFAARPQVVAVDINDLGTIKLNLEITWYPFDVEDMTASSGAGNKAAALQRRMSMYSQGTPETPTFKDHSFFRWLHPSPDKPRRLSVLSALQDTFFAKLHRSRSFSDLPSLRPSPKAVLELYSNLPDDIFENGKAAEEKMPLSLSFSDLPNGDCALTSHSTGSPSNSTNPEITITPAEFNLSSLASQNEGMDDTSSASSRNSLGEGQEPKSHLKEEDPEEPRKPASAPSEACRRQSSGAGAEHLFLENDVAEALLQESEEASELKPVELDTSEGNITKQLVKRLTSAEVPMATDRLLSEGSVGGESEGCRSFLDGSLEDAFNGLLLALEPHKEQYKEFQDLNQEVMNLDDILKDAKHLDDQKLNGAASWTEITEGE

SEQ ID NO: 69171 - protein, 62 aa, Homo sapiens
MSNPFLKQVFNKDKTFRPKRKFEPGTQRFELHKKAQASLNAGLDLRLAVQLPPGEDLNDWVA

SEQ ID NO: 69172 - protein, 837 aa, Homo sapiens
MSAAGTYAWMAPEVIRASMFSKGSDVWSYGVLLWELLTGEVPFRGIDGLAVAYGVAMNKLALPIPSTCPEPFAKLMEDCWNPDPHSRPSFTNILDQLTTIEESGFFEMPKDSFHCLQDNWKHEIQEMFDQLRAKEKELRTWEEELTRAALQQKNQEELLRRREQELAEREIDILERELNIIIHQLCQEKPRVKKRKGKFRKSRLKLKDGNRISLPSDFQHKFTVQASPTMDKRKSLINSRSSPPASPTIIPRLRAIQCETVSQISWGQNTQGHLSPALSSHRLVQACSIHNFCHLSSTMCIYMHILTPGESSKTWGRSSVVPKEEGEEEEKRAPKKKGRTWGPGTLGQKELASGDEGLKSLVDGYKQWSSSAPNLVKGPRSSPALPGFTSLMEMALLAASWVVPIDIEEDEDSEGPGSGESRLQHSPSQSYLCIPFPRGEDGDGPSSDGIHEEPTPVNSATSTPQLTPTNSLKRGGAHHRRCEVALLGCGAVLAATGLGFDLLEAGKCQLLPLEEPEPPAREEKKRREGLFQRSSRPRRSTSPPSRKLFKKEEPMLLLGDPSASLTLLSLSSISECNSTRSLLRSDSDEIVVYEMPVSPVEAPPLSPCTHNPLVNVRVERFKRDPNQSLTPTHVTLTTPSQPSSHRRTPSDGALKPETLLASRSPSSNGLSPSPGAGMLKTPSPSRDPGEFPRLPDPNVVFPPTPRRWNTQQDSTLERPKTLEFLPRPRPSANRQRLDPWWFVSPSHARSTSPANSSSTETPSNLDSCFASSSSTVEERPGLPALLPFQAGPLPPTERTLLDLDAEGQSQDSTVPLCRAELNTHRPAPYEIQQEFWS

SEQ ID NO: 69173 - protein, 90 aa, Homo sapiens
MDMFSLDMIISDPAAEASRAGKKQLRGVQNPCPSARARPRHKSLNIKDKISEWEGKKEVPTPAPSRRADGQEDYLPSSTVERRSSDGVRT

SEQ ID NO: 69174 - protein, 43 aa, Homo sapiens
  MOD_RES (1)..(1): Any amino acid
XGFGGSRGGGGYGGSGDGYNGFGNDGGYGGSSSSSSYGSGRRF

SEQ ID NO: 69175 - protein, 254 aa, Homo sapiens
MALTVDVAGPAPWGFRITGGRDFHTPIMVTKVAERGKAKDADLRPGDIIVAINGESAEGMLHAEAQSKIRQSPSPLRLQLDRSQATSPGQTNGDSSLEVLATRFQGSVRTYTESQSSLRSSYSSPTSLSPRAGSPFSPPPSSSSLTGEAAISRSFQSLACSPGLPAADRLSYSGRPGSRQAGLGRAGDSAVLVLPPSPGPRSSRPSMDSEGGSLLLDEDSEVFKMLQENREGRAAPRQSSSFRLLQEALEAEER

SEQ ID NO: 69176 - protein, 29 aa, Homo sapiens
  MOD_RES (1)..(1): Any amino acid
XDDLRNVGPVDAQVYLEEMSWNEVTSQRQ

SEQ ID NO: 69177 - protein, 142 aa, Homo sapiens
MAVTITLKTLQQQTFKIRMEPDETVKVLKEKIEAEKGRDAFPVAGQKLIYAGKILSDDVPIRDYRIDEKNFVVVMVTKTKAGQGTSAPPEASPTAAPESSTSFPPAPTSGMSHPPPAAREDKSPSEESAPTTSPESVSGDGL

SEQ ID NO: 69178 - protein, 143 aa, Homo sapiens
MASGTTTTAVKIGIIGGTGLDDPEILEGRTEKYVDTPFGKPSDALILGKIKNVDCVLLARHGRQHTIMPSKVNYQANIWALKEEGCTHVIVTTACGSLREEIQPGDIVIIDQFIDRTICHDISKDSKREYWCPCCDDSSAPLI

SEQ ID NO: 69179 - protein, 181 aa, Homo sapiens
MMTKVLGMAPVLGPRPPQEQVGPLMVKVEEKEEKGKYLPSLEMFRQRFRQFGYHDTPGPREALSQLRVLCCEWLRPEIHTKEQILELLVLEQFLTILPQELQAWVQEHCPESAEEAVTLLEDLERELDEPGHQVSTPPNEQKPVWEKISSSGTAKESPSSMQPQPLETSHKYESWGPLYIQ

SEQ ID NO: 69180 - protein, 179 aa, Homo sapiens
RSPSADQSLEDSPSKVPKSWSFGDRSRARQAFRIKGAASRQNSEEASLPGEDIVDDKSCPCEFVTEDLTPGLKVSIRAVCVMRFLVSKRKFKESLRPYDVMDVIEQYSAGHLDMLSRIKSLQSRQEPRLPVQQGTRTGWASGTKPTVAHGGSAGGVWAGPPPHPRRPLSASVVSSQSLF

SEQ ID NO: 69181 - protein, 110 aa, Homo sapiens
MSGQRGDWTSALWQLLFRVLSPLPAGNALASLALEVQARLVKSALCSQGYPRLALAQLPEDGSQGSRELLLALSWLLARGPVPEQMLAQARVPLGDEMTVCQCEALASPG

SEQ ID NO: 69182 - protein, 310 aa, Homo sapiens
MAETSALPTGFGELEVLAVGMVLLVEALSGLSLNTLTIFSFCKTPELRTPCHLLVLSLALADSGISLNALVAATSSLLRCGRWKGSEERSLVPSVSHRRWPYGSDGCQAHGFQGFVTALASICSSAAIAWGRYHHYCTRSQLAWNSAVSLVLFVWLSSAFWAALPLLGWGHYDYEPLGTCCTLDYSKGDRNFTSFLFTMSFFNFAMPLFITITSYSLMEQKLGKSGHLQVNTTLPARTLLLGWGPYAILYLYAVIADVTSISPKLQMVPALIAKMVPTINAINYALGNEMVCRGIWQCLSPQKREKDRTK

SEQ ID NO: 69183 - protein, 265 aa, Homo sapiens
MIVSFLRPPQTCGTDMDLIDILWRQDIDLGVSREVFDFSQRRKEYELEKQKKLEKERQEQLQKEQEKAFFAQLQLDEETGEFLPIQPAQHIQSETSGSANYSQVAHIPKSDALYFDDCMQLLAQTFPFVDDNEVSSATFQSLVPDIPGHIESPVFIATNQAQSPETSVAQVAPVDLDGMQQDIEQVWEELLSIPELQCLNIENDKLVETTMVPSPEAKLTEVDNYHFYSSIPSMEKEVGNCSPHFLNAFEDSFSSILSTEDPNQL

SEQ ID NO: 69184 - protein, 284 aa, Homo sapiens
MASSWPPLELQSSNQSQLFPQNATACDNAPEAWDLLHRVLPTFIISICFFGLLGNLFVLLVFLLPRRQLNVAEIYLANLAASDLVFVLGLPFWAENIWNQFNWPFGALLCRVINGVIKANLFISIFLVVAISQDRYRVLVHPMASRRQQRRRQARVTCVLIWVVGGLLSIPTFLLRSIQAVPDLNITACILLLPHEAWHFARIVELNILGFLLPLAAIVFFNYHILASLRTREEVSRTSSLNPVIYVFVGRLFRTKPALSRWLIKILSRSCKNQSHTREERAGR

SEQ ID NO: 69185 - protein, 179 aa, Homo sapiens
MATSGAASAELVIGWCIFGLLLLAILAFCWIYVRKYQSRRESEVVSTITAIFSLAIALITSALLPVDIFLVSYMKNQNGTFKDWANANVSRQIEDTVLYGYYTLYSVILFCVFFWIPFVYFYYEEKDDDDTSKCTQIKTALKYTLGFVVICALLLLVGSLVCKPELSGAGISKLFLKHR

SEQ ID NO: 69186 - protein, 287 aa, Homo sapiens
  MOD_RES (1)..(1): Any amino acid
XGDREICSESKIATTKYPCLKSSGELTTCYRKKCCKGYKFVLGQCIPEDYDVCAEAPCEQQCTDNFGRVLCTCYPGYRYDRERHRKREKPYCLDIDECASSNGTLCAHICINTLGSYRCECREGYIREDDGKTCTRGDKYPNDTGSPGPKGSPGFPGMPGPPGQPGPRGSMGPMGPSPDLSHIKQGRRGPVGPPGAPGRDGSKGERGAPGPRGSPGPPGSFDFLLLMLADIRNDITELQEKVFGHRTHSSAEEFPLPQEFPSYPEAMDLGSGDDHPRRTETRDLRAP

SEQ ID NO: 69187 - protein, 72 aa, Homo sapiens
SSFMSRVLQKDAEQESQMRAEIQDMKQELSTVNMMDEFARYARLERKINKMTDKLKTHGTVSLAAWRLHESG

SEQ ID NO: 69188 - protein, 236 aa, Homo sapiens
MSPECARAAGDAPLRSLEQANRTRFPFFSDVKGDHRLVLAAVETTVLVLIFAVSLLGNVCALVLVARRRRRGATACLVLNLFCADLLFISAIPLVLAVRWTEAWLLGPVACHLLFYVMTLSGSVTILTLAAVSLERMVCIVHLQRGVRGPGRRARAVLLALIWGYSAVAALPLCVFFRVVPQRLPGADQEISICTLIWPTIPGEISWDVSFVTLNFLVPGLVIVISYSKILQGPHW

SEQ ID NO: 69189 - protein, 480 aa, Homo sapiens
MAELQMLLEEEIPGGRRALFDSYTNLERVADYCENNYIQSADKQRALEETKAYTTQSLASVAYLINTLANNVLQMLDIQASQLRRMESSINHISQTVDIHKEKVARREIGILTTNKNTSRTHKIIAPANLERPVRYIRKPIDYTILDDIGHGVKWLLRFKVSTQNMKMGGLPRTTPPTQKPPSPPMSGKGTLGRHSPYRTLEPVRPPVVPNDYVPSPTRNMAPSQQSPVRTASVNQRNRTYSSSGSSGGSHPSSRSSSRENSGSGSVGVPIAVPTPSPPSVFPDAAAGGAQTLADGFTSPTPPVVSSTPPTGHPVQFYSMNRPASRHTPPTIGGSLPYRRPPSITSQTSLQNQMNGGPFYSQNPVSDTPPPPPPVEEPVFDESPPPPPPPEDYEEEEAAVVEYSDPYAEEDPPWAPRSYLEKVVAIYDYTKDKEDELSFQEGAIIYVIKKNDDGWYEGVMNGVTGLFPGNYVESIMHYSE

SEQ ID NO: 69190 - protein, 509 aa, Homo sapiens
MTSSRLWFSLLLAAAFAGRATALWPWPQNFQTSDQRYVLYPNNFQFQYDVSSAAQPGCSVLDEAFQRYRDLLFGSGSWPRPYLTGKRHTLEKNVLVVSVVTPGCNQLPTLESVENYTLTINDDQCLLLSETVWGALRGLETFSQLVWKSAEGTFFINKTEIEDFPRFPHRGLLLDTSRHYLPLSSILDTLDVMAYNKLNVFHWHLVDDPSFPYESFTFPELMRKGSYNPVTHIYTAQDVKEVIEYARLRGIRVLAEFDTPGHTLSWGPGIPGLLTPCYSGSEPSGTFGPVNPSLNNTYEFMSTFFLEVSSVFPDFYLHLGGDEVDFTCWKSNPEIQDFMRKKGFGEDFKQLESFYIQTLLDIVSSYGKGYVVWQEVFDNKVKIQPDTIIQVWREDIPVNYMKELELVTKAGFRALLSAPWYLNRISYGPDWKDFYIVEPLAFEGTPEQKALVIGGEACMWGEYVDNTNLVPRLWPRAGAVAERLWSNKLTSDLTFAYERLSHFRCELLR

SEQ ID NO: 69191 - protein, 188 aa, Homo sapiens
KKRAERRREYYEKIKKDPAQFLQVHGRACKVHLDSAVALAAESPVNMMPWQGDTNNMIDRFDVRAHLDHIPDYTPPLLTTISPEQESDERKCNYERYRGLVQNDFAGISEEQCLYQIYIDELYGGLQRPSEDEKKKLAEKKASIGYTYEDSTVAEVEKAAEKPEEEESAAEEESNSDEDETWRWTWMN

SEQ ID NO: 69192 - protein, 184 aa, Homo sapiens
MRCLTTPMLLRALAQAARAGPPGGRSLHSSAVAATYKYVNMQDPEMDMKSVTDRAARTLLWTELFRGLGMTLSYLFREPATINYPFEKGPLSPRFRGEHALRRYPSGEERCIACKLCEAICPAQAITIEAEPRADGSRRTTRYDIDMTKCIYCGFCQEACPVDAIVEGPNFEFSTETHEELLYN

SEQ ID NO: 69193 - protein, 766 aa, Homo sapiens
MDNITRQNQFYDTQVIKQENESGYERRPLEMEQQQAYRPEMKTEMKQGAPTSFLPPEASQLKPDRQQFQSRKRPYEENRGRGYFEHREDRRGRSPQPPAEEDEDDFDDTLVAIDTYNCDLHFKVARDRSSGYPLTIEGFAYLWSGARASYGVRRGRVCFEMKINEEISVKHLPSTEPDPHVVRIGWSLDSCSTQLGEEPFSYGYGGTGKKSTNSRFENYGDKFAENDVIGCFADFECGNDVELSFTKNGKWMGIAFRIQKEALGGQALYPHVLVKNCAVEFNFGQRAEPYCSVLPGFTFIQHLPLSERIRGTVGPKSKAECEILMMVGLPAAGKTTWAIKHAASNPSKKYNILGTNAIMDKMRVMGLRRQRNYAGRWDVLIQQATQCLNRLIQIAARKKRNYILDQTNVYGSAQRRKMRPFEGFQRKAIVICPTDEDLKDRTIKRTDEEGKDVPDHAVLEMKANFTLPDVGDFLDEVLFIELQREEADKLVRQYNEEGRKAGPPPEKRFDNRGGGGFRGRGGGGGFQRYENRGPPGGNRGGFQNRGGGSGGGGNYRGGFNRSGGGGYSQNRWGNNNRDNNNSNNRGSYNRAPQQQPPPQQPPPPQPPPQQPPPPPSYSPARNPPGASTYNKNSNIPGSSANTSTPTVSSYSPPQSFGFFPSTFQPSYSQPPYNQGGYSQGYTAPPPPPPPPPAYNYGSYGGYNPAPYTPPPPPTAQTYPQPSYNQYQQYAQQWNQYYQNQGQWPPYYGNYDYGSYSGNTQGGTSTQ

SEQ ID NO: 69194 - protein, 112 aa, Homo sapiens
MGNPENIEDAYVAVIRPKNTASLNSREYRAKSYEILLHEVPIEGQKKKRKKVLLETKLQGNSEITQGILDYVVETTKPISPANQGIRGKRVVLMKKFPLDGEKMGREASLFI

SEQ ID NO: 69195 - protein, 473 aa, Homo sapiens
MIAKEELESVLEEEVDDFPTFGDSQSDYDTVVHPFYAYWQSFCTQKNFAWKEEYDTRQASNRWEKRAMEKENKKIRDKARKEKNELVRQLVAFIRKRDKRVQAHRKLVEEQNAEKARKAEEMRRQQKLKQAKLVEQYREQSWMTMANLEKELQEMEARYEKEFGDGSDENEMEEHELKDEEDGKDSDEAEDAELYDDLYCPACDKSFKTEKAMKNHEKSKKHREMVALLKQQLEEEEENFSRPQIDENPLDDNSEEEMEDAPKQKVKYLTFRFIFALRLSKKQKKKKQKPAQDVPGKDSYLPAAHFQMAWGKKCVLGERRDGESEHKCAKMLLENRQNYDDNFNVNGPGEGVKVDPEDTNLNQDSAKELEDSPQENVSVTEIIKPCDDPKSEAKSVPKPKGKKTKDMKKPVRVPAEPQTMSVLISCTTCHSEFPSRNKLFDHLKATGHARAPSSSSLNSATSSQSKKEKRKNR

SEQ ID NO: 69196 - protein, 1264 aa, Homo sapiens
MAFSKGFRIYHKLDPPPFSLIVETRHKEECLMFESGAVAVLSSAEKEAIKGTYSKVLDAYGLLGVLRLNLGDTMLHYLVLVTGCMSVGKIQESEVFRVTSTEFISLRIDSSDEDRISEVRKVLNSGNFYFAWSASGISLDLSLNAHRSMQEQTTDNRFFWNQSLHLHLKHYGVNCDDWLLRLMCGGVEIRTIYAAHKQAKACLISRLSCERAGTRFNVRGTNDDGHVANFVETEQVVYLDDSVSSFIQIRGSVPLFWEQPGLQVGSHRVRMSRGFEANAPAFDRHFRTLKNLYGKQIIVNLLGSKEGEHMLSKAFQSHLKASEHAADIQMVNFDYHQMVKGGKAEKLHSVLKPQVQKFLDYGFFYFNGSEVQRCQSGTVRTNCLDCLDRTNSVQAFLGLEMLAKQLEALGLAEKPQLVTRFQEVFRSMWSVNGDSISKIYAGTGALEGKAKAGKLKDGARSVTRTIQNNFFDSSKQEAIDVLLLGNTLNSDLADKARALLTTGSLRASSKVLKSMCENFYKYSKPKKIRVCVGTWNVNGGKQFRSIAFKNQTLTDWLLDAPKLAGIQEFQDKRSKPTDIFAIGFEEMVELNAGNIVSASTTNQKLWAVELQKTISRDNKYVLLASEQLVGVCLFVFIRPQHAPFIRDVAVDTVKTGMGGATGNKGAVAIRMLFHTTSLCFVCSHFAAGQSQVKERNEDFIEIARKLSFPMGRMLFSHDYVFWCGDFNYRIDLPNEEVKELIRQQNWDSLIAGDQLINQKNAGQVFRGFLEGKVTFAPTYKYDLFSDDYDTSEKCRTPAWTDRVLWRRRKWPFDRSAEDLDLLNASFQDESKILYTWTPGTLLHYGRAELKTSDHRPVVALIDIDIFEVEAEERQNIYKEVIAVQGPPDGTVLVSIKSSLPENNFFDDALIDELLQQFASFGEVILIRFVEDKMWVTFLEGSSALNVLSLNGKELLNRTITIALKSPDWIKNLEEEMSLEKISIALPSSTSSTLLGEDAEVAADFDMEGDVDDYSAEVEELLPQHLQPSSSSGLGTSPSSSPRTSPCQSPTISEGPVPSLPIRPSRAPSRTPGPPSAQSSPIDAQPATPLPQKDPAQPLEPKRPPPPRPVAPPTRPAPPQRPPPPSGRSQPSPQAGLAGPGPAGYSTARPTIPPRAGVISAPQSHARASAGRLTPESQSKTSETSKGSTFLPEPLKPQAAFPPQSSLPPPAQRLQEPLVPVAAPMPQSGPQPNLETPPQPPPRSRSSHSLPSEASSQPQQEQPSG

SEQ ID NO: 69197 - protein, 187 aa, Homo sapiens
MSDKLKKDLCYDQNIIPENLPAPTDKCKLKYQQCKTEIKEGYKQYSQRNAENTKSNVTHKQSPRNKIDEKCVQDEEANTDDLTTLDRKAILQQGYADNSCDKQQRARKLDAEIVAAEKKKQIVAEQVMIDHLSRAVISDPEQNLAIEQKESDHILPDSKMTPLRFRKRTLHETKIRTHSTLTENVLS

SEQ ID NO: 69198 - protein, 26 aa, Homo sapiens
  MOD_RES (1)..(1): Any amino acid
XIQQERPSSLPVEVLASEDAAFGLKC

SEQ ID NO: 69199 - protein, 34 aa, Homo sapiens
  MOD_RES (1)..(1): Any amino acid
XEILFSEFNINYNNELPMYRKGTVLIWQKYQGVP

SEQ ID NO: 69200 - protein, 60 aa, Homo sapiens
MSSFSESALEKKLSELSNSQQSVQTLSLWLIHHRKHAGPIVSVWHRELRKERQMKAVKNL

SEQ ID NO: 69201 - protein, 228 aa, Homo sapiens
  MOD_RES (1)..(1): Any amino acid
XCLGLVGRASAPAEPDSACCMELPAAAGDAVRSPAAAAALIFPGGSGELELALEEELALLAAGERPSDPGEHPQAEPGSLAEGAGPQPPPSQDPELLSVIRQKEKDLVLAARLGKALLERNQDMSRQYEQMHKELTDKLEHLEQEKHELRRRFENREGEWEGRVSELESDVKQLQDELERQQIHLREADREKSRAVQELSEQNQRLLDQLSRKIKTWIYYSTSALLVY

SEQ ID NO: 69202 - protein, 94 aa, Homo sapiens
AMGDKATVVGGQAEAPDSVAMSSWERRLHRAKCAPSYLFSCFNGGECVHPAFCDCRRFNATGPRCQMVYNAGPERDSICRAWGQHHVETFDGLY

SEQ ID NO: 69203 - protein, 165 aa, Homo sapiens
  MOD_RES (1)..(1): Any amino acid
XETPENLSNGTSSNVEAAKRLAKRLYQLDRFKRSDVAKHLGKNNEFSKLVAEEYLKFFDFTGMTLDQSLRYFFKAFSLVGETQERERVLIHFSNRYFYCNPDTIASQDGVHCLTCAIMLLNTDLHGHNIGKKMTCQEFIANLQGVNEGVDFSKDLLKVLWDWRRC

SEQ ID NO: 69204 - protein, 205 aa, Homo sapiens
MTNQESAVHVKMMPEFQKSSVRIKNPTRVEEIICGLIKGGAAKLQIITDFDMTLSRFSYKGKRCPTCHNIIDNCKLVTDECRKKLLQLKEKYYAIEVDPVLTVEEKYPYMVEWYTKSHGLLVQQALPKAKLKEIVAESDVMLKEGYENFFDKLQQHSIPVFIFSAGIGDVLEEVIRQAGVYHPNVKVVSNFMDFDETVRISNRSS

SEQ ID NO: 69205 - protein, 73 aa, Homo sapiens
MAKKSMPGGRLQSEGGSGLDSSPFLSEANAERIVQTLCTVRGAALKVGQMLSIQASSALSCSTSLSGSARAPT

SEQ ID NO: 69206 - protein, 159 aa, Homo sapiens
MPIVDKLKEALKPGRKDSADDGELGKLLASSAKKVLLQKIEFEPASKSFSYQLEALKSKYVLLNPKTEGASRHKSGDDPPARRQGSEHTYESCGDGVPAPQKVLFPTERLSLRWERVFRVGAGLHNLGNTCFLNATIQCLTYTPPLANYLLSKEHARSC

SEQ ID NO: 69207 - protein, 449 aa, Homo sapiens
WNMHEDRRNEPIIISDDDEQPCPGSDTSSAHYIILSDSLKEEVAHRDKKRCSKVVSFSKPIEKEETVGIFSPLSVKLNIVISPYHFDNSWKAFLGELTLQLLPAQSLIENFSERSITLMSSESSNQFLIYVHSKGEDVEKQKKEPMSICDKGILVESSFSGEMLEDLGWLQKKRRIKLYQKPEGNHIIKVGIYLLEAGLAKLDFLSDANSRMKKFNQLMKKVMEKLHNSIIPDVLEEDEDDPESEPEGQDIDELYHFVKQTHQQETQSIQVDVQHPALIPVLRPYQREAVNWMLQQECFRSSPATESALHFLWREIVTSEGLKLYYNPYTGCIIREYPNSGPQLLGGILADEMGLGKTVEVLALILTHTRQDVKQDALTLPEGKVVNYFIPSHYFGGKLKKTEIQNIEFEPKEKVQCPPYPFTFSYTCDDTDSCERNEWKKRSVHPFHL

SEQ ID NO: 69208 - protein, 136 aa, Homo sapiens
MQTFGPAGVAAVGRRVESPADRRATRARATASSACRPGVSKDLKEKKEVVEEAENGRDAPANGNANEENGEQEADNEVDEEEEEGGEEEEEEEEGDGEEEDGDEDEEAESATGKRAAEDDEDDDVDTKKQKTDEDD

SEQ ID NO: 69209 - protein, 35 aa, Homo sapiens
  MOD_RES (1)..(1): Any amino acid
XSSLEADHVISAIPASGIWTFGAIFRRSRSPGNRV

SEQ ID NO: 69210 - protein, 108 aa, Homo sapiens
NREPAIVRFFSRFTEVREFAIVPLHAAPGDAVAEIDALYDVYLDVQEKWGLEDVMLMGDFNAGCSYVRPSQWSSIRLWTSPTFQWLIPDSADTTATPTHCAYDRLPMA

SEQ ID NO: 69211 - protein, 201 aa, Homo sapiens
MPFTLHLRSRLPSAIRSLILQKKPNIRNTSSMAGELRPASLVVLPRSLAPAFERFCQVNTGPLPLLGQSEPEKWMLPPQGAISETRMGHPQFWKYEFGACTGSLASLEQYSEQLKDMVAFFLGCSFSLEEALEKAGLPRRDPAGHSQAGAYKTTVPCVTHAGFCCPLVVTMRPIPKDKLEGLVRACCSLGGEQGQPVHMGD

SEQ ID NO: 69212 - protein, 123 aa, Homo sapiens
MENLQTNFSLVQGSTKKLNGMGDDGSPPAKKMITDIHANGKTINKVPTVKKEHLDDYGEAPVETDGEHVKRTCTSVPETLHLNPSLKHTLAQFHLSSQSSLGGPAAFSARHSQESMSPTVFLP

SEQ ID NO: 69213 - protein, 427 aa, Homo sapiens
MEDTGIQRGIWDGDAKAVQQCLTDIFTSVYTTCDIPENAIFGPCVLSHTSLYDSIAFIALKSTDKRTVPYIFRVDTSAANGSSEGLMWLRLVQSARDKEEQNLEAYIKNGQLFYRSLRRIAKDEELLVWYGKELTELLLLCPSRSHNKMNGSSPYTCLECSQRFQFEFPYVAHLRFRCPKRLHSADISPQDEQGGGVGTKDHGGGGGGGKDQQQQQQEAPLGPGPKFCKAGPLHHYPSPSPESSNPSAAAGGSSAKPSTDFHNLARELENSRGGSSCSPAQSLSSGSGSGGGGGHQEAELSPDGIATGGGKGKRKFPEEAAEGGGGAGLVGGRGRFVERPLPASKEDLVCTPQQYRASGSYFGLEENGRLFAPPSPETGEAKRSAFVEVKKAARAASLQEEGTADGAGVASEDQDAGGGGGSSTPAA

SEQ ID NO: 69214 - protein, 76 aa, Homo sapiens
MNVEVVKVMPQDLVTFKDVAIDFSQEEWQWMNPAQKRLYRSMMLENYQSLVSLGLCISKPYVISLLEQGREPWEMT

SEQ ID NO: 69215 - protein, 360 aa, Homo sapiens
  MOD_RES (1)..(1): Any amino acid
XRLFDIHKQVLKEGIAQRSADGSPALKQIEINTISASFGGLASRTPAVHRHVLSVLSKTKEAGKILSNNPSKGLALGIAKAWELYGSPNALVLLIAQEKERNIFDQRAIENELLARNIHVIRRTFEDISEKGSLDQDRRLFVDGQEIAVVYFRDGYMPRQYSLQNWEARLLLERSHAAKCPDIATQLAGTKKVQQELSRPGMLEMLLPGQPEAVARLRATFAGLYSLDVGEEGDQAIAEALAAPSRFVLKPQREGGGNNLYGEEMVQALKQLKDSEERASYILMEKIEPEPFENCLLRPGSPARVVQCISELGIFGVYVRQEKTLVMNKHVGHLLRTKAIEHADGGVAAGVAVLDNPYPV

SEQ ID NO: 69216 - protein, 57 aa, Homo sapiens
MKHQERFLFQGNNGTVLYTGDFRLAQGEAARMELLHSGGRVKDIQSVYLDTTFCDPR

SEQ ID NO: 69217 - protein, 71 aa, Homo sapiens
MFRDVAIDVSQEEWECLNPAQRNLYKEVMLENYSNLVSLGLSVSKPAVISSLEQGKEPWMVVREETGRWCP

SEQ ID NO: 69218 - protein, 72 aa, Homo sapiens
LPLVVILGATGTGKSTLALQLGQRLGGEIVSADSMQRQSLTMLPSWSQTLGSSDLPASATHGAGITGVSHHA

SEQ ID NO: 69219 - protein, 217 aa, Homo sapiens
  MOD_RES (1)..(1): Any amino acid
XEMFHCPYEGCSQVYVALSSFQNHVNLVHRKGKTKVCPHPGCGKKFYLSNHLRRHMIIHSGVREFTCETCGKSFKRKNHLEVRDLWLPVPAARVAQLAHEEAHCGGAVQLHVRSLREALREAGQRQVPHAQKPPGSQAHLTHLTTDRPYLFVRSDTTPGLAGAWTAARAARTAGRKEAPPPRPRAGPPGQVPHPAPPHPSRSWCLGLHCWNCVKRAE

SEQ ID NO: 69220 - protein, 69 aa, Homo sapiens
MNEPLDYLANASDFPDYAAAFGNCTDENIPLKMHYLPVIYGIIFLVGFPGNAVVISTYIFKMRPWKSST

SEQ ID NO: 69221 - protein, 371 aa, Homo sapiens
MAVMAPRTLVLLLSGALALTQTWAGSHSMRYFYTSVSRPGRGEPRFIAVGYVDDTQFVRFDSDAASQRMEPRAPWIEQEGPEYWDRNTRNVKAHSQTDRANLGTLRGYYNQSEDGSHTIQRMYGCDVGPDGRFLRGYQQDAYDGKDYIALNEDLRSWTAADMAAQITQRKWETAHEAEQWRAYLEGRCVEWLRRYLENGKETLQRTDAPKTHMTHHAVSDHEATLRCWALSFYPAEITLTWQRDGEDQTQDTELVETRPAGDGTFQKWASVVVPSGQEQRYTCHVQHEGLPKPLTLRWEPSSQPTIPIVGIIAGLVLFGAVIAGAVVAAVMWRRKSSGGEGMKDRKGGSYSQAASSDSAQGSDMSLTACKV

SEQ ID NO: 69222 - protein, 63 aa, Homo sapiens
MPEDQVGKLEATENTISAMAAAAAEQQQFYLLLGNLLSPDNVVRKQAETDMFEKFETCVALHK

SEQ ID NO: 69223 - protein, 85 aa, Homo sapiens
  MOD_RES (1)..(1): Any amino acid
XGDDWLVESLRLYQDFYAFDLSGATRVLEWIDDKGVFVAGYESLKKNEILHLKLPLRLSVKENKIAGYQWPSRLLSAGVAGCRGQ

SEQ ID NO: 69224 - protein, 73 aa, Homo sapiens
  MOD_RES (1)..(1): Any amino acid
XVCTRELCVFSFYTLGVMSGAAEEVATGAEGSYLEIKKQMDKLDPLAHPLLQWIISSNRSHIVKLPLSRWVPH

SEQ ID NO: 69225 - protein, 183 aa, Homo sapiens
IHLSEAYWDGGPGLARQRTLEDEEEQERERRRRHRNLSSTTDDEAPRLSQNGDRQASASERLPSVEEAEVPKPLPPASKDEDEDIQSILRTRQERRQRRQVVEAAQAPIQERLEAEEGRNSLSPVQATQKPLVSKKELEIPPRRRLSREQRGPWALEEESLVGREPEERKKGVPEKSPVLEKS

SEQ ID NO: 69226 - protein, 78 aa, Homo sapiens
MTTSHQPQDRYKAVWLIFFMLGLGTLLPWNFFMTATQYFTNRLDMSQNVSLVTAELSKDAQASAAPAAPLPERNSLSA

SEQ ID NO: 69227 - protein, 313 aa, Homo sapiens
MSSTPHDPFYSSPFGPFYRRHTPYMVQPEYRIYEMNKRLQSRTEDSDNLWWDAFATEFFEDDATLTLSFCLEDGPKRYTIGRTLIPRYFSTVFEGGVTDLYYILKHSKESYHNSSITVDCDQCTMVTQHGKPMFTKVCTEGRLILEFTFDDLMRIKTWHFTIRQYRELVPRSILAMHAQDPQVLDQLSKNITRMGLTNFTLNYLRLCVILEPMQELMSRHKTYNLSPRDCLKTCLFQKWQRMVAPPAEPTRQPTTKRRKRKNSTSSTSNSSAGNNANSTGSKKKTTAANLSLSSQVPIASIARSPVSGCALRT

SEQ ID NO: 69228 - protein, 81 aa, Homo sapiens
MGLGPVFLLLAGIFPFAPPGAAAEPHSLRYNLTVLSWDGSVQSGFLAEVHLDGQPFLRYDRQKCRAKPQGQWAEDVLGNKT

SEQ ID NO: 69229 - protein, 131 aa, Homo sapiens
  MOD_RES (1)..(1): Any amino acid
XFRDAMGFLLMFDLTSQQSFLNVRNWMSQLQANAYCENPDIVLIGNKADLPDQREVNERQARELADKYGCKLSTLGINKFDEACLSLHQWSCSLFCISLHLKRIHNSFLIAYYTKRLREKSSFVKDFGCII

SEQ ID NO: 69230 - protein, 314 aa, Homo sapiens
MARRGPGWRPLLLLVLLAGAAQGGLYFRRGQTCYRPLRGDGLAPLGRSTYPRPHEYLSPADLPKSWDWRNVDGVNYASITRNQHIPQYCGSCWAHASTSAMADRINIKRKGAWPSTLLSVQNVIDCGNAGSCEGGNDLSVWDYAHQHGIPDETCNNYQAKDQECDKFNQCGTCNEFKECHAIRNYTLWRVGDYGSLSGREKMMAEIYANGPISCGIMATERLANYTGGIYAEYQDTTYINHVVSVAGWGISDGTEYWIVRNSWGEPWGLTLSSRLEYNDTIMAHCSLPSTWDYRSQPRLLRTPRCGCICACGPG

SEQ ID NO: 69231 - protein, 45 aa, Homo sapiens
MTDRFWDQWYLWYLRLLRLLDRVPSMLLQMTGFPFYRLEDRSQSS

SEQ ID NO: 69232 - protein, 250 aa, Homo sapiens
MSAEVIHQVEEALDTDEKEMLLFLCRDVAIDVVPPNVRDLLDILRERGKLSVGDLAELLYRVRRFDLLKRILKMDRKAVETHLLRNPHLVSDYRVLMAEIGEDLDKSDVSSLIFLMKDYMGRGKISKEKSFLDLVVELEKLNLVAPDQLDLLEKCLKNIHRIDLKTKIQKYKQSGGWNGTWMTKASFSLWLEIASLYILHIPDLPTPLPCIFMISAKCCQAVLNISVFKKESGICTGWQSYGHSGVLHVC

SEQ ID NO: 69233 - protein, 160 aa, Homo sapiens
MQPDMSLNVIKMKSSDFLESAELDSGGFGKVSLCFHRTQGLMIMKTVYKGPNCIEHNEALLEEAKMMNRLRHSRVVKLLGVIIEEGKYSLVMEYMEKGNLMHVLKAEMSTPLSVKGRIILEIIEGMCYLHGKGVIHKDLKPENILVDNDFHIKMLSVSSS

SEQ ID NO: 69234 - protein, 107 aa, Homo sapiens
MPNSEPASLLELFNSIATQGELVRSLKAGNASKDEIDSAVKMLVSLKMSYKAAAGEDYKADCPPGNPAPTSNHGPDATEAEEDFVDPWTVQTSSAKGIDYDKLIVRF

SEQ ID NO: 69235 - protein, 466 aa, Homo sapiens
MPHSAGGTAGVGLEAAEPTALLTRAEPPSEPTEIRPQKRKKGPAPKMLGNELCSVCGDKASGFHYNVLSCEGCKGFFRRSVIKGAHYICHSGGHCPMDTYMRRKCQECRLRKCRQAGMREECVLSEEQIRLKKLKRQEEEQAHATSLPPRASSPPQILPQLSPEQLGMIEKLVAAQQQCNRRSFSDRLRVTPWPMAPDPHSREARQQRFAHFTELAIVSVQEIVDFAKQLPGFLQLSREDQIALLKTSAIEVAGEGQGMKGEAEWDYLWEGPPDIELGEPNLLGSRDEENRPPWKRPCSKTSPPSPRLRFAACVQVMLLETSRRYNPGSESITFLKDFSYNREDFAKAGLQVEFINPIFEFSRAMNELQLNDAEFALLIAISIFSADRPNVQDQLQVERLQHTYVEALHAYVSIHHPHDRLMFPRMLMKLVSLRTLSSVHSEQVFALRLQDKKLPPLLSEIWDVHE

SEQ ID NO: 69236 - protein, 230 aa, Homo sapiens
MSSSGTPDLPVLLTDLKIQYTKIFINNEWHDSVSGKKFPVFNPATEEELCQVEEGDKEDVDKAVKAARQAFQIGSPWRTMDASERGRLLYKLADLIERDRLLLATMESMNGGKLYSNAYLNDLAGCIKTLRYCAGWADKIQGRTIPIDGNFFTYTRHEPIGVCGQIIPWNFPLVMLIWKIGPALSCGNTVVVKPAEQTPLTALHVASLIKEAGFPPGVVNIVPGYGASVV

SEQ ID NO: 69237 - protein, 62 aa, Homo sapiens
MTYAYLFKYIIIGDTGVGKSCLLLQFTDKRFQPVHDLTIGVEFGARMVNIDGKQIKLQIWDT

SEQ ID NO: 69238 - protein, 150 aa, Homo sapiens
MYSFGWESQLLETGFLGIFLCPLWTLSRLPQHTPTSRIVLWGFRWLIFRIMLGAGLIKIRGDRCWRDLTCMDFHYETQPMPNPVAYYLHHSPWWFHRFETLSNHFIELLVPFFLFLGRRACIIHGVLQILFQAVLIVSGNLSFLNWLTMV

SEQ ID NO: 69239 - protein, 119 aa, Homo sapiens
  MOD_RES (1)..(1): Any amino acid
XWVVSQPPDMHLKPLMTELLKRILDGNKRVQEAACSAFATLEEEACTELVPYLSYILDTLVFAFGKYQHKNLLILYDAIGTLADSVGHHLNQPVPESQSATPTQGAPISCSLSRNTSRS

SEQ ID NO: 69240 - protein, 92 aa, Homo sapiens
MTMSKEAVTFKDVAVVFTEEELGLLDLAQRKLYRDVMLENFRNLLSVGHQPFHRDTFHFLREEKFWMMDIATQREGNSGGSVQASKCRNRSK

SEQ ID NO: 69241 - protein, 486 aa, Homo sapiens
MRGRGSQQQQPTRRQGQKLPSPSPAGKYESAQPGGTQPEPGLGARMAIHKALVMCLGLPLFLFPGAWAQGHVPPGCSQGLNPLYYNLCDRSGAWGIVLEAVAGAGIVTTFVLTIILVASLPFVQDTKKRSLLGTQVFFLLGTLGLFCLVFACVVKPDFSTCASRRFLFGVLFAICFSCLAAHVFALNFLARKNHGPRGWVIFTVALLLTLVEVIINTEWLIITLVRGSGEGGPQGNSSAGWAVASPCAIANMDFVMALIYVMLLLLGAFLGAWPALCGRYKRWRKHGVFVLLTTATSVAIWVVWIVMYTYGNKQHNSPTWDDPTLAIALAANAWAFVLFYVIPEVSQVTKSSPEQSYQGDMYPTRGVGYETILKEQKGQSMFVENKAFSMDEPVAAKRPVSPYSGYNGQLLTSVYQPTEMALMHKVPSEGAYDIILPRATANSQVMGSANSTLRAEDMYSAQSHQAATPPKDGKNSQVFRNPYVWD

SEQ ID NO: 69242 - protein, 219 aa, Homo sapiens
MSEGVDLIDIYADEEFNQDPEFNNTDQIDLYDDVLTATSQPSDDRSSSTEPPPPVRQEPSPKPNNKTPAILYTYSGLRNRRAAVYVGSFSWWTTDQQLIQVIRSIGVYDVVELKFAENRANGQSKGYAEVVVASENSVHKLLELLPGKVLNGEKVDVRPATRQNLSQFEAQARKRIPPRAHSRDSSDSADGRATPSENLVPSSARVDKPPSVLPYFNRP

SEQ ID NO: 69243 - protein, 120 aa, Homo sapiens
MELDLFLGLDDVFPRLLHGLLHRAFSVFLFNTENKLLLQQRSDAKITFPGCFTNTCCSHPLSNPAELEESDALGVRRAAQRRLKAELGIPLEEVTSSPTQPYKLKPKHTIKRFLIKFLNS

SEQ ID NO: 69244 - protein, 36 aa, Homo sapiens
MSGFNFGGTGAPTGGFTFGTAKTATTTPATGFSFST

SEQ ID NO: 69245 - protein, 47 aa, Homo sapiens
  MOD_RES (1)..(1): Any amino acid
XRERSGRRAKGKKSDSKRKGCEGSKGSTEKKEKVKAGPDSVLGQLGE

SEQ ID NO: 69246 - protein, 53 aa, Homo sapiens
MRALWVLGLCCVLLTFGSVRADDEVDVDGTVEEDLGKSREGSRTDDEVVQRSR

SEQ ID NO: 69247 - protein, 170 aa, Homo sapiens
MLGSVATTLPLSSSNSSGMPLGYYLSSPQISRVTISTTGQLTSKATVGSCSRVENSLDASPFSVPKKQDESPMIGDGEDYFLSLFGDSKKLTAHSNYTQKTLKYFSMILEEVGQFTSSSLGDVEIAEVNVKGLFVKLINSSLDKEMAIGDHILQQNVNGQTISLYRFLPN

SEQ ID NO: 69248 - protein, 170 aa, Homo sapiens
MASGSNWLSGVNVVLVMAYGSLVFVLLFIFVKRQIMRFAMKSRRGPHVPVGHNAPKDLKEEIDIRLSRVQDIKYEPQLLADDDARLLQLETQGNQSCYNYLYRMKALDAIRTSEIPFHSEGRHPRSLMGKNFRSYLLDLRNTSTPFKGVRKALIDTLLDGYETARYGTGG

SEQ ID NO: 69249 - protein, 386 aa, Homo sapiens
MAAVATCGSVAASTGSAVATASKSNVTSFQRRGPRASVTNDSGPRLVSIAGTRPSVRNGQLLVSTGLPALDQLLGGGLAVGTVLLIEEDKYNIYSPLLFKYFLAEGIVNGHTLLVASAKEDPANILQELPAPLLDDKCKKEFDEDVYNHKTPESNIKMKIAWRYQLLPKMEIGPVSSSRFGHYYDASKRMPQELIEASNWHGFFLPEKISSTLKVEPCSLTPGYTKLLQFIQNIIYEEGFDGSNPQKKQRNILRIGIQNLGSPLWGDDICCAENGGNSHSLTKFLYVLRGLLRTSLSACIITMPTHLIQNKAIIARVTTLSDVVVGLESFIGSERETNPLYKDYHGLIHIRQIPRLNNLICDESDVKDLAFKLKRKLFTIEVDFIS

SEQ ID NO: 69250 - protein, 129 aa, Homo sapiens
MAKAGDKSSSSGKKSLKRKAAAEELQEAAGAGDGATENGVQPPKAAAFPPGFSISEIKNKQRRHLMFTRWKQQQRKEKLAAKKKLKKEREALGDKAPPKPVPKTIDNQRVYDETTVDPNDEEVMLEVLN

SEQ ID NO: 69251 - protein, 13 aa, Homo sapiens
MMSSVSTESKLQQ

SEQ ID NO: 69252 - protein, 48 aa, Homo sapiens
MVWKVAVFLSVALGIGAVPIDDPEDGGKHWVVIVAGSNGWYNYRHQEL

SEQ ID NO: 69253 - protein, 147 aa, Homo sapiens
MKTLFLGVTLGLAAALSFTLEEEDEGGSVHPEENPDAEDGGAWQIQRLWGQEAHIPAGAARDGRLRLLLQRPAPWGPALHGKACGICSLQGRAAVPTLAHLATSPAGRNPNTNLEALEEFKKLVQHKGLSEEDIFMPLQTGSCVLEH

SEQ ID NO: 69254 - protein, 241 aa, Homo sapiens
MQLKPMEINPEMLNKVLSRLGVAGQWRFVDVLGLEEESLGSVPAPACALLLLFPLTAQHENFRKKQIEELKGQEVSPKVYFMKQTIGNSCGTIGLIHAVANNQDKLGFEDGSVLKQFLSETEKMSPEDRAKCFEKNEAIQAAHDAVAQEGQCRVDDKVNFHFILFNNVDGHLYELDGRMPFPVNHGASSEDTLLKVIFGMHLFLMTLPRSAENSPSVSKEKSASLPWLSARQPNALWEGLC

SEQ ID NO: 69255 - protein, 757 aa, Homo sapiens
MNQPPQIAPKRERKTIRIRDPNQGGKDITEEIMSGARTASTPTPPQTGGGLEPQANGETPQVAVIVRPDDRSQGAIIADRPGLPGPEHSPSESQPSSPSPTPSPSPVLEPGSEPNLAVLSIPGDTMTTIQMSVEESTPISRETGEPYRLSPEPTPLAEPILEVEVTLSKPVPESEFSSSPLQAPTPLASHTVEIHEPNGMVPSEDLEPEVESSPELAPPPACPSESPVPIAPTAQPEELLNGAPSPPAVDLSPVSEPEEQAKEVTASMAPPTIPSATPATAPSATSPAQEEEMEEEEEEEEGEAGEAGEAESEKGGEELLPPESTPIPANLSQNLEAAAATQVAVSVPKRRRKIKELNKKEAVGDLLDAFKEANPAVPEVENQPPAGSNPGPESEGSGVPPRPEEADETWDSKEDKIHNAENIQPGEQKYEYKSDQWKPLNLEEKKRYDREFLLGFQFIFASMQKPEGLPHISDVVLDKANKTPLRPLDPTRLQGINCGPDFTPSFANLGRTTLSTRGPPRGGPGGELPRGPAGLGPRRSQQGPRKEPRKIIATVLMTEDIKLNKAEKAWKPSSKRTAADKDRGEEDADGSKTQDLFRRVRSILNKLTPQMFQQLMKQVTQLAIDTEERLKGVIDLIFEKAISEPNFSVAYANMCRCLMALKVPTTEKPTVTVNFRKLLLNRCQKEFEKDKDDDEVFEKKQKEMDEAATAEERGRLKEELEEARDIARRRSLGNIKFIGELFKLKMLTEAIMHDCVV

SEQ ID NO: 69256 - protein, 298 aa, Homo sapiens
  MOD_RES (1)..(1): Any amino acid
XMLRIAWNLSWYHGSDNLLKQMNSETKTQEYESLGKGSWIRTKSQILDALKLSTEDILTLKITHMASGLQDCLHSIVQAATHREVRAAVTRMSFYLLNDRLSLKGCPGPCGVTLKSLAWHTALNRFLQVLPACTEDEKLLIDIIHFLNKLIKEQRKNSSLELLNWILELLLRHSANPLLDLLVLTESQAREETDDIRTAVRQQLQKELIALFDTLLLNFMEVTDRKCSELLYVFQTQLALKLLQCLKVTDAPHFYGLPSLERTLRGMANLTAFPGWSSHSPLTKPLDICVKYLSGLLE

SEQ ID NO: 69257 - protein, 35 aa, Homo sapiens
LKPSSIQTSEFDSSDEEPIEDEQTPIHISWLSLTN

SEQ ID NO: 69258 - protein, 873 aa, Homo sapiens
MPALEHMNQILHILFVFLPFLWALGTLPPPDALLLWAMEQVLEFGLGGSSMSTHLRLLVMFIMSAGTAIASYFIPSTVGVVLFMTGFGFLLSLNLSDMGHKIGTKSKDLPSGPEKHFSWKECLFYIIILVLALLETSLLHHFAGFSQISKSNSQAIVGYGLMILLIILWILREIQSVYIIGIFRNPFYPKDVQTVTVFFEKQTRLMKIGIVRRILLTLVSPFAMIAFLSLDSSLQGLHSVSVCIGFTRAFRMVWQNTENALLETVIVSTVHLISSTDIWWNRSLDTGLRLLLVGIIRDRLIQFISKLQFAVTVLLTSWTEKKQRRKTTATLCILNIVFSPFVLVIIVFSTLLSSPLLPLFTLPVFLVGFPRPIQSWPGAAGTTACVCADTVYYYQMVPRLTAVLQTAMAAGSLGLLLPGSHYLGRFQDRLMWIMILECGYTYCSINIKGLELQETSCHTAEARRVDEVFEDAFEQEYTRVCSLNEHFGNVLTPCTVLPVKLYSDARNVLSGIIDSHENLKEFKGDLIKVLVWILVQYCSKRPGMKENVHNTENKGKAPLMLPALNTLPPPKSPEDIDSLNSETFNDWSDDNIFDDEPTIKKVIEEKHQLKDLPGTNLFIPGSVESQRVGDHSTGTVPENDLYKAVLLGYPAVDKGKQEDMPYIPLMEFSCSHSHLVCLPAEWRTSCMPSSKMKEMSSLFPEDWYQFVLRQLECYHSEEKASNVLEEIAKDKVLKDFYVHTVMTCYFSLFGIDNMAPSPGHILRVYGGVLPWSVALDWLTEKPELFQLALKAFRYTLKLMIDKASLGPIEDFRELIKYLEEYERDWYIGLVSDEKWKEAILQEKPYLFSLGYDSNMPGPALEISRVNRNLWSQI

SEQ ID NO: 69259 - protein, 89 aa, Homo sapiens
MAAATGDPGLSKLQFAPFSSALDVGFWHELTQKKLNEYRLDEAPKDIKGYYYNGDSAGLPARLTLEFSAFDMSAPTPARCCPAIGTLYN

SEQ ID NO: 69260 - protein, 9 aa, Homo sapiens
MMGAVAEKK

SEQ ID NO: 69261 - protein, 124 aa, Homo sapiens
MAPKQKKKTSRGKKRLKPVLAGHPEIYPLVLTTKTQEIFNCRIDEDVTDEQPYKLINKEDIFEDLRNRAAVSDFHPVKKIVQEYPGNELLLVYDKDFKYGLNFYLIATEEGKENYLNPPEVPEE

SEQ ID NO: 69262 - protein, 135 aa, Homo sapiens
MNMLSVEAAGPAICKKMSYGSIARGGGLGSRGPFGGPSRQGCQPLECARCWTEYGIRHFPCPSPESKLQNRCVGKDGEGDLGPAGTPIVPRARKRGPGVAPEGSRMPEPTSSPTIGPRKDSAAGPHGRMAGPSTT

SEQ ID NO: 69263 - protein, 211 aa, Homo sapiens
MCVPGFRSSSNQDRFITNDGTVCIENVNANCHLDNVCIAANINKTLTKIRSIKEPVALLQEVYRNSVTDLSPTDIITYIEILAESSSLLGYKNNTISAKDTLSNSTLTEFVKTVNNFVQRDTFVVWDKLSVNHRRTHLTKLMHTVEQATLRISQSFQKTTEFDTNSTDIALKVFFFDSYNMKHIHPHMNMDGDYINIFPKRKAAYDSNGHR

SEQ ID NO: 69264 - protein, 483 aa, Homo sapiens
MAAPGPLPAAALSPGAPTPRELMHGVAGVTSRAGRDREAGSVLPAGNRGARKASRRSSSRSMSRDNKFSKKDCLSIRNVVASIQTKEGLNLKLISGDVLYIWADVIVNSVPMNLQLGGGPLSRAFLQKAGPMLQKELDDRRRETEEKVGNIFMTSGCNLDCKAVLHAVAPYWNNGAETSWQVATGDIATEQVDVIVNSTARTFNRKSGVSRAILEGAGQAVESECAVLAAQPHRDFIITPGGCLKCKIIIHVPGGKDVRKTVTSVLEECEQRKYTSVSLPAIGTGNLPEHWTDMNHQLFCMVQLEPGQSEYNTIKDKFTRTCSSYAIEKIERIQNAFLWQSYQVKKRQMDIKNDHKNNERLLFHGTDADSVPYVNQHGFNRSCAGKNAVSYGKGTYFAVDASYSAKDTYSKPDSNGRKHMYVVRVLTGVFTKGRAGLVTPPPKNPHNPTDLFDSVTNNTRSPKLFVVFFDNQAYPEYLITFTA

SEQ ID NO: 69265 - protein, 43 aa, Homo sapiens
  MOD_RES (1)..(1): Any amino acid
XTIMNNIVIWNLKTGQLLKKMHIDDSYQASVCHKAYSEMVPGR

SEQ ID NO: 69266 - protein, 357 aa, Homo sapiens
MAEHGAHFTAASVADDQPSIFEVVAQDSLMTAVRPALQHVVKVLAESNPTHYGFLWRWFDEIFTLLDLLLQQHYLSRTSASFSENFYGLKRIVMGDTHKSQRLASAGLPKQQLWKSIMFLVLLPYLKVKLEKLVSSLREEDEYSIHPPSSRWKRFYRAFLAAYPFVNMAWEGWFLVQQLRYILGKAQHHSPLLRLAGVQLGRLTVQDIQALEHKPAKASMMQQPARSVSEKINSALKKAVGGVALSLSTGLSVGVFFLQFLDWWYSSENQETIKSLTALPTPPPPVHLDYNSDSPLLPKMKTVCPLCRKTRVNDTVLATSGYVFCYRCVFHYVRSHQACPITGYPTEVQHLIKLYSP

SEQ ID NO: 69267 - protein, 145 aa, Homo sapiens
MHRKKVDNRIRILIENGVAERQRSLFVVVGDRGKDQVVILHHMLSKATVKARPSVLWCYKKELGFSSHRKKRMRQLQKKIKNGTLNIKQDDPFELFIAATNIRYCYYNETHKILGNTFGMCVLQDFEALTPNLLARTVETVEGGG

SEQ ID NO: 69268 - protein, 90 aa, Homo sapiens
MGRLDGKVIILTAAAQGIGQAAALAFAREGAKVIATDINESKLQELEKYPGIQTRVLDVTKKKQIDQFANEVERLDVLFNVAGVCLGSPG

SEQ ID NO: 69269 - protein, 118 aa, Homo sapiens
MDNITRQNQFYDTQVIKQENESGYERRPLEMEQQQAYRPEMKTEMKQGAPTSFLPPEASQLKPDRQQFQSRKRPYEENRGRGYFEHREDRRGRSPQPPAEEDEDDFDDTLVAIDTYNC

SEQ ID NO: 69270 - protein, 513 aa, Homo sapiens
MDIKNSPSSLNSPSSYNCSQSILPLEHGSIYIPSSYVDSHHEYPAMTFYSPAVMNYSIPSNVTNLEGGPGRQTTSPNVLWPTPGHLSPLVVHRQLSHLYAEPQKSPWCEARSLEHTLPVNRETLKRKVSGNRCASPVTGPGSKRDAHFCAVCSDYASGYHYGVWSCEGCKAFFKRSIQGHNDYICPATNQCTIDKNRRKSCQACRLRKCYEVGMVKCGSRRERCGYRLVRRQRSADEQLHCAGKAKRSGGHAPRVRELLLDALSPEQLVLTLLEAEPPHVLISRPSAPFTEASMMMSLTKLADKELVHMISWAKKIPGFVELSLFDQVRLLESCWMEVLMMGLMWRSIDHPGKLIFAPDLVLDRDEGKCVEGILEIFDMLLATTSRFRELKLQHKEYLCVKAMILLNSSMYPLVTATQDADSSRKLAHLLNAVTDALVWVIAKSGISSQQQSMRLANLLMLLSHVRHASSLSLSWRLFMLREASCHGVRQTPGGAHVSVSRSRSFEACQQPRE

SEQ ID NO: 69271 - protein, 102 aa, Homo sapiens
  MOD_RES (1)..(1): Any amino acid
XTQVEIKVCQGEREMAGDNKLLGQFTLIGIPPAPRGVPQIEVTFDIDANGIVHVSAKDKGTGREQQIVIQSSGGLSKDDIENMVKNAEKYAEEDRRKKRFPK

SEQ ID NO: 69272 - protein, 155 aa, Homo sapiens
MPSKKKKYNARFPPARIKKIMQTDEEIGKVAAAVPVIISRALELFLESLLKKACQGDGEDNHMDGDKGARRGRKPGSGGRKNGGMGTKSKDKKLSGTDSEQEDESEDTDTDGEEETSQPPPQASHPSAHFQSPPTPFLPFASTLPLPPAPPGPSA

SEQ ID NO: 69273 - protein, 157 aa, Homo sapiens
MFIKVMFGAGCSVLVNTSCRLVNLTAHLRQKAGLPPDATIALLAEDGNLVSLEEDLKEGASRAQTMGNSLLKERAIYVLVRIISKRERTWPPPAMSPYWRTWMTITQSWQRNCAGCQASPLWATTGGSVWALGEAAMSKAPLQGPERALIKGMDCTL

SEQ ID NO: 69274 - protein, 68 aa, Homo sapiens
MLDHKDLEAEIHPLKNEERKSQENLGNPSKNEDNVKSAPPQSRLSRCRAAAFFLSLFLCLFVVFVVSF

SEQ ID NO: 69275 - protein, 176 aa, Homo sapiens
MELALRRSPVPRWLLLLPLLLGLNAGAVIDWPTEEGKEVWDYVTVRKDAYMFWWLYYATNSCKNFSELPLVMWLQLQAASLLFVDNPVGTGFSYVNGSGAYAKDLAMVASDMMVLLKTFFSCHKEFQTVPFYIFSESYGGKMAAGIGLELYKAIQRGTIKCNFAGVALGDSWISPV

SEQ ID NO: 69276 - protein, 420 aa, Homo sapiens
  MOD_RES (1)..(1): Any amino acid
XHLKQKKSMTPAEREENQRMIVCNQVMKYILDKIDKEEKQAAKKRKREESVEQKRSKQNATKLSALLFKHKEQLRAEILKKRALLDKDLQIEVQEELKRDLKIKKEKDLMQLAQATAVAAPCPPVTPAPPAPPAPPPSPPPPPAVQHTGLLSTPTLPAASQKRKREEEKDSSSKSKKKKMISTTSKETKKDTKLYCICKTPYDESKFYIGCDLCTNWYHGECVGITEKEAKKMDVYICNDCKRAQEGSSEELYCICRTPYDESQFYIGCDRCQNWYHGRCVGILQSEAELIDEYVCPQCQSTEDAMTVLTPLTEKDYEGLKRVLRSLQAHKMAWPFLEPVDPNDAPDYYGVIKEPMDLATMEERVQRRYYEKLTEFVADMTKIFDNCRYYNPSDSPFYQCAEVLESFFVQKLKGFKASRL

SEQ ID NO: 69277 - protein, 138 aa, Homo sapiens
ILRQTLFRYQGHVGASLIVGGVDLTGPQLYGVHPHGSYSRLPFTALGSGQDAALAVLEDRFQPNMTLEAAQGLLVEAVTAGILGDLGSGGNVDACVITKTGAKLLRTLSSPTEPVKRGCPSSLPGLAATTLCLEPQLS

SEQ ID NO: 69278 - protein, 189 aa, Homo sapiens
  MOD_RES (1)..(1): Any amino acid
XQDNRQRKLTSGSLSTSERRKSDASSLMPPLRISLIQDMRHIQNIGEIKTDVGKARAWVRLSMEKKLLSRHLKQLLSDHELTKKLYKRYAFLRCDDEKEQFLYHLLSFNAVDYFCFTNVFTTILIPYHILIVPSKKLGGSMFTANPWICISGELGETQIMQIPRNVLEMTFECQNLGKLTTVQIGHDNS

SEQ ID NO: 69279 - protein, 75 aa, Homo sapiens
MPPSGPRGTLLLLPLLLLLLLRAVLAVPLERGAPNKEETPATESPVSGPALLSSQVFAVVLQLLQTPVPVGRMLQ

SEQ ID NO: 69280 - protein, 51 aa, Homo sapiens
PHEVKPAYATRYAITVWYFDAKERAAAKDKYQLASGQKGVQVPVSQPPTPT

SEQ ID NO: 69281 - protein, 349 aa, Homo sapiens
MNYSLHLAFVCLSLFTERMCIQGSQFNVEVGRSDKLSLPGFENLTAGYNKFLRPNFGGEPVQIALTLDIASISSISESNMDYTATIYLRQRWMDQRLVFEGNKSFTLDARLVEFLWVPDTYIVESKKSFLHEVTVGNRLIRLFSNGTVLYALRITTTVACNMDLSKYPMDTQTCKLQLESWGYDGNDVEFTWLRGNDSVRGLEHLRLAQYTIERYFTLVTRSQQETGNYTRLVLQFELRRNVLYFILETYVPSTFLVVLSWVSFWISLDSVPARTCIGVTTVLSMTTLMIGSRTSLPNTNCFIKAIDVYLGICFSFVFGALLEYAVAHYSSLQQMAAKDRQKICYLYAA

SEQ ID NO: 69282 - protein, 210 aa, Homo sapiens
MALLFLLPLVMQGVSRAEMGTADLGPSSVPTPTNVTIESYNMNPIVYWEYQIMPQVPVFTVEVKNYGVKARVGQKESAYAKSEEFAVCRDGKIGPPKLDIRKEEKQIMIDIFHPSVFVNGDEQEVDYDPETTCYIRVYNVYVRMNGSEIQYKILTQKEDDCDEIQCQLAIPVSSLNSQYCVSAEGVLHVWGVTTEKSKEVCITIFNSSIK

SEQ ID NO: 69283 - protein, 164 aa, Homo sapiens
MEALILYYDDTYPSVKEQKAFEKNIFNKTHRTDSEIALLEGLTVVYKSSIDLYFYVIGSSYENELMLMAVLNCLFDSLSQMLRKNVEKRALLENMEGLFLAVDEIVDGGVILESDPQQVVHRVALRGEDVPLTEQTVSQVYLFSLHPLSGFEFFWNFPNNLLGP

SEQ ID NO: 69284 - protein, 44 aa, Homo sapiens
  MOD_RES (1)..(1): Any amino acid
XLNYFRDAWNIFDFVTVLGSITDILVTEFGNPAWSRATPPSPRS

SEQ ID NO: 69285 - protein, 95 aa, Homo sapiens
  MOD_RES (1)..(1): Any amino acid
XPAPHFSPRCFPFSWASCSSPLRMAAAACTPRAPFPWIRSLSTRGPLGRGISPKSPWNTHLLSSIRPQVIPKSKFVLVKFDTQYPYGEKQDEFKR

SEQ ID NO: 69286 - protein, 101 aa, Homo sapiens
MHSPGAALHGHADARVAGGTPGTRAAAASPQGQEQAKCCSQQRGQAEASGGDSEKTAGGPRKNSPSQQPRHSLQNPGAPGDGRSHPLHAQQLFASCSQPAQ

SEQ ID NO: 69287 - protein, 206 aa, Homo sapiens
MGPWGEPELLVWRPEAVASEPPVPVGLEVKLGALVLLLVLTLLCSLVPICVLRRPGANHEGSASRQKALSLVSCFAGGVFLATCLLDLLPDYLAAIDEALAALHVTLQFPLQEFILAMGFFLVLVMEQITLAYKEQSGPSPLEETRALLGTVNGGPQHWHDGPGVPQASGAPATPSALRACVLVFSLALHSVFEGLAVGLQRDRAR

SEQ ID NO: 69288 - protein, 226 aa, Homo sapiens
MVGRSCGVATQRQGGGQRPTNLALTLSSSPAHSTALPWLPPRSLQLLSGHSVPAQPTPHLPSACGGPTRVTLGEERAWRSHGSNAGGHTCLPRRTAGAGSLTPGGERGGNNAGHTVVVDGKEYDFHLLPSGIINTKAVSFIGNGVVIHLPGLFEEAEKNEKKGLKDWEKRLIISDRAHLGCRRTSGSAAPGTRGEEYRHHQEGNRTNLLFQSCPDRPPHLRPPVRF

SEQ ID NO: 69289 - protein, 240 aa, Homo sapiens
MPALPLDQLQITHKDPKTGKLRTSPALHPEQKADRYFVLYKPPPKDNIPALVEEYLERATFVANDLDWLLALPHDKFWCQVIFDETLQKCLDSYLRYVPRKFDEGVASAPEVVDMQKRLHRSVFLTFLRMSTHKESKDHFISPSAFGEILYNNFLFDIPKILDLCVLFGKGNSPLLQKMIGNIFTQQPSYYSDLDETLPTILQVFSNILQHCGLQGDGANTTPQKLEERGRLTPSDMPLL

SEQ ID NO: 69290 - protein, 157 aa, Homo sapiens
MHGNEAVGRELLIFLAQYLCNEYQKGNETIVNLIHSTRIHIMPSLNPDGFEKAASQPGELKDWFVGRSNAQGIDLNRNFPDLDRIVYVNEKEGGPNNHLLKNMKKIVDQNTKLAPETKAVIHWIMDIPFVLSANLHGGDLVANYPYDETRSGSAHEY

SEQ ID NO: 69291 - protein, 198 aa, Homo sapiens
MGTCLIAKSSHEVFAMHLCRHLQLQYPELSCQVFLYQRSGEESYNLDSVAKNGLGLELGPQPQGVLRADIFSRMRTLVATVLDFIELFNQGTAFPAFEMEAYRPVGVVDFPRTEAGHLAGTVHPQLQDRDFQPLQPGAPIFQMFSGEDLLYEGESTVYPVFINEAAYYEKGVAFVQTEKFTFTVPAMPALTPAPSPAS

SEQ ID NO: 69292 - protein, 63 aa, Homo sapiens
MGRAVKVLQLFKTLHRTRQQVFKNDARALEAARIKINEEFKNNKSETSSKKIEENWSLGKTFL

SEQ ID NO: 69293 - protein, 81 aa, Homo sapiens
MEPWPLLLLFSLCSAGLVLGSEHETRLVAKLFKDYSSVVRPVEDHRQVVEVTVGLQLIQLINVDEVNQIVTTNVRLKQCRW

SEQ ID NO: 69294 - protein, 145 aa, Homo sapiens
MAAPAQQTTQPGGGKRKGKAQYVLAKRARRCDAGGPRQLEPGLQGILITCNMNERKCVEEAYSLLNEYGDDMYGPEKFTDKDQQPSGSEGEDDDAEAALKKEVGDIKASTEMRLRRFQSVESGANNVVFIRTLGIGKQQHGVTVG

SEQ ID NO: 69295 - protein, 795 aa, Homo sapiens
MEEMEEELKCPVCGSFYREPIILPCSHNLCQACARNILVQTPESESPQSHRAAGSGVSDYDYLDLDKMSLYSEADSGYGSYGGFASAPTTPCQKSPNGVRVFPPAMPPPATHLSPALAPVPRNSCITCPQCHRSLILDDRGLRGFPKNRVLEGVIDRYQQSKAAALKCQLCEKAPKEATVMCEQCDVFYCDPCRLRCHPPRGPLAKHRLVPPAQGRVSRRLSPRKVSTCTDHELENHSMYCVQCKMPVCYQCLEEGKHSSHEVKALGAMWKLHKSQLSQALNGLSDRAKEAKEFLVQLRNMVQQIQENSVEFEACLVAQCDALIDALNRRKAQLLARVNKEHEHKLKVVRDQISHCTVKLRQTTGLMEYCLEVIKENDPSGFLQISDALIRRVHLTEDQWGKGTLTPRMTTDFDLSLDNSPLLQSIHQLDFVQVKASSPVPATPILQLEECCTHNNSATLSWKQPPLSTVPADGYILELDDGNGGQFREVYVGKETMCTVDGLHFNSTYNARVKAFNKTGVSPYSKTLVLQTSEDTDSEEQTLPFPVPSERLPLRRMSPFSSTLNLQPSFPGRSYFDFRSSPHQLSLHSSLQSLNAPGCNFETQSAPYSQLVDIKKLLAVAWFAFDPGSAHSDIILSNDNLTVTCSSYDDRVVLGKTGFSKGIHYWELTVDRYDNHPDPAFGVARMDVMKDVMLGKDDKAWAMYVDNNRSWFMHNNSHTNRTEGGITKGATIGVLLDLNRKNLTFFINDEQQGPIAFDNVEGLFFPAVSLNRNVQVTLHTGLPVPDFYSSRASIA

SEQ ID NO: 69296 - protein, 258 aa, Homo sapiens
MSPAIALAFLPLVVTLLVRYRHYFRLLVRTVLLRSLRDCLSGLRIEERAFSYVLTHALPGDPGHILTTLDHWSSRCEYLSHMGPVKGQILMRLVEEKAPACVLELGTYCGYSTLLIARALPPGGRLLTVERDPRTAAVAEKLIRLAGFDEHMVELIVGSSEDVIPCLRTQYQLSRADLVLLAHRPRCYLRDLQLLEAHALLPAGATVLADHVLFPGAPRFLQYAKSCGRYRCRLHHTGLPDFPAIKDGIAQLTYAGPG

SEQ ID NO: 69297 - protein, 60 aa, Homo sapiens
MDKVCAVFGGSRGIGRAVAQLMARKGYRLAVIARNLEGAKAAAGDLGEIFSPQSPKDLGL

SEQ ID NO: 69298 - protein, 141 aa, Homo sapiens
MAAAATAAEGVPSRGPPGEVIHLNVGGKRFSTSRQTLTWIPDSFFSSLLSGRISTLKDETGAIFIDRDPTVFAPILNFLRTKELDPRGVHGSSLLHEAQFYGLTPLVLLLQFVACSFERSWIDLLVETSSSMVTCRHQCSQ

SEQ ID NO: 69299 - protein, 137 aa, Homo sapiens
RRHAELAPLAAIYQEIQETEQAIEELESMCKSLNKQDEKQLQELALEERQTIDQKINMLYNELFQSLVPKEKYDKNDVILEVTAGRTTGGDICQQFTREIFDMYQNYSCYKHWQFELLNYTPADYGRHIEEFACRRY

SEQ ID NO: 69300 - protein, 218 aa, Homo sapiens
MRGRRGDRMTINIQEHMAINVCPGPIRPIRQISDYFPRGPGPEGGGGGGGEAPAHLVPLALAPPAALLGATTPEDGAEVDSYDSDDATALGTLEFDLLYDRASCTLHCSILRAKGLKPMDFNGLADPYVKLHLLPGACKANKLKTKTQRNTLNPVWNEDLTYSGITDDDITHKVLRIAVCDEDKLSHNEFIGEIRVPLRRLKPSQKKHFNICLERQVP

SEQ ID NO: 69301 - protein, 145 aa, Homo sapiens
  MOD_RES (1)..(1): Any amino acid
XYVQANPGWYWASYAVFFATYLTLACCSGPRRHFPWNLILLTVFTLSMAYLTGMLSSYYNTTSVLLCLGITALVCLSVTVFSFQTKFDFTSCQGVLFVLLMTLFFSGLILAILLPFQYFLALDTQLLMGNRRHSLSPEEYIFGAL

SEQ ID NO: 69302 - protein, 73 aa, Homo sapiens
MNAPPAFESFLLFEGEKITINKDTKVPNACLFTINKEDHTLGNIIKSLECNGTILLTATSASRVQVILLLQPS

SEQ ID NO: 69303 - protein, 225 aa, Homo sapiens
MGVPRPQPWALGLLLFLLPGSLGAESHLSLLYHLTAVSSPAPGTPAFWVSGWLGPQQYLSYNSLRGEAEPCGAWVWENQVSWYWEKETTDLRIKEKLFLEAFKALGGKGPYTLQGLLGCELGPDNTSVPTAKFALNGEEFMNFDLKQGTWGGDWPEALAISQRWQQQDKAANKELTFLLFSCPHRLREHLERGRGNLEWKDTVSHYVAQAGLELLGSSDSPALVS

SEQ ID NO: 69304 - protein, 868 aa, Homo sapiens
MENVLAKALYDNVAESPDELSFRKGDIMTVLEQDTQGLDGWWLCSLHGRQGIVPGNRLKILVGMYDKKPAGPGPGPPATPAQPQPGLHAPAPPASQYTPMLPNTYQPQPDSVYLVPTPSKAQQGLYQVPGPSPQFQSPPAKQTSTFSKQTPHHPFPSPATDLYQVPPGPGGPAQDIYQVPPSAGMGHDIYQVPPSMDTRSWEGTKPPAKVVVPTRVGQGYVYEAAQPEQDEYDIPRHLLAPGPQDIYDVPPVRGLLPSQYGQEVYDTPPMAVKGPNGRDPLLEVYDVPPSVEKGLPPSNHHAVYDVPPSVSKDVPDGPLLREETYDVPPAFAKAKPFDPARTPLVLAAPPPDSPPAEDVYDVPPPAPDLYDVPPGLRRPGPGTLYDVPRERVLPPEVADGGVVDSGVYAVPPPAEREAPAEGKRLSASSTGSTRSSQSASSLEVAGPGREPLELEVAVEALARLQQGVSATVAHLLDLAGSAGATGSWRSPSEPQEPLVQDLQAAVAAVQSAVHELLEFARSAVGNAAHTSDRALHAKLSRQLQKMEDVHQTLVAHGQALDAGRGSSGATLEDLDRLVACSRAVPEDAKQLASFLHGNASLLFRRTKATAPGPEGGGTLHPNPTDKTSSIQSRPLPSPPKFTSQDSPDGQYENSEGGWMEDYDYVHLQGKEEFEKTQKELLEKGSITRQGKSQLELQQLKQFERLEQEVSRPIDHDLANWTPAQPLAPGRTGGLGPSDRQLLLFYLEQCEANLTTLTNAVDAFFTAVATNQPPKIFVAHSKFVILSAHKLVFIGDTLSRQAKAADVRSQVTHYSNLLCDLLRGIVATTKAAALQYPSPSAAQDMVERVKELGHSTQQFRRVLGQLAAA

SEQ ID NO: 69305 - protein, 138 aa, Homo sapiens
MEKKECPEKSSSSEEELPRRDSGSSRNIDASKLIRLQGSRKLLVDNSIRELQYTKTGIFFQAEACVTNDTVYRELPCVSETLCDISHFFQEDDETEAEPLLFRAVPECQLSGGDIPRYLFFLNLIHVSVSLLVSFTSK

SEQ ID NO: 69306 - protein, 68 aa, Homo sapiens
MSQSKGKKRNPGLKIPKEAFEQPQTSSTPPRDLDSKACISIGNQNFEVKADDLEPIMELGRADPSHSK

SEQ ID NO: 69307 - protein, 394 aa, Homo sapiens
MIIANDATVKGGAYYPVTVKKQLRAQEIAMQNRLPCIYLVDSGGAYLPRQADVFPDRDHFGRTFYNQAIMSSKNIAQVKAATGEEVSAEDLGGADLHCRKSGVSDHWALDDHHALHLTRKVVRNLNYQKKLDVTIEPSEEPLFPADELYGIVGANLKRSFDVREVIARIVDGSRFTEFKAFYGDTLVTGFARIFGYPVGIVGNNGVLFSESAKKGTHFVQLCCQRNIPLLFLQNITGFMVGREYEAEGIAKDGAKMVAAVACAQVPKITLIIGGSYGAGNYGMCGRAYSPRFLYIWPNARISVMGGEQAANVLATITKDQRAREGKQFSSADEAALKEPIIKKFEEEGNPYYSSARVWDDGIIDPADTRLVLGLSFSAALNAPIEKTDFGIFRM

SEQ ID NO: 69308 - protein, 171 aa, Homo sapiens
MDPKDRKKIQFSVPAPPSQLDPRQVEMIRRRRPTPAMLFRLSEHSSPAVQRIAESHLQSISNLNENQASEEEDELGELRELGYPREEDEEEEEDDEEEEEEEDSQAEVLKVIRQSAGQKTTCGQGLEGPWERPPPLDESERDGGSEDQVEDPALSEPGEEPQRPSPSEPGT

SEQ ID NO: 69309 - protein, 60 aa, Homo sapiens
MCAINGRRSGADAWPRGPRCAAPRACAVPRRRLPGLTPNEAPRRRPQEYDSIRITGANPN

SEQ ID NO: 69310 - protein, 551 aa, Homo sapiens
MSRIEKMSILGVRSFGIEDKDKQIITFFSPLTILVGPNGAGKTTIIECLKYICTGDFPPGTKGNTFVHDPKVAQETDVRAQIRLQFRDVNGELIAVQRSMVCTQKSKKTEFKTLEGVITRTKHGEKVSLSSKCAEIDREMISSLGVSKAVLNNVIFCHQEDSNWPLSEGKALKQKFDEIFSATRYIKALETLRQVRQTQGQKVKEYQMELKYLKQYKEKACEIRDQITSKEAQLTSSKEIVKSYENELDPLKNRLKEIEHNLSKIMKLDNEIKALDSRKKQMEKDNSELEEKMEKVFQGTDEQLNDLYHNHQRTVREKERKLVDCHRELEKLNKESRLLNQEKSELLVEQGRLQLQADRHQEHIRARDSLIQSLATQLELDGFERGPFSERQIKNFHKLVRERQEGEAKTANQLMNDFAEKETLKQKQIDEIRDKKTGLGRIIELKSEILSKKQNELKNVKYELQQLEGSSDRILELDQELIKAERELSKAEKNSNVETLKMEVISLQNEKADLDRTLRKLDQEMEQLNHHTTTRTQMEMLTKDKQGTSFI

SEQ ID NO: 69311 - protein, 215 aa, Homo sapiens
HLAAHLWKHSEALEALENGIKSSRRLENFCRDFELQKVCYLPLNTFLLRPLHRLMHYKQVLERLCKHHPPSHADFRDCRAALAEITEMVAQLHGTMIKMENFQKLHELKKDLIGIDNLVVPGRVSSSGLTMHCAGSRKEASEGLTFEPFEERPLQSKMSSFHPPGRQLEKHNSVVSSESLCSEEIKQSSDLIFCFFSLRGDSLLYLFPYHIPQKI

SEQ ID NO: 69312 - protein, 217 aa, Homo sapiens
MANLLKTVVTGCSCPLLSNLGSCKGLRVKKDFLRTFYTHQELWCKAPVKPGIPYKQLTVGVPKEIFQNEKRVALSPAGVQNLVKQGFNVVVESGAGEASKFSDDHYRVAGAQIQGAKEVLASDLVVKVRAPMVNPTLGVHEADLLKTSGTLISFIYPAQNPELLNKLSQRKTTVLAMDQVPRVTIAQGYDALSSMANIAGYKAVVLAANHFGRFFTG

SEQ ID NO: 69313 - protein, 132 aa, Homo sapiens
MVPSRRTWNLGATPSLRGLWRVGRAPEPEPGMARPAPAPASPAARPFPHTGPGRLRTGRGKDTPVCGDEDSSARSAARPALAQCRALSVDWAGPGSPHGLYLTLQVEHLKEKLISQAQEVSRLRSELGGTDL

SEQ ID NO: 69314 - protein, 96 aa, Homo sapiens
MVENFKNLVAVGSKHQNKMETLQKFALKYLSNQELSCWQIWKQVASELTRCLQGKSSQLLQGDSIQVSENENNIMNPKGDSSIYIENQEFPFWRTQ

SEQ ID NO: 69315 - protein, 124 aa, Homo sapiens
MAASAARGAAALRRSINQPVAFVRRIPWTAASSQLKEHFAQFGHVRRCILPFDKETGFHRGLGWVQFSSEEGLRNALQQENHIIDGVKESLFRDTQWTAKGERPPQANGRKAAQSQPARFTPPK

SEQ ID NO: 69316 - protein, 36 aa, Homo sapiens
MKQPIMADGPRCKRRKQANPRRKNVSTWSGGARYPG

SEQ ID NO: 69317 - protein, 499 aa, Homo sapiens
GSLGLQGTAELLRLSKALADVVIPQEYGISREEKLEIAVGFCLPLLRKILLDLQRTHEDESVNKLHPLYSRGVLSPGRHVRTRLYFTSESHVHSLLSVFRYGGLLDETQDAQWQRALDYLSAISELNYMTQIVIMLYEDNTQDPLSEERFHVELHFSPGVKGVEEEGSAPAGCGFRPASSENEEMKTNQGSMENLCPGKASDEPDRALQTSPQPPEGPGLPRRSPLIRNRKAGSMEVMNMQCTGNLDLIPLRGRRCRRSGDLPQPSLAIGLQPRAVSTTHLASCTQVLSETSSSRPGGYRLFSSSRPPTEMKQSGLGSQCTGLFSTTVLGGSSSAPNLQDYARSHGKKLPPASLKHRDELLDDQHPVVRLLRSFSSDCTGGRPVSLDATLAHHLHQCSYHLRLFRNWLRSGQDDPECLYGFEGCSMVPTIYPLETLHNALSLRQVSEFLSRVCQRHTDAQAQASAALFDSMHSSQASDNPFSPPRTLHSPPLQLQQRSE

SEQ ID NO: 69318 - protein, 266 aa, Homo sapiens
MLLKEYRICMPLTVDEYKIGQLYMISKHSHEQSDRGEGVEVVQNEPFEDPHHGNGQFTEKRVYLNSKLPSWARAVVPKIFYVTEKAWNYYPYTITECSFLPKFSIHIETKYEDNKGSNDTIFDNEAKDVEREVCFIDIACDEIPERYYKESEDPKHFKSEKTGRGQLREGWRDSHQPIMCSYKLVTVKFEVWGLQTRVEQFVHKVVRDILLIGHRQAFAWVDEWYDMTMDDVREYEKNMHEQTNIKVCNQHSSPVDDIESHAQTST

SEQ ID NO: 69319 - protein, 145 aa, Homo sapiens
MDLSEKWTLEEGAWLSHAGIHHFASTRADSEFVEASPASYSPDELGSPSACYSPSSPVQVLEDSTYFSPDFQLYSGRHETSALTVEATSSIREKVVEDPLCNFHSPNFLRISEVEMRGSEDAAAGTVLQRLIQEQLRYGTPTENM

SEQ ID NO: 69320 - protein, 83 aa, Homo sapiens
MTSRNQLVQKVLQELQEAVECEGLEGLIGASLEAKQVLSSFTLPTCREGGPGLQVLEVDSVALSLYPEDAPRNMLPLVCKGEG

SEQ ID NO: 69321 - protein, 154 aa, Homo sapiens
MGGRVFLAFCVWLTLPGAETQDSRGCARWCPQNSSCVNATACRCNPGFSSFSEIITTPTETCDDINECATPSKVSCGKFSDCWNTEGSYDCVCSPGYEPVSGAKTFKNESENTCQGKNHPTSSDFPSMRFGVTRAILAASREQGLGCRVSAWRL

SEQ ID NO: 69322 - protein, 275 aa, Homo sapiens
MTTLEDPSPAQPGGTKELRVMLDSVTHSTFLPNASFCDPLMSWTDLFSNEEYYPAFEHQTACDSYWTSVHPEYWTKRHVWEWLQFCCDQYKLDTNCISFCNFNISGLQLCSMTQEEFVEAAGLCGEYLYFILQNIRTQGYSFFNDAEESKATIKDYADSNCLKTSGIKSQDCHSHSRTSLQSSHLWEFVRDLLLSPEENCGILEWEDREQGIFRVVKSEALAKMWGQRKKNDRMTYEKLSRALRYYYKTGILERVDRRLVYKFGKNAHGWQEDKL

SEQ ID NO: 69323 - protein, 64 aa, Homo sapiens
MATTAAPAGGARNGAGPEWGGFEENIQQWKNKALNPGMSRGLNGWNRKVLHSRSHCLHRAEAQL

SEQ ID NO: 69324 - protein, 98 aa, Homo sapiens
MSEQGDLNQAIAEEGGTEQETATPENGIVKSESLDEEEKLELQRRLEAQNQERRKSKSGAGKGKLTRSLAVCEESSARPGGESLQDQIAAKNTRILQA

SEQ ID NO: 69325 - protein, 44 aa, Homo sapiens
MFPVLEPHQVGLIRSYNSKTMTCEDIPFLNQLWLIYWSEEKSPG

SEQ ID NO: 69326 - protein, 383 aa, Homo sapiens
  MOD_RES (1)..(1): Any amino acid
XNAAGQLPTSPGHMHTQVPPYPQPQPYQPAQPYPFGTGGSAMYRPQQPVAPPTSNAYPNTPYISSASSYTGQSQLYAAQHQASSPTSSPATSFPPPPSSGASFQHGGPGAPPSSSAYALPPGTTGTLPAASELPASQRTENQSIQDQAPMLEGPQNGWNDPPALNRVPKKKKMPENFMPPVPITSPIMNPLGDPQSQMLQQQPSAPVPLSSQSSFPQPHLPGGQPFHGVQQPLGQTGMPPSFSKPNIEGAPGAPIGNTFQHVQSLPTKKITKKPIPDEHLILKTTFEDLIQRCLSSATDPQTKRKLDDASKRLEFLYDKLREQTLSPTITSGLHNIARSIETRNYSEGLTMHTHIVSTSNFSETSAFMPVLKVVLTQANKLGV

SEQ ID NO: 69327 - protein, 148 aa, Homo sapiens
MPLEQRSQHCKPEEGLEARGEALGLVGAQAPATEEQQTASSSSTLVEVTLGEVPAADSPSPPHSPQGASSFSTTINYTLWRQSDEGSSNQEEEGPRMFPDLESEFQAAISRKMVELVHFLLLKYRAREPVTKAEMLESVLRNCQDFFP

SEQ ID NO: 69328 - protein, 100 aa, Homo sapiens
MATAIQNPLKSRGLLPRGHRALPQLQRAPVRRAQPATALPRLADRRGPEQLLHLDGEDPPRAGFGPGTDLHVPRPLLEEETETQHPGGPQTQALRVQDRL

SEQ ID NO: 69329 - protein, 299 aa, Homo sapiens
MSASAVFILDVKGKPLISRNYKGDVAMSKIEHFMPLLVQREEEGALAPLLSHGQVHFLWIKHSNLYCIHPTWCPWRWVWGLSAMVAAQAKRGWAEDRSCTAHLCGLGWGAGAGRDEGGGKGQGGGSGSVFHLLLHKWHLFLNLAAPVVATTSKNANASLVYSFLYKTIEVFCEYFKELEEESIRDNFVIVYELLDELMDFGFPQTTDSKILQEYITQQSNKLETGKSRVPPTVTNAVSWRSEGIKYKKNEVFIDVIESVNLLVNANGSVLLSEIVGTIKLKVFLSGMPELRLGLNDRVL

SEQ ID NO: 69330 - protein, 38 aa, Homo sapiens
MFRKGKKRHSSSSSQSSEISTKSKDKATIIQIPVQNFE

SEQ ID NO: 69331 - protein, 66 aa, Homo sapiens
MEESVNQMQPLNEKQIANSQDGYVWQVTDMNRLHRFLCFGSEGLAIVTKYITKGWKEVHELYKEKA

SEQ ID NO: 69332 - protein, 67 aa, Homo sapiens
IFLGERAAKWRTPDGLMDGLTTNGVLVMHPAGGFSEDSAPGVWREISVCGNVYTLRDSRSAQQRGKL

SEQ ID NO: 69333 - protein, 95 aa, Homo sapiens
MAVGKNKRLTKGGKKGAKKKVVDPFSKKDWYDVKAPAMFNIRNIGKTLVTRTQGTKIASDGLKGRVFEVSLADLQNDEVAFRKFKLITEDVQDND

SEQ ID NO: 69334 - protein, 36 aa, Homo sapiens
MTSEKGEESNPGSLTSSMTPENFVKRPVCSTKSSGA

SEQ ID NO: 69335 - protein, 107 aa, Homo sapiens
MACRCLSFLLMGTFLSGQVAQLSCTLSPQHVTIRDYGVSWYQQRAGSAPRYLLYYRSEEDHHRPADIPDRFSAAKDEAHNACVLTISPVQPEDDADYYCSVGYGFSP

SEQ ID NO: 69336 - protein, 100 aa, Homo sapiens
MCQRCGLKLIVIICFFVQLARDLLHPSLEEEKKKHKKKRLVQSPNSYFMDVKCPGCYKITTVFSHAQTVVLCVGCSTVLCQPTGGKARLTEGCSFRRKQH

SEQ ID NO: 69337 - protein, 219 aa, Homo sapiens
MRVRWLLFWLLFWLLLGFISHQSTCVSRWVLWLLFWLLLGFISHQSTCVINTLADHRHRGTDFGGSPWLLIITVFLRSYKFAISLCTSYLCVSFLKTIFPSQNGHDGSTDVQQRARRSNRRRQEGIKIVLEDIFTLWRQVETKVRAKIRKMKVTTKVNRHDKINGKRKTAKEHLRKLSMKEREHGEKERQVSEAEENGKLDMKEIHTYMEMFQRAQALR

SEQ ID NO: 69338 - protein, 177 aa, Homo sapiens
CTLPWGTLSSLKLQSRKDSDDGPIMWVRPGEQMIPVADMPKSPFKRKRTTNEIKNLQYLPRTSEPREMLFEDRTRAHADHIGQGFERQTTAAVGVLKAVHCGEWPDQPRITKDVICFHAEDFLEVVQRMQLDLHEPPLSQECCSSVQDSFSCMQFSMAYSAQIISLRGGHFSEYSYS

SEQ ID NO: 69339 - protein, 35 aa, Homo sapiens
MGEMEQLRQEAEQLKKQIADARKACADVTLAELVS

SEQ ID NO: 69340 - protein, 222 aa, Homo sapiens
VPESSLTADLLSGFGGSFMAPSPSPVTPAQNNLLQPNFEAAFGTTPSTSSSSSFDPSVFDGLGDLLMPTMAPAGQPAPVSMVPPSPAMAASKALGSDLDSSLASLVGNLGISGTTTKKGDLQWNAGEKKLTGGANWQPKVAPATWSAGVPPSAPLQGAVPPTSSVPPVAGAPSVGQPGAGFGMPPAGTGMPMMPQQPVMFAQPMMRPPFGAAAVPGTQLQYL

SEQ ID NO: 69341 - protein, 233 aa, Homo sapiens
MDLQNDLGQTALHLAAILGETSTVEKLYAAGAGLCVAERRGHTALHLACRVGAHACARALLQPRPRRPREAPDTYLAQGPDRTPDTNHTPVALYPDSDLEKEEEESEEDWKLQLEAENYEGHTPLHVAVIHKDVEMVRLLRDAGADLDKPEPTCGRSPLHLAVEAQAADVLELLLRAGANPAARMYGGRTPLGSAMLRPNPILARLLRAHGAPEPEGEDEKSGPCSSSSDSDS

SEQ ID NO: 69342 - protein, 45 aa, Homo sapiens
MRLLLLLLVAASAMVRSEASANLGGVPSKRLKMQYATGPLLKFQI

SEQ ID NO: 69343 - protein, 70 aa, Homo sapiens
  MOD_RES (1)..(1): Any amino acid
XKLLRDDEAHLQEDQGEEECFHDCSASFEEEPGADKVENKSNEDVNSSELDEEYLIELEKNMSDEEKQII

SEQ ID NO: 69344 - protein, 197 aa, Homo sapiens
MANCERTFIAIKPDGVQRGLVGEIIKRFEQKGFRLVGLKFMQASEDLLKEHYVDLKDRPFFAGLVKYMHSGPVVAMVWEGLNVVKTGRVMLGETNPADSKPGTIRGDFCIQVGRTMANLERTFIAIKPDGVQRGLVGEIIKRFEQKGFRLVAMKFLRASEEHLKQHYIDLKDRPFFPGLVKYMNSGPVVAMEHHSWQ

SEQ ID NO: 69345 - protein, 76 aa, Homo sapiens
MADEGKSYSEHDDERVNFPQRKKKGRGPFRWKYGEGNRRSGRGGSGIRSSRLEEDDGDVAMSDAQDGPRQPLYHPT

SEQ ID NO: 69346 - protein, 13 aa, Homo sapiens
MESQTVDDEAPAV

SEQ ID NO: 69347 - protein, 281 aa, Homo sapiens
MATLKEKLIAPVAEEEATVPNNKITVVGVGQVGMACAISILGKSLADELALVDVLEDKLKGEMMDLQHGSLFLQTPKIVADKDYSVTANSKIVVVTAGVRQQEGESRLNLVQRNVNVFKFIIPQIVKYSPDCIIIVVSNPVDILTYVTWKLSGLPKHRVIGSGCNLDSARFRYLMAEKLGIHPSSCHGWILGEHGDSSVAVWSGVNVAGVSLQELNPEMGTDNDSENWKEVHKMVVESAYEVIKLKGYTNWAIGLSVADLIESMLKNLSRIHPVSTMVKSH

SEQ ID NO: 69348 - protein, 48 aa, Homo sapiens
MPGPQGGRGAATMSLGKLSPVGWVSSSQGKRRLTADMISHPLGDFRHT

SEQ ID NO: 69349 - protein, 527 aa, Homo sapiens
MERDPPFVLDASLGVINRVEKIGGASSRGENSYGLETVCKDIRNLRFAHKPEGRTRRSIFENLMKYAFPVSNNLPLFAFEYKEVFPENGWKLYDPLLEYRRQGIPNESWRITKINERYELCDTYPALLVVPANIPDEELKRVASFRSRGRIPVLSWIHPESQATITRCSQPMVGVSGKRSKEDEKYLQAIMDSNAQSHKIFIFDARPSVNAVANKAKGGGYESEDAYQNAELVFLDIHNIHVMRESLRKLKEIVYPNIEETHWLSNLESTHWLEHIKLILAGALRIADKVESGKTSVVVHCSDGWDRTAQLTSLAMLMLDGYYRTIRGFEVLVEKEWLSFGHRFQLRVGHGDKNHADADRSPVFLQFIDCVWQMTRQFPTAFEFNEYFLITILDHLYSCLFGTFLCNSEQQRGKENLPKRTVSLWSYINSQLEDFTNPLYGSYSNHVLYPVASMRHLELWVGYYIRWNPRMKPQEPIHNRYKELLAKRAELQKKVEELQREISNRSTSSSERASSPAQCVTPVQTVV

SEQ ID NO: 69350 - protein, 105 aa, Homo sapiens
MMGVLFCCGAGFFIRRRMYPPPLIEEPAFNVSYTRQPPNPGPGAQQPGPPYYTDPGGPGMNPVGNSMAMAFQVPPNSPQGSVACPPPPAYCNTPPPPYEQVVKAK

SEQ ID NO: 69351 - protein, 410 aa, Homo sapiens
MSLMVVSMACVGFFLLEGPWPHVGGQDKPFLSAWPGTVVSEGQHVTLQCRSRLGFNEFSLSKEDGMPVPELYNRIFRNSFLMGPVTPAHAGTYRCCSSHPHSPTGWSAPSNPVVIMVTGVHRKPSLLAHPGPLVKSGETVILQCWSDVRFERFLLHREGITEDPLRLIGQLHDAGSQVNYSMGPMTPALAGTYRCFGSVTHLPYELSAPSDPLDIVVVGLYGKPSLSAQPGPTVQAGENVTLSCSSRSLFDIYHLSREAEAGELRLTAVLRVNGTFQANFPLGPVTHGGNYRCFGSFRALPHAWSDPSDPLPVSVTGNSRHLHVLIGTSVVIIPFAILLFFLLHRWCANKKNAVVMDQEPAGNRTVNREDSDEQDPQEVTYAQLNHCVFTQRKITRPSQRPKTPPTDTSV

SEQ ID NO: 69352 - protein, 180 aa, Homo sapiens
MTILGTTFGMVFSLLQVVSGESGYAQNGDLEDAELDDYSFSCYSQLEVNGSQHSLTCAFEDPDVNITNLEFEICGALVEVKCLNFRKLQEIYFIETKKFLLIGKSNICVKVGEKSLTCKKIDLTTIVKPEAPFDLSVVYREGANDFVVTFNTSHLQKKYVKVLMHDVAYRQEKDENKWTD

SEQ ID NO: 69353 - protein, 256 aa, Homo sapiens
MAPGSRTSLLLAFALLCLPWLQEAGAVQTVPLSRLFDHAMLQAHRAHQLAIDTYQEFEETYIPKDQKYSFLHDSQTSFCFSDSIPTPSNMEETQQKSNLELLRISLLLIESWLEPVRFLRSMFANNLVYDTSDSDDYHLLKDLEEGIQTLMGVRVAPGVTNPGTPLASRAGGEKYCCPLFSSKALTQENSPYSSFRLVNPPGLSLHPEGEGGKWINERGREQCPSAWPLLLFLHFAEAGRRQPPDWADPQADLQQV

SEQ ID NO: 69354 - protein, 226 aa, Homo sapiens
MEESKPKPRSFMPNLVPPKIPDGERVDFDDIHRKRMEKDLNELQALIEAHFENRKKEEEELVSLKDRIERRRAERAEQQRIRNEREKERQNRLAEERARREEEENRRKAEDEARKKKALSNMMHFGGYIQKTERKSGKRQTEREKKKKILAERRKVLAIDHLNEDQLREKAKELWQSIYNLEAEKFDLQEKFKQQKYEINVLRNRINDNQKVSKTRGKAKVTGRWK

SEQ ID NO: 69355 - protein, 132 aa, Homo sapiens
MREGQEMGPTPVPSNPLLHRSFPCWPRGWSHPVPTRELLLEPAQPADLLPPAPTAGPCSLASWMLSQPGRGSQVKTGGTPTATAQDAEAPLPDCDLCLSPAPVGTWQPRAKAGWAGDPRNLSGNTFSPGWEQ

SEQ ID NO: 69356 - protein, 124 aa, Homo sapiens
MSGCRVFIGRLNPAAREKDVERFFKGYGRIRDIDLKRGFGFVEFEDPRDADDAVYELDGKELCSERVTIEHARARSRGGRGRGRYSDRFSSRRPRNDRRNAPPVRTENRLIVENLSSRVSWQVC

SEQ ID NO: 69357 - protein, 895 aa, Homo sapiens
MSLRDKGGEEECFEYDCQDEERKPTHRQHDTQDLLEEVLCAERVGQMTKTYNDIDAVTRLLEEKERDLELAARIGQSLLKKNKTLTERNELLEEQVEHIREEVSQLRHELSMKDELLQFYTSAAEESEPESVCSTPLKRNESSSSVQNYFHLDSLQKKLKDLEEENVVLRSEASQLKTETITYEEKEQQLVNDCVKELRDANVQIASISEELAKKTEDAARQQEEITHLLSQIVDLQKKAKACAVENEELVQHLGAAKDAQRQLTAELRELEDKYAECMEMLHEAQEELKNLRNKTMPNTTSRRYHSLGLFPMDSLAAEIEGTMRKELQLEEAESPDITHQKRVFETVRNINQVVKQRSLTPSPMNIPGSNQSSAMNSLLSSCVSTPRSSFYGSDIGNVVLDNKTNSIILETEAADLGNDERSKKPGTPGTPGSHDLETALRRLSLRRENYLSERRFFEEEQERKLQELAEKGELRSGSLTPTESIMSLGTHSRFSEFTGFSGMSFSSRSYLPEKLQIVKPLEGSATLHHWQQLAQPHLGGILDPRPGVVTKGFRTLDVDLDEVYCLNDFEEDDTGDHISLPRLATSTPVQHPETSAHHPGKCMSQTNSTFTFTTCRILHPSDELTRVTPSLNSAPTPACGSTSHLKSTPVATPCTPRRLSLAESFTNTRESTTTMSTSLGLVWLLKERGISAAVYDPQSWDRAGRGSLLHSYTPKMAVIPSTPPNSPMQTPTSSPPSFEFKCTSPPYDNFLASKPASSILREVREKNVRSSESQTDVSVSNLNLVDKVRRFGVAKVVNSGRAHVPTLTEEQGPLLCGPPGPAPALVPRGLVPEGLPLRCPTVTSAIGGLQLNSGIRRNRSFPTMVGSSMQMKAPVTLTSGILMGAKLSKQTSLR

SEQ ID NO: 69358 - protein, 117 aa, Homo sapiens
MAIFSVYVVNKAGGLIYQLDSYAPRAEAEKTFSYPLDLLLKLHDERVLVAFGQRDGIRVGHAVLAINGMDVNGRYTADGKEVLEYLGNPANYPVSIRFGRPRLTSNEKLMLASMFHS

SEQ ID NO: 69359 - protein, 1242 aa, Homo sapiens
MLQQVPENINFPAEEEKILEFWTEFNCFQECLKQSKHKPKFTFYDGPPFATGLPHYGHILAGTIKDIVTRYAHQSGFHVDRRFGWDCHGLPVEYEIDKTLGIRGPEDVAKMGITEYNNQCRAIVMRYSAEWKSTVSRLGRWIDFDNDYKTLYPQFMESVWWVFKQLYDKGLVYRGVKVMPFSTACNTPLSNFESHQNYKDVQDPSVFVTFPLEEDETVSLVAWTTTPWTLPSNLAVCVNPEMQYVKIKDVARGRLLILMEARLSALYKLESDYEILERFPGAYLKGKKYRPLFDYFLKCKENGAFTVLVDNYVKEEEGTGVVHQAPYFGAEDYRVCMDFNIIRKDSLPVCPVDASGCFTTEVTDFAGQYVKDADKSIIRTLKEQGRLLVATTFTHSYPFCWRSDTPLIYKAVPSWFVRVENMVDQLLRNNDLCYWVPELVREKRFGNWLKDARDWTISRNRYWGTPIPLWVSDDFEEVVCIGSVAELEELSGAKISDLHRESVDHLTIPSRCGKGSLHRISEVFDCWFESGSMPYAQVHYPFENKREFEDAFPADFIAEGIDQTRGWFYTLLVLATALFGQPPFKNVIVNGLVLASDGQKMSKRKKNYPDPVSIIQKYGADALRLYLINSPVVRAENLRFKEEGVRDVLKDVLLPWYNAYRFLIQNVLRLQKEEEIEFLYNENTVRESPNITDRWILSFMQSLIGFFETEMAAYRLYTVVPRLVKFVDILTNWYVRMNRRRLKGENGMEDCVMALETLFSVLLSLCRLMAPYTPFLTELMYQNLKVLIDPVSVQDKDTLSIHYLMLPRVREELIDKKTESAVSQMQSVIELGRVIRDRKTIPIKYPLKEIVVIHQDPEALKDIKSLEKYIIEELNVRKVTLSTDKNKYGIRLRAEPDHMVLGKRLKGAFKAVMTSIKQLSSEELEQFQKTGTIVVEGHELHDEDIRLMYTFDQATGGTAQFEAHSDAQALVLLDVTPDQSMVDEGMAREVINRIQKLRKKCNLVPTDEITVYYKAKSEGTYLNSVIESHTEFIFTTIKAPLKPYPVSPSDKVLIQEKTQLKGSELEITLTRGSSLPGPACAYVNLNICANGSEQGGVLLLENPKGDNRLDLLKLKSVVTSIFGVKNTELAVFHDETGSAPSLINSSSTLLCQYINLQLLNAKPQECLMGTVGTLLLENPLGQNGLTHQGLLYEAAKVFGLRSRKLKLFLNETQTQEITEDIPVKTLNMKTVYVSVLPTTADF

SEQ ID NO: 69360 - protein, 121 aa, Homo sapiens
MDTKECLLSTEEIFLAKIEKFINIHQNSFLVLSAALHGPEEWKLMFRIQQRFLGCNLRILPVHNTVNAINLMCTIAKTTSKPYIDSICYRMITAKAYIIEQSPVWKTLQKIKLNSDSVNPN

SEQ ID NO: 69361 - protein, 116 aa, Homo sapiens
MDKGTYIHALDNGLFTLGAPHKEVDEGPSPPEQFTAVKLSDSRIALKSGYGKYLGINSDGLVVGRSDAIGPREQWEPVFQNGKMALLASNSCFIRCNEAGDIEAKSKTAGEEEMIK

SEQ ID NO: 69362 - protein, 271 aa, Homo sapiens
MFQSLGERINTLVRYLLHRAKKGLGMRRADVSMANMVLIGFFSCISTLCIGAAAFSHYEHWTFFQAYYYCFITLTTIGFGDYVALQKDQALQTQPQYVAFSFVYILTGLTVIGAFLNLVVLRFMTMNAEDEKRDAEHRALLTRNGQAGGGGGGGSAHTTDTASSTAAAGGGGFRNVYAEVLHFQSMCSCLWYKSREKLQYSIPMIIPRDLSTSDTCVEQSHSSPGGGGRYSDTPSRRCLCSGAPRSAISSVSTGLHSLSTFRGLMKRRSSV

SEQ ID NO: 69363 - protein, 58 aa, Homo sapiens
MSGQTLTDRIAAAQYSVTGSAVARAVCKATTHEVMGPKKKHLDYLQTFFQQVLPNFEI

SEQ ID NO: 69364 - protein, 52 aa, Homo sapiens
MDVKCPGCYKITTVFSHAQTVVLCVGCSTVLCQPTGGKARLTEGCSFRRKQH

SEQ ID NO: 69365 - protein, 490 aa, Homo sapiens
MLLFFTLGLLIHFVFFASIFDIYFTSPLVHGMTPQFTPLPPPARRLVLFVADGLRADALYELDENGNSRAPFIRNIIMHEGSWGISHTRVPTESRPGHVALIAGFYEDVSAVAKGWKENPVEFDSLFNESKYTWSWGSPDILPMFAKGASGDHVYTYSYDAKREDFGAQDATKLDTWVFDNVKDFFHHARNNQSLFSKINEEKIVFFLHLLGIDTNGHAHRPSSRDYKHNIKKVDDGVKEIVSMFNHFYGNDGKTTFIFTSDHGMTDWGSHGAGHPSETLTPLVTWGAGIKYPQRVSAQQFDDAFLKEWRLENWKRLDVNQADIAPLMTSLIGVPFPLNSVGILPVDYLNNTDLFKAESMFTNAVQILEQFKVKMTQKKEVTLPFLFTPFKLLSDSKQFNILRKARSYIKHRKFDEVVSLCKELIHLALKGLSYYHTYDRFFLGVNVVIGFVGWISYASLLIIKSHSNLIKGVSKEVKVRLENVRIQMMV

SEQ ID NO: 69366 - protein, 632 aa, Homo sapiens
MGDILAHESELLGLVKEYLDFAEFEDTLKTFSKECKIKGKPLCKTVGGSFRDSKSLTIQKDLVAAFDNGDQKVFFDLWEEHISSSIRDGDSFAQKLEFYLHIHFAIYLLKYSVGRPDKEELDEKISYFKTYLETKGAALSQTTEFLPFYALPFVPNPMVHPSFKELFQDSWTPELKLKLIKFLALISKASNTPKLLTIYKENGQSNKEILQQLHQQLVEAERRSVTYLKRYNKIQADYHNLIGVTAELVDSLEATVSGKMASTMLRASLAPVKLKDVPLLPSLDYEKLKKDLILGSDRLKAFLLQALRWRLTTSHPGEQRETVLQAYISNDLLDCYSHNQRSVLQLLHSTSDVVRQYMARLINAFASLAEGRLYLAQNTKVLQMLEGRLKEEDKDIITRENVLGALQKFSLRRPLQTAMIQDGLIFWLVDVLKDPDCLSDYTLEYSVALLMNLCLRSTGKNMCAKVAGLVLKVLSDLLGHENHEIQPYVNGALYSILSVPSIREEARAMGMEDILRCFIKEGNAEMIRQIEFIIKQLNSEELPDGVLESDDDEDEDDEEDHDIMEADLDKDELIQPQLGELSGEKLLTTEYLGIMTNTGKTRRKGLANVQWSGDEPLQRPVTPGGHRNGYPV

SEQ ID NO: 69367 - protein, 81 aa, Homo sapiens
MAQPPPDVEGDDCLPAYRHLFCPDLLRDKVAFITGGGSGIGFRIAEIFMRHGCHTVIASRSLPRVLTRWVFTTLTRLVSNS

SEQ ID NO: 69368 - protein, 490 aa, Homo sapiens
MAAEQDPEARAAARPLLTDLYQATMALGYWRAGRARDAAEFELFFRRCPFGGAFALAAGLRDCVRFLRAFRLRDADVQFLASVLPPDTDPAFFEHLRALDCSEVTVRALPEGSLAFPGVPLLQVSGPLLVVQLLETPLLCLVSYASLVATNAARLRLIAGPEKRLLEMGLRRAQGPDGGLTASTYSYLGGFDSSSNVLAGQLRGVPVAGTLAHSFVTSFSGSEVPPDPMLAPAAGEGPGVDLAAKAQVWLEQVCAHLGLGVQEPHPGERAAFVAYALAFPRAFQGLLDTYSVWRSGLPNFLAVALALGELGYRAVGVRLDSGDLLQQAQEIRKVFRAAAAQFQVPWLESVLIVVSNNIDEEALARLAQEGSEVNVIGIGTSVVTCPQQPSLGGVYKLVAVGGQPRMKLTEDPEKQTLPGSKAAFRLLGSDGSPLMDMLQLAEEPVPQAGQELRVWPPGAQEPCTVRPAQVEPLLRLCLQQGQVAAPPPSS

SEQ ID NO: 69369 - protein, 60 aa, Homo sapiens
MASDEGKLFVGGLSFDTNEQSLEQVFSKYGQISEDLSPLHSGGCERQGDPEISGIWVCHL

SEQ ID NO: 69370 - protein, 269 aa, Homo sapiens
MSEYIRVTEDENDEPIEIPSEDDGTVLLSTVTAQFPGACGLRYRNPVSQCMRGVRLVEGILHAPDAGWGNLVYVVNYPKDNKRKMDETDASSAVKVKRAVQKTSDLIVLGLPWKTTEQDLKEYFSTFGEVLMVQVKKDLKTGHSKGFGFVRFTEYETQVKVMSQRHMIDGRWCDCKLPNSKQSQDEPLRSRKVFVGRCTEDMTEDELREFFSQYGDVMDVFIPKPFRAFAFVTFADDQIAQSLCGEDLIIKGISVHFISFQMFMEEALH

SEQ ID NO: 69371 - protein, 145 aa, Homo sapiens
MIEAHVDVKTTDGYLLRLFCVGFTKKRNNQIRKTSYAQHQQVRQIRKKMMEIMTREVQTNDLKEVVNKLIPDSIGKDIEKACQSIYPLHDVFVRKVKMLKKPKFELGKLMELHGEGSSSGKATGDETGAKVERADGYEPPVQESV

SEQ ID NO: 69372 - protein, 31 aa, Homo sapiens
MYCCSAQDSKMDYKRRFLLGGSKQKVQQHQQ

SEQ ID NO: 69373 - protein, 53 aa, Homo sapiens
MKKLWVKKRFQKTGHSRRAFGRLTHGAWTVGVLALAHAYSSSWSLSLCEASSS

SEQ ID NO: 69374 - protein, 296 aa, Homo sapiens
MPLHVKWPFPAVPPLTWTLASSVVMGLVGTYSCFWTSEWAQAEAGPPGYPCPAGEYMNHLTVHNREVLYELIEKRGPATPLITVSNHQSCMDDPHLWGILKLRHIWNLKLMRWTPAAADICFTKELHSHFFSLGKCVPVCRGAEFFQAENEGKGVLDTGRHMPGAGKRREKGDGVYQKGMDFILEKLNHGDWVHIFPEGIGRLIAECHLNPIILPLWHVGMNDVLPNSPPYFPRFGQKITVLIGKPFSALPVLERLRAENKSAVEMRKALTDFIQEEFQHLKTQAEQLHNHLQPGR

SEQ ID NO: 69375 - protein, 81 aa, Homo sapiens
MVMATVKKGKPELRKKVHPAVVIRQRKSYRRKDGVFLYFEDNAGVIVNNKGEMKGSAITGPVAKECADLWPRIASNAGSIA

SEQ ID NO: 69376 - protein, 35 aa, Homo sapiens
  MOD_RES (1)..(1): Any amino acid
XFYLFHPLAYGMVGPLAQDPQSPMAGLRWLDSWDF

SEQ ID NO: 69377 - protein, 97 aa, Homo sapiens
MLGLCGQRLPAAWVLLLLPFLPLLLLAAPAPHRASYKPVIVVHGLFDSSYSFRHLLEYINEGALCAGLCFLSWMITTWILSSPSPLHRWDSMETRTT

SEQ ID NO: 69378 - protein, 43 aa, Homo sapiens
MASRLTLLTLLLLLLAGGLGRTPKQTWRASSLTPRTSPVSTRP

SEQ ID NO: 69379 - protein, 137 aa, Homo sapiens
  MOD_RES (1)..(1): Any amino acid
XVQQKQEKPRTPMPSSVEAERTDTAVQATGSVPSTPIAHRGPSSSLNTPGSFRRGLDDSTGGTPLTPAARISALNIVGDLLRKVGVGEAPGIWEAAFTHVFIAAAVSPGGSQDVALGKPRKLKVLVLVGHELPLVVQ

SEQ ID NO: 69380 - protein, 94 aa, Homo sapiens
MEPQEERETQVAAWLKKIFGDHPIPQYEVNPRTTEILHHLSERNRVRDRDVYLVIEDLKQKASEYESEGMSRKQSCICLQKGPKLIIVVRTWTF

SEQ ID NO: 69381 - protein, 107 aa, Homo sapiens
MCIIFFKFDPRPVSKNAYRLILAANRDEFYSRPSKLADFWGNNNEILSGLDMEEGKEGGTWLGISTRGKLAALTNYLQPQLDWQARGRGSCQTRPSRTRVGSTCSPC

SEQ ID NO: 69382 - protein, 131 aa, Homo sapiens
  MOD_RES (1)..(1): Any amino acid
XTTGEPATPKRRKAEPEALQSLRRSTRHSANCDRLSESSASPQPKRRQQDTSASMPKLFLHLEKTSPAVLTPSGVLLSIILLELPKVIPVPFCVQVPISLCTSCPCHIHKLLRERSDLLIVSPHHSSVLVA

SEQ ID NO: 69383 - protein, 87 aa, Homo sapiens
MSTGGDFGNPLRKFKLVFLGEQSVGKTSLITRFMYDSFDNTYQATIGIDFLSKTMYLEDRTMLTHSSKLQSGLMMSEQKEEVMLSSC

SEQ ID NO: 69384 - protein, 31 aa, Homo sapiens
MASALEQFVNSVRQLSAQVLFLFSRANDTAL

SEQ ID NO: 69385 - protein, 345 aa, Homo sapiens
MFWGLFHDSSSGNSTALTSGPAQTLAPGLGLPAALPTLHLLHARFGRLPWPRLLVGPTTLAQEGFLVDTPLARALVARGTEGLCPLLCHADGTPLGAGARATNPQLAAVLRSAALAPTSDLAGDALLSLLAGDLGVEVPSAVPRPTLEPAEQLPVPQGILFTTPSPSAGPELLALLEAALRSGAPIPDPCPPFLQTAVSPESSALAAVDSSGSVLLLTSSLNCSFGSAHLSPSTGVLLSNLVAKSTTSAWACPLILRGSLDDTEADVLGLVASGTPDVARAMTHTLLRHLAARPPTQAQHQHQGQQEPTEHPSTCGQGTLLQVAAHTEHAHVSSVPHACCPFQGF

SEQ ID NO: 69386 - protein, 117 aa, Homo sapiens
MGLPQPGLWLKRLWVLLEVAVHVVVGKVLLILFPDRVKRNILAMGEKTGMTRNPHFSHDNWIPTFFSTQYFWFVLKVRWQRLEDTTELGGLAPNCPVVRLSGQRCNIWEFMQVQEAY

SEQ ID NO: 69387 - protein, 55 aa, Homo sapiens
MAGWQSYVDNLMCDGCCQEAAIVGYCDAKYVWAATAGGVFQSITEKTGKVSLPTV

SEQ ID NO: 69388 - protein, 79 aa, Homo sapiens
MAASGPGCRSWCLCPEVPSATFFTALLSLLVSGPRLFLLQQPLAPSGLTLKSEALRNWQATMEGGVRITAEETGTQSVK

SEQ ID NO: 69389 - protein, 122 aa, Homo sapiens
MFCSEKKLREVERIVKANDREYNEKFQYADNRIHTSKYNILTFLPINLFEQFQRVANAYFLCLLILQLIPEISSLTWFTTIVPLVLVITMTAVKDATDDYFRHKSDNQVNNRQSEVLINSKC

SEQ ID NO: 69390 - protein, 23 aa, Homo sapiens
  MOD_RES (1)..(1): Any amino acid
XNTMFDTSYSKQVLQREGLLCSD

SEQ ID NO: 69391 - protein, 86 aa, Homo sapiens
MAPLPGAELVRRPLQLYRYLLRCCQQLPTKGIQQHYKHAVRQSFRVHSDEDNPERIQQIIKRAIEDADWIMNKVGAWPLGSACELG

SEQ ID NO: 69392 - protein, 191 aa, Homo sapiens
MEICADELKKVLNTVVNKHKDLKTHGFTLESCRSMIALMDTDGSGKLNLQEFHHLWNKIKAWQKIFKHYDTDQSGTINSYEMRNAVNDAGFHLNNQLYDIITMRYADKHMNIDFDSFICCFVRLEGMFRAFHAFDKDGDGIIKLNVLEAVCRSTCRWHSAPPCARALHHLHAVPPWARNQTSTGFYCCGVN

SEQ ID NO: 69393 - protein, 533 aa, Homo sapiens
MFAMKVYGAYLLSSEADFSSSSSTGSISAPEVHMSTAGSKRSSSSRNRGPHGRSNGASSHKPGSSPSSPREKDLLSMLCRNQLSPVNIHPSYAPSSPSSSNSGSYKGSDCSPIMRRSGRYMSCGENHGVRPPNPEQYLTPLQQKEVTVRHLKTKLKESERRLHERESEIVELKSQLARMREDWIEEECHRVEAQLALKEARKEIKQLKQVIETMRSSLADKDKGIQKYFVDINIQNKKLESLLQSMEMAHSGSLRDELCLDFPCDSPEKSLTLNPPLDTMADGLSLEEQVTGEGADRELLVGDSIANSTDLFDEIVTATTTESGDLELVHSTPGANVLELLPIVMGQEEGSVVVERAVQTDVVPYSPAISELIQSVLQKLQDPCPSSLASPDESEPDSMESFPESLSALVVDLTPRNPNSAILLSPVETPYANVDAEVHANRLMRELDFAACVEERLDGVIPLARGGVVRQYWSSSFLVDLLAVAAPVVPTVLWAFSTQRGGTDPVYNIGALLRGCCVVALHSLRRTAFRIKT

SEQ ID NO: 69394 - protein, 225 aa, Homo sapiens
MKCVRLPLLSRDFLLGHVDAESLVRHHPDCKDLLIEALKFHLLPEQRGVLGTSRTRPRRCEGAGPVLFAVGGGSLFAIHGDCEAYDTRTDRWHVVASMSTRRARVGVAAVGNRLYAVGGYDGTSDLATVESYDPVTNTWQPEVSMGTRRSCLGVAALHGLLYSAGGYDGASCLNSAERYDPLTGTWTSVAAMSTRRRYVRVATLDGNLYAVGGYDSSSHLATVEK

SEQ ID NO: 69395 - protein, 142 aa, Homo sapiens
MIAPTDSHEEVRSGTSYILPFASRFLSFRADSAHASMVNVPKTRRTFCKKCGKHQPHKVTQYKKGKDSLYAQGKRRYDRKQSGYGGQTKPIFRKKAKTTKKIVLRLECVEPNCRSKRMLAIKRCKHFELGGDKKRKGQVIQF

SEQ ID NO: 69396 - protein, 490 aa, Homo sapiens
MAAAAARVVLSSAARRRLWGFSESLLIRGAAGRSLYFGENRLRSTQAATQVVLNVPETRVTCLESGLRVASEDSGLSTCTVGLWIDAGSRYENEKNNGTAHFLEHMAFKGTKKRSQLDLELEIENMGAHLNAYTSREQTVYYAKAFSKDLPRAVEILADIIQNSTLGEAEIERERGVILREMQEVETNLQEVVFDYLHATAYQNTALGRTILGPTENIKSISRKDLVDYITTHYKGPRIVLAAAGGVSHDELLDLAKFHFGDSLCTHKGEIPALPPCKFTGSEIRVRDDKMPLAHLAIAVEAVGWAHPDTICLMVANTLIGNWDRSFGGGMNLSSKLAQLTCHGNLCHSFQSFNTSYTDTGLWGLYMVCESSTVADMLHVVQKEWMRLCTSVTESEVARARNLLKTNMLLQLDGSTPICEDIGRQMLCYNRRIPIPELEARIDAVNAETIREVCTKYIYNRSPAIAAVGKPGFFSSMQKVGQVLLINSSF

SEQ ID NO: 69397 - protein, 228 aa, Homo sapiens
MNSVSPAAAQYRSSSPEDARRRPEARRPRGPRGPDPNGLGPSGASGPALGSPGAGPSEPDEVDKFKAKFLTAWNNVKYGWVVKSRTSFSKISSIHLCGRRYRFEGEGDIQRFQRDFVSRLWLTYRRDFPPLPGGCLTSDCGWGCMLRSGQMMLAQGLLLHFLPRGKPWRAAPTSPAWWCTFLRTAQCTRRMWHAWWPGQTPQPSGSLWSSWCPCDWVARLSTPCMCPA

SEQ ID NO: 69398 - protein, 124 aa, Homo sapiens
MKQKMWSIENIAFGSGGGLLQKLTRDLLNCSFKCSYVVTNGLGINVFKDPVADPNKRSKKGRLSLHRTPAGNFVTLEEGKGDLEEYGQDLLHTVFKNGKVTKSYSFDEIRKNAQLNIELEAAHH

SEQ ID NO: 69399 - protein, 36 aa, Homo sapiens
MESSGNPESTTFFYYDLQSQPCENQAWVFATLATTV

SEQ ID NO: 69400 - protein, 161 aa, Homo sapiens
MQAARCPTDELSLTNCAVVNEKDFQSGQHVIVRTSPNHRYTFTLKTHPSVVPGSIAFSLPQRKWAGLSIGQEIEVSLYTFDKAKQCIGTMTIEIDFLQKKSIDSNPYDTDKMAAEFIQQFNNQAFSVGQQLVFSFNEKLFGLLVKDIEAMDPSILKGEPAT

SEQ ID NO: 69401 - protein, 417 aa, Homo sapiens
MLENYMNLASVEWEIQPRTKRSSLQQGFLKNQIFSGIQMTRGYSGWKLCDCKNCGEVFREQFCLKTHMRVQNGGNTSEGNCYGKDTLSVHKEASTGQELSKFNPCGKVFTLTPGLAVHLEVLNARQPYKCKECGKGFKYFASLDNHMGIHTDEKLCEFQEYGRAVTASSHLKQCVAVHTGKKSKKTKKCGKSFTNFSQLYAPVKTHKGEKSFECKECGRSFRNSSCLNDHIQIHTGIKPHKCTYCGKAFTRSTQLTEHVRTHTGIKPYECKECGQAFAQYSGLSIHIRSHSGKKPYQCKECGKAFTTSTSLIQHTRIHTGEKPYECVECGKTFITSSRRSKHLKTHSGEKPFVCKICGKAFLYSSRLNVHLRTHTGEKPFVCKECGKAFAVSSRLSRHERIHTGEKPYECKDMSVTI

SEQ ID NO: 69402 - protein, 62 aa, Homo sapiens
MRDSAEATASAWRPDALHQRPRTSPGSIGRSKLQLQPSSRDHSSKSRHSGCSLTAPEVTWNQ

SEQ ID NO: 69403 - protein, 456 aa, Homo sapiens
MAELCPLAEELSCSICLEPFKEPVTTPCGHNFCGSCLNETWAVQGSPYLCPQCRAVYQARPQLHKNTVLCNVVEQFLQADLAREPPADVWTPPARASAPSPNAQVACDHCLKEAAVKTCLVCMASFCQEHLQPHFDSPAFQDHPLQPPVRDLLRRKCSQHNRLREFFCPEHSECICHICLVEHKTCSPASLSQASADLEATLRHKLTVMYSQINGASRALDDVRNRQQDVRMTANRKVEQLQQEYTEMKALLDASETTSTRKIKEEEKRVNSKFDTIYQILLKKKSEIQTLKEEIEQSLTKRDEFEFLEKASKLRGISTKPVYIPEVELNHKLIKGIHQSTIDLKNELKQCIGRLQEPTPSSGDPGEHDPASTHKSTRPVKKVSKEEKKSKKPPPVPALPSKLPTFGAPEQLVDLKQAGLEAAAKATSSHPNSTSLKAKVLETFLAKSRPELLEFS

SEQ ID NO: 69404 - protein, 130 aa, Homo sapiens
MLRIPVRKALVGLSKSPKGCVRTTATAASNLIEVFVDGQSVMVEPGTTVLQACEKVGMQIPRFCYHERLSVAGNCRMCLVEIEKAPKVVAACAMPVMKGWNILTNSEKSKKAREGVMEFLLANHPLDCPI

SEQ ID NO: 69405 - protein, 39 aa, Homo sapiens
MEASRCRLSPSGDSVFHEEMMKMRQAKLDYQVLMVQLLS

SEQ ID NO: 69406 - protein, 105 aa, Homo sapiens
MGKQNSKLRPEVMQDLLESTDFTEHEIQEWYKGFLRDCPSGHLSMEEFKKIYGNFFPYGDASKFAEHVFRTFDANGDGTIDFREFIIALSVTSRGKLEQKLKWAF

SEQ ID NO: 69407 - protein, 527 aa, Homo sapiens
MVIVPLYDTLGNEAITYIVNKAELSLVFVDKPEKAKLLLEGVENKLIPGLKIIVVMDAYGSELVERGQRCGVEVTSMKAMEDLGRANRRKPKPPAPEDLAVICFTSGTTGNPKGAMVTHRNIVSDCSAFVKATENTVNPCPDDTLISFLPLAHMFERVVECVMLCHGAKIGFFQGDIRLLMDDLKVLQPTVFPVVPRLLNRMFDRIFGQANTTLKRWLLDFASKRKEAELRSGIIRNNSLWDRLIFHKVQSSLGGRVRLMVTGAAPVSATVLTFLRAALGCQFYEGYGQTECTAGCCLTMPGDWTAGHVGAPMPCNLIKLVDVEEMNYMAAEGEGEVCVKGPNVFQGYLKDPAKTAEALDKDGWLHTGDIGKWLPNGTLKIIDRKKHIFKLAQGEYIAPEKIENIYMRSEPVAQVFVHGESLQAFLIAIVVPDVETLCSWAQKRGFEGSFEELCRNKDVKKAILEDMVRLGKDSGLKPFEQVKGITLHPELFSIDNGLLTPTMKAKRPELRNYFRSQIDDLYSTIKV

SEQ ID NO: 69408 - protein, 63 aa, Homo sapiens
MLKVSAVLCVCAAAWCSQSLAAAAAVAAAGGRSDGGNFLDDKQWLTTISQYDKEVGQWNKFRD

SEQ ID NO: 69409 - protein, 195 aa, Homo sapiens
MLEKFCNSTFWNSSFLDSPEADLPLCFEQTVLVWIPLGYLWLLAPWQLLHVYKSRTKRSSTTKLYLAKQVFVGFLLILAAIELALVLTEDSGQATVPAVRYTNPSLYLGTWLLVLLIQYSRQWCVQKNSWFLSLFWILSILCGTFQFQTLIRTLLQGDNSNLAYSCLFFISYGFQILILIFSAFSENNESSNVRF

SEQ ID NO: 69410 - protein, 1048 aa, Homo sapiens; identical to SEQ ID NO: 15446

SEQ ID NO: 69411 - protein, 427 aa, Homo sapiens
MLLMVVSMACVGFFLVQRAGPHVGGQDKPFLSAWPSAVVPRGGHVTLRCHYRHRFNNFMLYKEDRIHVPIFHGRLFQESFNMSPVTTAHAGNYTCRGSHPHSPTGWSAPSNPVVIMVTGNHRKPSLLAHPGPLVKSGERVILQCWSDIMFEHFFLHKEGISKDPSRLVGQIHDGVSKANFSIGPMMLALAGTYRCYGSVTHTPYQLSAPSDPLDIVVTGPYEKPSLSAQPGPKVQAGESVTLSCSSRSSYDMYHLSREGGAHERRLPAVRKVNRTFQADFPLGPATHGGTYRCFGSFRHSPYEWSDPSDPLLVSVTGNPRHLHVLIGTSVVIILFILLLFFLLHLWCSNKKNAAVMDQEPAGNRTANSEDSDEQDPQEVTYAQLDHCVFTQRKITRPSQRPKTPPTDTILYTELPNAKPRSKVVSCP

SEQ ID NO: 69412 - protein, 267 aa, Homo sapiens
RQGRCDTYATEFDLEAEEYVPLPKGDVHKKKEIIQDVTLHDLDVANARPQGGQDILSMMGQLMKPKKTEITDKLRGEINKVVNKYIDQGIAELVPGVLFVDEVHMLDIECFTYLHRALESSIAPIVIFASNRGNCVIRGLGDGINFAPYRGTEDITSPHGIPLDLLDRVMIIRTMLYTPQEMKQIIKIRAQTEGINISEEALNHLGEIGTKTTLRYSVQLLTPANLLAKINGKDSIEKEHVEEISELFYDAKSSAKILADQQDKYMK

SEQ ID NO: 69413 - protein, 56 aa, Homo sapiens
MTYGSPQANASPSDAVALDHGEVSRRQQQESCGSCQRTLPSLAMPRSSLTRRFSLL

SEQ ID NO: 69414 - protein, 980 aa, Homo sapiens
MPLAFCGSENHSAAYRVDQGVLNNGCFVDALNVVPHVFLLFITFPILFIGWGSQSSKVHIHHSTWLHFPGHNLRWILTFMLLFVLVCEIAEGILSDGVTESHHLHLYMPAGMAFMAAVTSVVYYHNIETSNFPKLLIALLVYWTLAFITKTIKFVKFLDHAIGFSQLRFCLTGLLVILYGMLLLVEVNVIRVRRYIFFKTPREVKPPEDLQDLGVRFLQPFVNLLSKGTYWWMNAFIKTAHKKPIDLRAIGKLPIAMRALTNYQRLCEAFDAQRKDIQGTQGARAIWQALSHAFGRRLVLSSTFRILADLLGFAGPLCIFGIVDHLGKENDVFQPKTQFLGVYFVSSQEFLANAYVLAVLLFLALLLQRTFLQASYYVAIETGINLRGAIQTKIYNKIMHLSTSNLSMGEMTAGQICNLVAIDTNQLMWFFFLCPNLWAMPVQIIVGVILLYYILGVSALIGAAVIILLAPVQYFVATKLSQAQRSTLEYSNERLKQTNEMLRGIKLLKLYAWENIFRTRVETTRRKEMTSLRAFAIYTSISIFMNTAIPIAAVLITFVGHVSFFKEADFSPSVAFASLSLFHILVTPLFLLSSVVRSTVKALVSVQKLSEFLSSAEIREEQCAPHEPTPQGPASKYQAVPLRVVNRKRPAREDCRGLTGPLQSLVPSADGDADNCCVQIMGGYFTWTPDGIPTLSNITIRIPRGQLTMIVGQVGCGKSSLLLAALGEMQKVSGAVFWSSSLPDSEIGEDPSPERETATDLDIRKRGPVAYASQKPWLLNATVEENIIFESPFNKQRYKMVIEACSLQPDIDILPHGDQTQIGERGINLSGGQRQRISVARALYQHANVVFLDDPFSALDIHLSDHLMQAGILELLRDDKRTVVLVTHKLQYLPHADWIIAMKDGTIQREGTLKDFQRSECQLFEHWKTLMNRQDQELEKETVTERKATEPPQGLSRAMSSRDGLLQDEEEEEVSGDKMP

SEQ ID NO: 69415 - protein, 81 aa, Homo sapiens
MSVDEKPDSPMYVYESTVHCTNILLGLNDQRKKDILCDVTLIVERKEFRAHRAVLAACSEYFWQALVGQTKNDLVVSLPEE

SEQ ID NO: 69416 - protein, 566 aa, Homo sapiens
MKMQKGNVLLMFGLLLHLEAATNSNETSTSANTGSSVISSGASTATNSGSSVTSSGVSTATISGSSVTSNGVSIVTNSEFHTTSSGISTATNSEFSTASSGISIATNSESSTTSSGASTATNSESSTPSSGASTATNSDSSTTSSGASTATNSDSSTTSSEASTATNSESSTTSSGASTATNSESSTVSSRASTATNSESSTTSSGASTATNSESRTTSNGAGTATNSESSTTSSGASTATNSESSTPSSGAGTATNSESSTTSSGAGTATNSESSTVSSGISTVTNSESSTPSSGANTATNSESSTTSSGANTATNSDSSTTSSGASTATNSESSTTSSGASTATNSESSTTSSGASTATNSGSSTTSSGTSTATNSESSTVSSGASTATTSESSTTSSGASTATNSESSTVSSGASTATNSESSTTSSGANTATNSGSSVTSAGSGTAALTGMHTTSHSASTAVSEAKPGGSLVPWEIFLITLVSVVAAVGLFAGLFFCVRNSLSLRNTFNTAVYHPHGLNHGLGPGPGGNHGAPHRPRWSPNWFWRRPVSSIAMEMSGRNSGP

SEQ ID NO: 69417 - protein, 495 aa, Homo sapiens
MLLLGLLLLLPLLAGARLLWNWWKLRSLHLPPLAPGFLHLLQPDLPIYLLGLTQKFGPIYRLHLGLQDVVVLNSKRTIEEAMVKKWADFAGRPEPLTYKLVSRNYPDLSLGDYSLLWKAHKKLTRSALLLGIRDSMEPVVEQLTQEFCERMRAQPGTPVAIEEEFSLLTCSIICYLTFGDKIKDDNLMPAYYKCIQEVLKTWSHWSIQIVDVIPFLRFFPNPGLRRLKQAIEKRDHIVEMQLRQHKESLVAGQWRDMMDYMLQGVAQPSMEEGSGQLLEGHVHMAAVDLLIGGTETTANTLSWAVVFLLHHPEIQQRLQEELDHELGPGASSSRVPYKDRARLPLLNATIAEVLRLRPVVPLALPHRTTRPSSISGYDIPEGTVIIPNLQGAHLDETVWERPHEFWPDRFLEPGKNSRALAFGCGARVCLGEPLARLELFVVLTRLLQAFTLLPSGDALPSLQPLPHCSVILKMQPFQVRLQPRGMGAHSPGQSQ

SEQ ID NO: 69418 - protein, 121 aa, Homo sapiens
MDVLFVAIFAVPLILGQEYEDEERLGEDEYYQVVYYYTVTPSYDDFSADFTIDYSIFESEDRLNRLDKDITEAIETTISLETARADHPKPVTVKPVTTEPVEEGCYDSLDGSLARGNWKIK

SEQ ID NO: 69419 - protein, 218 aa, Homo sapiens
MEYMAESTDRSPGHILCCECGVPISPNPANICVACLRSKVDISQGIPKQVSISFCKQCQRYFQPPGTWIQCALESRELLALCLKKIKAPLSKVRLVDAGFVWTEPHSKRLKVKLTIQKEVMNGAILQQVFVVDYVVQSQMCGDCHRVEAKDFWKAVIQVRQKTLHKKTFYYLEQLILKYGMHQNTLRIKEIHDGLDFYYSSKQHAQKMVEFLQCTVPC

SEQ ID NO: 69420 - protein, 414 aa, Homo sapiens
MYPCELCFSCSQLSKLQEVSLRNCAVSCAGEKGGVAEACPNIRKVDLSKNLLSSWDEVIHIADQLRHLEVLNVSENKLKFPSGSVLTGTLSVLKVLVLNQTGITWAEVLRCVAGCPGLEELYLESNNIFISERPTDVLQTVKLLDLSSNQLIDENQLYLIAHLPRLEQLILSDTGISSLHFPDAGIGCKTSMFPSLKYLVVNDNQISQWSFFNELEKLPSLRALSCLRNPLTKEDKEAETARLLIIASIGQLKTLNKCEILPEERRRAELDYRKAFGNEWKQAGGHKDPEKNRLSEEFLTAHPRYQFLCLKYGAPEDWELKTQQPLMLKNQLLTLKIKYPHQLDQKVLEKQLPGSMTIQKVKGLLSRLLKVPVSDLLLSYESPKKPGREIELENDLKSLQFYSVENGDCLLVRW

SEQ ID NO: 69421 - protein, 167 aa, Homo sapiens
MERAGATSRGGQAPGFLLRLHTEGRAEAARVQEQDLRQWGLTGIHLRSYQLEGVNWLAQRFHCQNGCILGDEMGLGKTCQTIALFIYLAGRLNDEGPFLILCPLSVLSNWKEEMQRFAPGLSCVTYAGDKEERACLQQDLKQESRFHVLLTTYEICLKDASFLKSSQ

SEQ ID NO: 69422 - protein, 276 aa, Homo sapiens
MFLQNTCKRNVFLPSRKMLPSTSVNSLVQGNGVLNSRDAARHTAGAKRYKYLRRLFRFRQMDFEFAAWQMLYLFTSPQRVYRNFHYRKQTKDQWARDDPAFLVLLSIWLCVSTIGFGFVLDMGFFETIKLLLWVVLIDCVGVGLLIATLMWFISNKYLVKRQSRDYDVEWGYAFDVHLNAFYPLLVILHFIQLFFINHVILTDTFIGYLVGNTLWLVAVGYYIYVTFLGYSALPFLKNTVILLYPFAPLILLYGLSLALGWNFTHTLCSFYKYRVK

SEQ ID NO: 69423 - protein, 47 aa, Homo sapiens
MGTWCRAPSGAEMEPWWARRARTSSCGSLTPEQSRGPLRARRPMRTA

SEQ ID NO: 69424 - protein, 155 aa, Homo sapiens
MDLWNWDEASPQEVPPGNKLAGLEGAKLGFCFPDLALQGDTPTATAETCWKGPIQLWQFLLELLHDGARSSCIRWTGNSREFQLCDPKEVARLWGERKRKPGMNYEKLSRGLRYYYRRDIVRKSGGRKYTYRFGGRVPSLAYPDCAGGGRGAETQ

SEQ ID NO: 69425 - protein, 53 aa, Homo sapiens
MIRNWLTIFILFPLKLVEKCESSVSLTVPPVVKLENGSSTNVSLTLRLWCLLE

SEQ ID NO: 69426 - protein, 345 aa, Homo sapiens
MLENYNSIVSLDWETKPEIHDASDKKSEGSLRECLGRQSPLCPKFEVHTPNGRMGTEKQSPSGETRKKSLSRDKGLRRRSALSREILTKERHQECSDCGKTFFDHSSLTRHQRTHTGEKPYDCRECGKAFSHRSSLSRHLMSHTGESPYECSVCSKAFFDRSSLTVHQRIHTGEKPFQCNECGKAFFDRSSLTRHQRIHTGESPYECHQCGKAFSQKSILTRHQLIHTGRKPYECNECGKAFYGVSSLNRHQKAHAGDPRYQCNECGKAFFDRSSLTQHQKIHTGDKPYECSECGKAFSQRCRLTRHQRVHTGEKPFECTVCGKVFSSKSSVIQHQRRYAKQGID

SEQ ID NO: 69427 - protein, 1064 aa, Homo sapiens
MPTAESEAKVKTKVRFEELLKTHSDLMREKKKLKKKLVRSEENISPDTIRSNLHYMKETTSDDPDTIRSNLPHIKETTSDDVSAANTNNLKKSTRVTKNKLRNTQLATENPNGDASVEEDKQGKPNKKVIKTVPQLTTQDLKPETPENKVDSTHQKTHTKPQPGVDHQKSEKANEGREETDLEEDEELMQAYQCHVTEEMAKEIKRKIRKKLKEQLTYFPSDTLFHDDKLSSEKRKKKKEVPVFSKAETSTLTISGDTVEGEQKKESSVRSVSSDSHQDDEISSMEQSTEDSMQDDTKPKPKKTKKKTKAVADNNEDVDGDGVHEITSRDSPVYPKCLLDDDLVLGVYIHRTDRLKSDFMISHPMVKIHVVDEHTGQYVKKDDSGRPVSSYYEKENVDYILPIMTQPYDFKQLKSRLPEWEEQIVFNENFPYLLRGSDESPKVILFFEILDFLSVDEIKNNSEVQNQECGFRKIAWAFLKLLGANGNANINSKLRLQLYYPPTKPRSPLSVVEAFEWWSKCPRNHYPSTLYVTVRGLKVPDCIKPSYRSMMALQEEKGKPVHCERHHESSSVDTEPGLEESKEVIKWKRLPGQACRIPNKHLFSLNAGERGCFCLDFSHNGRILAAACASRDGYPIILYEIPSGRFMRELCGHLNIIYDLSWSKDDHYILTSSSDGTARIWKNEINNTNTFRVLPHPSFVYTAKFHPAVRELVVTGCYDSMIRIWKVEMREDSAILVRQFDVHKSFINSLCFDTEGHHMYSGDCTGVIVVWNTYVKINDLEHSVHHWTINKEIKETEFKGIPISYLEIHPNGKRLLIHTKDSTLRIMDLRILVARKFVGAANYREKIHSTLTPCGTFLFAGSEDGIVYVWNPETGEQVAMYSDLPFKSPIRDISYHPFENMVAFCAFGQNEPILLYIYDFHVAQQEAEMFKRYNGTFPLPGIHQSQDALCTCPKLPHQGSFQIDEFVHTESSSTKMQLVKQRLETVTEVIRSCAAKVNKNLSFTSPPAVSSQQSKLKQSNMLTAQEILHQFGFTQTGIISIERKPCNHQVDTAPTATHMPQTAA

SEQ ID NO: 69428 - protein, 216 aa, Homo sapiens
MWPHSAGARPWASTLTGKDPRVMACWCLDGLPSGLAEPWRELWRWRSRPLHCVPPFSPLARSSRDHRNLRRRVEALPRILKGNIDGWRQNLEPSNNVEMFPPSGSTGLIPPSHFQARPLSTLPRMAPTWLSDIPLVQPPGHQDVSERRLDTQRPQVTMWERDVSSDRQEPGRRGRSWGLEGSQALSQQAEVIVRQLQELRRLEEEVRLLRETSLQQ

SEQ ID NO: 69429 - protein, 187 aa, Homo sapiens
MGSSHIGGLSINERRRSASLGLVMAENDVDNELLDYEDDEVETAAGGDGAEAPAKKDVKGSYVSIHSSGFRDFLLKPELLRAIVDCGFEHPSEVQHECIPQAILGMDVLCQAKSGMGKTAVFVLATLQQLEPVTGQVSVLVMCHTRELAFQISKEYERFSKYMPNVKVAVFFGGLSIKKDEEVLKKN

SEQ ID NO: 69430 - protein, 702 aa, Homo sapiens
MALLAMHSWRWAAAAAAFEKRRHSAILIRPLVSVSGSGPQWRPHQLGALGTARAYQALQVWPLIEKRTCWHGHAGGGLHTDPKEGLKDVDTRKIIKAMLSYVWPKDRPDLRARVAISLGFLGGAKAMNIVVPFMFKYAVDSLNQMSGNMLNLSDAPNTVATMATAVLIGYGVSRAGAAFFNEVRNAVFGKVAQNSIRRIAKNVFLHLHNLDLGFHLSRQTGALSKAIDRGTRGISFVLSALVFNLLPIMFEVMLVSGVLYYKCGAQFALVTLGTLGTYTAFTVAVTRWRTRFRIEMNKADNDAGNAAIDSLLNYETVKYFNNERYEAQRYDGFLKTYETASLKSTSTLAMLNFGQSAIFSVGLTAIMVLASQGIVAGTLTVGDLVMVNGLLFQLSLPLNFLGTVYRETRQALIDMNTLFTLLKVDTQIKDKVMASPLQITPQTATVAFDNVHFEYIEGQKVLSGISFEVPAGKKVAIVGGSGSGKSTIVRLLFRFYEPQKGSIYLAGQNIQDVSLESLRRAVGVVPQDAVLFHNTIYYNLLYGNISASPEEVYAVAKLAGLHDAILRMPHGYDTQVGERGLKLSGGEKQRVAIARAILKDPPVILYDEATSSLDSITEETILGAMKDVVKHRTSIFIAHRLSTVVDADEIIVLDQGKVAERGTHHGLLANPHSIYSEMWHTQSSRVQNHDNPKWEAKKENIS

SEQ ID NO: 69431 - protein, 74 aa, Homo sapiens
MKLTSCLERALGDVFLLIGKECPFLLRDLLSSEELAQVFSQSVMNVLKVFVGSPCGLNLRNVLWHGFASPEEIP

SEQ ID NO: 69432 - protein, 160 aa, Homo sapiens
MGSVTVRYFCYGCLFTSATWTVLLFVYFNFSEVTQPLKNVPVKGSGPHGPSPKKFYPRFTRGPSRVLEPQFKANKIDDVIDSRVEDPEEGHLKFSSELGMIFNERDQELRDLGYQKHAFNMLISDRLGYHRDVPDTRNAACKEKFYPPDLPAASVVICFY

SEQ ID NO: 69433 - protein, 170 aa, Homo sapiens
MAQNTENHDPVGSILIQIHEDLYQLKEKLTKFSPEEKGETLDIQSLETAIKRTEVGLRIHIEKYLNVVNQNVLTTSVNDESLYTPQASKWLLPTVIDQKSFIFPQESEGTFWQPQRQHSSSLPVFPRAKRKIGLNVKILQDPENIHHRAAVNANYGISLPYINQRKACGF

SEQ ID NO: 69434 - protein, 201 aa, Homo sapiens
MALRLLKLAATSASARVVAAGAQRVRGIHSSVQCKLRYGMWHFLLGDKASKRLTERSRVITVDGNICTGKGKLAKEIAEKLGFKHFPEAGIHYPDSTTGDGKPLATDYNGNCSLEKFYDDPRSNDGNSYRLQSWLYSSRLLQYSDALEHLLTTGQGVVLERSIFSDFVFLEAMYNQGFIRKQCESALQTHFWVCGATLQGL

SEQ ID NO: 69435 - protein, 511 aa, Homo sapiens
MEPQPGGARSCRRGAPGGACELGPAAEAAPMSLAIHSTTGTRYDLAVPPDETVEGLRKRLSQRLKVPKERLALLHKDTRLSSGKLQEFGVGDGSKLTLVPTVEAGLMSQASRPEQSVMQALESLTETQPPAAPGPGRAGGGGFRKYRFILFKRPWHRQGPQSPERGGERPQVSDFLSGRSPLTLALRVGDHMMFVQLQLAAQHAPLQHRHVLAAAAAAAAARGDPSIASPVSSPCRPVSSAARVPPVPTSPSPASPSPITAGSFRSHAASTTCPEQMDCSPTASSSASPGASTTSTPGASPAPRSRKPGAVIESFVNHAPGVFSGTFSGTLHPNCQDSSGRPRRDIGTILQILNDLLSATRHYQGMPPSLAQLRCHAQCSPASPAPDLAPRTTSCEKLTAAPSASLLQGQSQIRMCKPPGDRLRQTENRATRCKVERLQLLLQQKRLRRKARRDARGPYHWSPSRKAGRSDSSSSGGGGSPSEASGLGLDFEDSVWKPEVNPDIKSEFVVA

SEQ ID NO: 69436 - protein, 507 aa, Homo sapiens
MASGDLYEVERIVDKRKNKKGKWEYLIRWKGYGSTEDTWEPEHHLLHCEEFIDEFNGLHMSKDKRIKSGKQSSTSKLLRDSRGPSVEKLSHRPSDPGKSKGTSHKRKRINPPLAKPKKGYSGKPSSGGDRATKTVSYRTTPSGLQIMPLKKSQNGMENGDAGSEKDERHFGNGSHQPGLDLNDHVGEQDMGECDVNHATLAENGLGGSALTNGGLNLHSPVKRKLEAEKDYVFDKRLRYSVRQNESNCRFRDIVVRKEEGFTHILLSSQTSDNNALTPEIMKEVRRALCNAATDDSKLLLLSAVGSVFCSGLDYSYLIGRLSSDRRKESTRIAEAIRDFVKAFIQFKKPIVVAINGPALGLGASILPLCDIVWASEKAWFQTPYATIRLTPAGCSSYTFPQILGVALANEMLFCGRKLTAQEACSRGLVSQVFWPTTFSQEVMLRVKEMASCSAVVLEESKCLVRSFLKSVLEDVNEKECLMLKQLWSSSKGLDSLFSYLQDKIYEV

SEQ ID NO: 69437 - protein, 427 aa, Homo sapiens
MTSCLPALRFIATPRLSAMPHIDNDVKLDFKDVLLRPKRSTLKSRSEVDLTRSFSFRNSKQTYSGVPIIAANMDTVGTFEMAKVLCKFSLFTAVHKHYSLVQWQEFAGQNPDCLEHLAASSGTGSSDFEQLEQILEAIPQVKYICLDVANGYSEHFVEFVKDVRKRFPQHTIMAGNVVTGEMVEELILSGADIIKVGIGPGSVCTTRKKTGVGYPQLSAVMECADAAHGLKGHIISDGGCSCPGDVAKAFGAGADFVMLGGMLAGHSESGGELIERDGKKYKLFYGMSSEMAMKKYAGGVAEYRYVWRPRSLVIVWRQNSWLLRGGWYSSQRSMVNRGSMLGSVEKSLGLRNPEGEDNKVFPTLRASEGKTVEVPFKGDVEHTIRDILGGIRSTCTYVGAAKLKELSRRTTFIRVTQQVNPIFSEAC

SEQ ID NO: 69438 - protein, 28 aa, Homo sapiens
MLACLPGPGDLSFQLLSHTQMNTGLQKL

SEQ ID NO: 69439 - protein, 35 aa, Homo sapiens
MPTDHEEPCGPSHKSFCLNGGLCYVIPTIPSPFCS

SEQ ID NO: 69440 - protein, 410 aa, Homo sapiens
MLAAALLKAKSQELVTFEDVAVYFIRKEWKRLEPAQRDLYRDVMLENYGNVFSLDRETRTENDQEISEDTRSHGVLLGRFQKDISQGLKFKEAYEREVSLKRPLGNSPGERLNRKMPDFGQVTVEEKLTPRGERSEKYNDFGNSFTVNSNLISHQRLPVGDRPHKCDECSKSFNRTSDLIQHQRIHTGEKPYECNECGKAFSQSSHLIQHQRIHTGEKPYECSDCGKTFSCSSALILHRRIHTGEKPYECNECGKTFSWSSTLTHHQRIHTGEKPYACNECGKAFSRSSTLIHHQRIHTGEKPYECNECGKAFSQSSHLYQHQRIHTGEKPYECMECGGKFTYSSGLIQHQRIHTGENPYECSECGKAFRYSSALVRHQRIHTGEKPLNGIGMSKSSLRVTTELNIREST

SEQ ID NO: 69441 - protein, 146 aa, Homo sapiens
MWGFLKRPVVVTADINLSLVALTGMGLLSRLWRLTYPRAVVFDEVYYGQYISFYMKQIFFLDDSGPPFGHMVLALGGYLGGFDGNFLWNRIGAEYSSNVPVWSLRLLPALAGALSVPMAYQIVLELHFSHCAAMGAALLMLIALFL

SEQ ID NO: 69442 - protein, 422 aa, Homo sapiens
MAEAVFHAPKRKRRVYETYESPLPIPFGQDHGPLKEFKIFRAEMINNNVIVRNAEDIEQLYGKGYFGKGILSRSRPSFTISDPKLVAKWKDMKTNMPIITSKRYQHSVEWAAELMRRQGQDESTVRRILKDYTKPLEHPPVKRNEEAQVHDKLNSGMVSNMEGTAGGERPSVVNGDSGKSGGVGDPREPLGCLQEGSGCHPTTESFEKSVREDASPLPHVCCCKQDALILQRGLHHEDGSQHIGLLHPGDRGPDHEYVLVEEAECAMSEREAAPNEEEPLTIVKLWKAFTVVQPTFRTTYMAYHYFRSKGWVPKVGLKYGTDLLLYRKGPPFYHASYSVIIELVDDHFEGSLRRPLSWKSLAALSRVSVNVSKELMLCYLIKPSTMTDKEMESPECMKRIKVQEVILSRWVSSRERSDQDDL

SEQ ID NO: 69443 - protein, 39 aa, Homo sapiens
MAAYSYRPGPGAGPGPAAGAALPDQSFLWNVFQRHVDSL

SEQ ID NO: 69444 - protein, 47 aa, Homo sapiens
MASADKNGGSVSSVSSSRLQSRKPPNLSITIPPPEKETQAPGEQDSM

SEQ ID NO: 69445 - protein, 10 aa, Homo sapiens
MAKRNAEKEL

SEQ ID NO: 69446 - protein, 407 aa, Homo sapiens
MRLRFWLLIWLLLGFISHQPTPVINSLAVYRHRETDFGVGVRDHPGQHGKTPSPQKLDNLIIIIIGFLRRYTFNILFCTSCLCVSFLKTIFWSRNGHDGSMDVQQRAWRSNRSRQKGLRSICMHTKKRVSSFRGNKIGLKDVITLRRHVETKVRAKIRKRKVTTKINRHDKINGKRKTARKQKMFQRAQELRRRAEDYHKCKIPPSARKPLCNWVRMVAAEHRHSSGLPYWPYLTAETLKNRMGRQPPPPTQQHSITDNSLSLKTPTECLLTPLPPSVDDNIKECPLAPLPPSPLPPSVDDNLKECLFVPLPPSPLPPSVDDNLKTPPLATQEAEVEKPPKPKRWRVDEVEQSPKPKRRRVDEVEQSPKPKRQREAEAQQLPKPKRRRLSKLRTRHCTQAWAIRINP

SEQ ID NO: 69447 - protein, 263 aa, Homo sapiens
  MOD_RES (1)..(1): Any amino acid
XQEEALQRLVNLYGLLHGLQAAVAQQDTLMEARFPEGPERREKLCRANSRDGEAGRAGAAPVAPEKQATELALLQRQHALLQEELRRCRRLGEERATEAGSLEARLRESEQARALLEREAEEARRQLAALGQTEPLPAEAPWARRPVDPRRRSLPAGDALYLSFNPPQPSRGTDRLDLPVTTRSVHRNFEDRERQELGSPEERLQDSSDPDTGSEEEGSSRLSPPHSPRGETLAETWTRDFTRMQDIPEETESRDGEAVASES

SEQ ID NO: 69448 - protein, 50 aa, Homo sapiens
MEEKRRKYSISSDNSDTTDSKAFQFGLLQGKHLNSDQAHRPRWEEAALWS

SEQ ID NO: 69449 - protein, 281 aa, Homo sapiens
MSDIEEVVEEYEEEEQEEQEEAAEEDAEAEAETEETRAEDEEEEEAKEAEDGPMEESKPKPRSFMPNLVPPKIPDGERVDFDDIHRKRMEKDLNELQALIEAHFENRKKEEEELVSLKDRIERRRAERAEQQRIRNEREKERQNRLAEERARREEEENRRKAEDEARKKKALSNMMHFGGYIQKAQTERKSGKRQTEREKKKKILAERRKVLAIDHLNEDQLREKAKELWQSIYNLEAEKFDLQEKFKQQKYEINVLRNRINDNQKVSKTRGKAKVTGRWK

SEQ ID NO: 69450 - protein, 136 aa, Homo sapiens
MSWKKALRIPGGLRAATVTLMLSMLSTPVAEGRDSPEDFVYQFKGMCYFTNGTERVRLVSRSIYNREEIVRFDSDVGEFRAVTLLGLPAAEYWNSQKDILERKRAAVDRVCRHNYQLELRTTLQRRGMVTGPSRSW

SEQ ID NO: 69451 - protein, 534 aa, Homo sapiens
MPKPINVRVTTMDAELEFAIQPNTTGKQLFDQVVKTVGLREVWFFGLQYVDSKGYSTWLKLNKKVTQQDVKKENPLQFKFRAKFFPEDVSEELIQEITQRLFFLQVKEAILNDEIYCPPETAVLLASYAVQAKYGDYNKEIHKPGYLANDRLLPQRVLEQHKLTKEQWEERIQNWHEEHRGMLREDSMMEYLKIAQDLEMYGVNYFEIKNKKGTELWLGVDALGLNIYEHDDKLTPKIGFPWSEIRNISFNDKKFVIKPIDKKAPDFVFYAPRLRINKRILALCMGNHELYMRRRKPDTIEVQQMKAQAREEKHQKQLERAQLENEKKKREIAEKEKERIEREKEELMERLKQIEEQTIKAQKELEEQTRKALELDQERKRAKEEAERLEKERRAAEEAKSAIAKQAADQMKNQEQLAAELAEFTAKIALLEEAKKKKEEEATEWQHKAFAAQEDLEKTKEELKTVMSAPPPPPPPPVIPPTENEHDEHDENNAEASAELSNEGVMNHRSEEERVTETQKNERVKKQLQGYKEC

SEQ ID NO: 69452 - protein, 120 aa, Homo sapiens
  MOD_RES (1)..(1): Any amino acid
XEISFDQYHLFRHGVAHGQWLSGGQRHREAFQANFSVGRATPVPGGTYRCYGSFNDSPYKPPVTRCNFTPQETLRVLLCHSQNPPLNLTPPWQTQSPRKANGRMKRSLQQKRHRRSYMPS

SEQ ID NO: 69453 - protein, 136 aa, Homo sapiens
MAGPGWGPPRLDGFILTERLGSGTYATVYKAYAKKDTREVVAIKCVAKKSLNKASVENLLTEIEILKGIRHPHIVQLKDFQWDSDNIYLIMEFCAGGDLSRFIHTRRILPEKVARVFMQQLAPCNSCMNGISLTWI

SEQ ID NO: 69454 - protein, 83 aa, Homo sapiens
MALLRKINQVLLFLLIVTLCVILYKKVHKGTVPKNDAESHSVAPAQIQWHNSSSLQPRPPGLKQSSGLSTPGSWNYRIPVLLG

SEQ ID NO: 69455 - protein, 528 aa, Homo sapiens
MAQEGKEENSLIPVSPASIHLQALNPNEPHPRQKSGLLSYPVPLLAVQRLLTWGLPVSCSWFLWRQPGEFPVTALLLGAGAGGLLAIGLFQLLVNPMNIYEEQKIMFLYSLVGLGAMGWGTSPHIRCASLLLVPKMLGKEGRLFVLGYALAAIYVGPVANLRHNLNNVIASLGCTVELQINNTRAAWRISTAPLRAMFKDLLSSKELLRAETRNISATFEDLDAQVNSETGYTPEDTMDSGETAQGREARQAPASRLHLSTQKMYELKTKLRCSYVVNQAILSCRRWFDRKHEQCMKHIWVPLLTHLLCLPMKFKFFCGIAKVMEVWCRNRIPVEGNFGQTYDSLNQSIRGLDGEFSANIDFKEEKQAGVLGLNTSWERVSTEVRDYVYRQEARLEWALGLLHVLLSCTFLLVLHASFSYMDSYNHDIRFDNIYISTYFCQIDDRRKKLGKRTLLPLRKAEEKTVIFPCKPTIQASEMSNVVRELLETLPILLLLVVLCGLDWALYSIFDTIRHHSFLQYSFRSRRQS

SEQ ID NO: 69456 - protein, 1613 aa, Homo sapiens
MPARTAPARVPTLAVPAISLPDDVRRRLKDLERDSLTEKECVKEKLNLLHEFLQTEIKNQLCDLETKLRKEELSEEGYLAKVKSLLNKDLSLENGAHAYNREVNGRLENGNQARSEARRVGMADANSPPKPLSKPRTPRRSKSDGEAKPEPSPSPRITRKSTRQTTITSHFAKGPAKRKPQEESERAKSDESIKEEDKDQDEKRRRVTSRERVARPLPAEEPERAKSGTRTEKEEERDEKEEKRLRSQTKEPTPKQKLKEEPDREARAGVQADEDEDGDEKDEKKHRSQPKDLAAKRRPEEKEPEKVNPQISDEKDEDEKEEKRRKTTPKEPTEKKMARAKTVMNSKTHPPKCIQCGQYLDDPDLKYGQHPPDAVDEPQMLTNEKLSIFDANESGFESYEALPQHKLTCFSVYCKHGHLCPIDTGLIEKNIELFFSGSAKPIYDDDPSLEGGVNGKNLGPINEWWITGFDGGEKALIGFSTSFAEYILMDPSPEYAPIFGLMQEKIYISKIVVEFLQSNSDSTYEDLINKIETTVPPSGLNLNRFTEDSLLRHAQFVVEQVESYDEAGDSDEQPIFLTPCMRDLIKLAGVTLGQRRAQARRQTIRHSTREKDRGPTKATTTKLVYQIFDTFFAEQIEKDDREDKENAFKRRRCGVCEVCQQPECGKCKACKDMVKFGGSGRSKQACQERRCPNMAMKEADDDEEVDDNIPEMPSPKKMHQGKKKKQNKNRISWVGEAVKTDGKKSYYKKVCIDAETLEVGDCVSVIPDDSSKPLYLARVTALWEDSSNGQMFHAHWFCAGTDTVLGATSDPLELFLVDECEDMQLSYIHSKVKVIYKAPSENWAMEGGMDPESLLEGDDGKTYFYQLWYDQDYARFESPPKTQPTEDNKFKFCVSCARLAEMRQKEIPRVLEQLEDLDSRVLYYSATKNGILYRVGDGVYLPPEAFTFNIKLSSPVKRPRKEPVDEDLYPEHYRKYSDYIKGSNLDAPEPYRIGRIKEIFCPKKSNGRPNETDIKIRVNKFYRPENTHKSTPASYHADINLLYWSDEEAVVDFKAVQGRCTVEYGEDLPECVQVYSMGGPNRFYFLEAYNAKSKSFEDPPNHARSPGNKGKGKGKGKGKPKSQACEPSEPEIEIKLPKLRTLDVFSGCGGLSEGFHQAGISDTLWAIEMWDPAAQAFRLNNPGSTVFTEDCNILLKLVMAGETTNSRGQRLPQKGDVEMLCGGPPCQGFSGMNRFNSRTYSKFKNSLVVSFLSYCDYYRPRFFLLENVRNFVSFKRSMVLKLTLRCLVRMGYQCTFGVLQAGQYGVAQTRRRAIILAAAPGEKLPLFPEPLHVFAPRACQLSVVVDDKKFVSNITRLSSGPFRTITVRDTMSDLPEVRNGASALEISYNGEPQSWFQRQLRGAQYQPILRDHICKDMSALVAARMRHIPLAPGSDWRDLPNIEVRLSDGTMARKLRYTHHDRKNGRSSSGALRGVCSCVEAGKACDPAARQFNTLIPWCLPHTGNRHNHWAGLYGRLEWDGFFSTTVTNPEPMGKQGRVLHPEQHRVVSVRECARSQGFPDTYRLFGNILDKHRQVSGAAPAGSGQEGGFCACHQVGLGPAQSLPGGRLLAAG

SEQ ID NO: 69457 - protein, 216 aa, Homo sapiens
MGPPGPALPATMNNSSSETRGHPHSASSPSERVFPMPLPRKAPLNIPGTPVLEDFPQNDDEKERLQRRRSRVFDLQFSTDSPRLLASPSSRSIDISATIPKFTNTQITEHYSTCIKLSTENIDPMFQKTAASFDECSTAGVFLSTLHCQDYRSELLFPSDVQTLSTGEPLELPELGCVEMTDLKAPLQQCAEDRQICPSLAGFQFTQWDSETHNEV

SEQ ID NO: 69458 - protein, 272 aa, Homo sapiens
MPKGGCPKAPQQEELPLSSDMVEKQTGKKDKDKVSLTKTPKLERGDGGKEVRERASKRKLPFTAGANGEQKDSDTEKQGPERKRIKKEPVTRKAGLLFGMGLSGIRAGYPLSERQQVALLMQMTAEESANSPVDTTPKHPSQSTVCQKGTPNSASKTKDKVNKRNERGETRLHRAAIRGDARRIKELISEGADVNVKDFAGWTALHEACNRGYYDVAKQLLAAGAEVNTKGLDDDTPLHDAANNGHYKVKDYTKWKEACRSCCRSPSPLWDC

SEQ ID NO: 69459 - protein, 76 aa, Homo sapiens
MGLLQGLLRVRKLLLVVCVPLLLLPLPVLHPSSEASCAYVLIVTAVYWVSEAVPLGAAALVPAFLYPFFGVLRSNE

SEQ ID NO: 69460 - protein, 129 aa, Homo sapiens
EIFSPNDKKSFCSIEGEWNGVMYAKYATGENTVFVDTKKLPIIKKKVRKLEDQNEYESRSLWKDVTFNLKIRDIDAATEAKHRLEERQRAEARERKEKEIQWETRLFHEDGECWVYDEPLLKRLGAAKH

SEQ ID NO: 69461 - protein, 208 aa, Homo sapiens
MSGVVPTAPEQPAGEMENQTKPPDPRPDAPPEYNSHFLPGPPGTAVPPPTGYPGGLPMGYYSPQQPSTFPLYQPVGGIHPVRYQPGKYPMPNQSVPITWMPGPTPMANCPPGLEYLVQLDNIHVLQHFEPLEMMTCFETNNRYDIKNNSDQMVYIVTEDTDDFTRNAYRTLRPFVLRVTDCMGREIMTMQRPFRCTCCCFCCPSARQE

SEQ ID NO: 69462 - protein, 175 aa, Homo sapiens
  MOD_RES (1)..(1): Any amino acid
XVDDFLGKETGQQIGDEVRALHDTGKFTDGQLVSQKSDSSKDIRGDKITWIEGKEPGCETIGLLMSSMDDLIRHCNGKLGSYKINGRTKAMVACYPGNGTGYVRHVDNPNGDGRCVTCIYYLNKDWDAKVSGGILRIFPEGKAQFADIEPKFDRLLFFWSDRRNPHEVQPAYATR

SEQ ID NO: 69463 - protein, 216 aa, Homo sapiens
MDAALLLNVEGVKKTILHGGTGELPNFITGSRVIFHFRTMKCDEERTVIDDSRQVGQPMHIIIGNMFKLEVWEILLTSMRVHEVAEFWCDTIHTGVYPILSRSLRQMAQGKDPTEWHVHTCGLANMFAYHTLGYEDLDELQKEPQPLVFVIELLQLWGQVDAPSDYQRETWNLSNHEKMKAVPVLHGEGNRLFKLGRYEEASSKYQEAIICLRNLQ

SEQ ID NO: 69464 - protein, 1657 aa, Homo sapiens
MSSVGKVTQVPNGKAYQQIFQAEVQLVHSLAATRKRAAERSVTLKSGRIPMMKKVETPEGEVMSPRQQKWMHSLPNDWIMENPVLHREKERAKREKARESENTIAAREVRGLMDTIVPEKISTSTFQRQAEHKRKSYESALASFQEEIAQVGKEMEPLIVDTGGLFLKKLTESDEEMNRLFLKVENDTNLEDYTIQALLELWDKVAGRLLLRKQEIKELDEALHSLEFSRTDKLKSVLKKYAEVIEKTSYLMRPEVYRLINEEAMVMNYALLGNRKALAQLFVNLMESTLQQELDSRHRWQGLVDTWKALKKEALLQSFSEFMASESIHTPPAVTKELEVMLKTQNVLQQRRLKHLCTICDLLPPSYSKTQLTEWHSSLNSLNKELDTYHVDCMMRIRLLYEKTWQECLMHVQNCKKQLLDWKAFTEEEAETLVNQFFFQMVGALQGKVEEDLELLDKSFETLADQTEWQSSHLFKYFQEVVQLWEAHQSELLVQELELEKRMEQHRQKHSLESQVQEAHLDRLLDQLRQQSDKETLAFHLEKVKDYLKNMKSRYECFHTLLTKEVMEYPAIMLKELNSYSSALSQYFFVREIFEQNLAGEVIFKFRQPEAHEKPSQKRVKKLRKKQGSKEDMTRSEESISSGTSTARSVEEVEEENDQEMESFITEEVLGQQKKSPLHAKMDESKEGSIQGLEEMQVEREGSLNPSLNEENVKGQGEKKEESEEEDEKEEEEEEEKLEEEKEEKEAQEEQESLSVGEEEDKEEGLEEIYYEDMESFTISSGNTYFVFVPLEEEHCRKSHSTFSAMFINDTSSAKFIEQVTIPSRLILEIKKQLRAGFFEHLEKWFDQCSLNTRVTVATKINELDSELELHLHLHQPRAQQIEKDIHNVRAAELLLHQEQLDSHCAGVTETLKKKRLMFCQFQEEQNVRSKNFRLKIYDMEHIFLNATRSQKLVTLSNTLHQELLSYVDVTQVSLRSFRQYLEESLGKLRYSNIEFIKHCRLFSEGGNFSPKEINSLCSRLEKEAARIELVESVIMLNMEKLENEYLDQANDVINKFESKFHNLSVDLIFIEKIQRLLTNLQVKIKCQVAKSNSQTNGLNFSLQQLQNKIKTCQESRGEKTTVTTEELLSFVQTWKEKLSQRIQYLNCSLDRVSMTELVFTNTILKDQEEDSDILTSSEALEEEAKLDVVTPESFTQLSRVGKPLIEDPAVDVIRKLLQLPNTKWPTHHCDKDPSQTGRGAWACGSRGSSEAGAGGAVCSPPVLCSCPGPSSPKGFKRHRCQPENSGKKAVPSASATSAGSFTPHPKPNKMERKYRVLGDKPPPAAEDFKGIILTLLWESSENLLTVAEEFYRKEKRPVTRPDCMCDTFDQCAENISKKILEYQSQANKYHNSCLIELRIQIRRFEELLPQVCWLVMENFKEHHWKKFFTSVKEIRGQFEEQQKRLEKRKDKNAQKLHLNLGHPVHFQEMESLHLSEEERQEELDSMIRMNKEKLEECTRRNGQVFITNLATFTEKFLLQLDEVVTIDDVQVARMEPPKQKLSMLIRRKLAGLSLKEESEKPLIERGSRKWPGIKPTEVTIQNKILLQPTSSISTTKTTLGHLAAVEARDAVYLKYLASFEEELKRIQDDCTSQIKEAQRWKDSWKQSLHTIQGLYV

SEQ ID NO: 69465 - protein, 180 aa, Homo sapiens
  MOD_RES (1)..(1): Any amino acid
XELPGPSETGRRMADYVTCESTKTTLPLGTEEDVRVKVERLSDEEVHEEVSQPVSASQSSLSDQQTVPGSEQVQEDLLISPQSSSIGSVDEGVSEGLPTLQSTSSTNAPPDDDDRSTERPSPNGPDRPFQCPTCGVRFTRIQNLKQHMLIHSGIKPFQCDRCGKKFTRAYSLKMHRLKHE

SEQ ID NO: 69466 - protein, 226 aa, Homo sapiens
LQRLLLVNAELRHKLAAMQTQLRAAQDRERERQQPGEAATPQAKERARGQAGRPGHQHGQEPEWATAGAGAPGNPEDPAEAAQQLGRPSEAGQCRFSREEFEQILQERNELKAKVFLLKEELAYFQRELLTDHRVPGLLLEAMKVAVRKQRKKIKAKMLGTPEEAESSFGLWYRGKAESSEDETSSPAPSKLGGEEEAQPQSPAPDPPCSALHEHLCLGASAAPEA

SEQ ID NO: 69467 - protein, 48 aa, Homo sapiens
MSVVITPGVGVFEVDRLLMILTKQRMIDNGIGVDLVCMGEQPLHAVPL

SEQ ID NO: 69468 - protein, 890 aa, Homo sapiens
DDDFFHELPETFPSDPPEPLPHFLIEPEEAYIVKNKPVNLYCKASPATQIYFKCNSEWVHQKDHIVDERVDETSGLIVREVSIEISRQQVEELFGPEDYWCQCVAWSSAGTTKSRKAYVRIAYLRKTFEQEPLGKEVSLEQEVLLQCRPPEGIPVAEVEWLKNEDIIDPVEDRNFYITIDHNLIIKQARLSDTANYTCVAKNIVAKRKSTTATVIVYVNGGWSTWTEWSVCNSRCGRGYQKRTRTCTNPAPLNGGAFCEGQSVQKIACTTLCPVDGRWTPWSKWSTCGTECTHWRRRECTAPAPKNGGKDCDGLVLQSKNCTDGLCMQTAPDSDDVALYVGIVIAVIVCLAISVVVALFVYRKNHRDFESDIIDSSALNGGFQPVNIKAARQDLLAVPPDLTSAAAMYRGPVYALHDVSDKIPMTNSPILDPLPNLKIKVYNTSGAVTPQDDLSEFTSKLSPQMTQSLLENEALSLKNQSLARQTDPSCTAFGSFNSLGGHLIVPNSGVSLLIPAGAIPQGRVYEMYVTVHRKETMRPPMDDSQTLLTPVVSCGPPGALLTRPVVLTMHHCADPNTEDWKILLKNQAAQGQWEDVVVVGEENFTTPCYIQLDAEACHILTENLSTYALVGHSTTKAAAKRLKLAIFGPLCCSSLEYSIRVYCLDDTQDALKEILHLERQMGGQLLEEPKALHFKGSTHNLRLSIHDIAHSLWKSKLLAKYQEIPFYHVWSGSQRNLHCTFTLERFSLNTVELVCKLCVRQVEGEGQIFQLNCTVSEEPTGIDLPLLDPANTITTVTGPSAFSIPLPIRQKLCSSLDAPQTRGHDWRMLAHKLNLDRYLNYFATKSSPTGVILDLWEAQNFPDGNLSMLAAVLEEMGRHETVVSLAAEGQY

SEQ ID NO: 69469 - protein, 183 aa, Homo sapiens
MSIEASGINMFLMFLAGSSLEGQENSFTINSVDMKSLPDWTVQNGKNLTLQCFADVSTTSHVKPQHQMLFYKDDVLFYNISSMKSTESYFIPEVRIYDSGTYKCTVIVNNKEKTTAEYQVLVEGVPSPRVTLDKKEAIQGGIVRVNCSVPEEKAPIHFTIEKLELNEKMVKLKREKNSRDQNF

SEQ ID NO: 69470 - protein, 48 aa, Homo sapiens
MIARCLLAVRSLRRWSLALLPRLVCSGVILAHCSLCLPGSSDSPASAT

SEQ ID NO: 69471 - protein, 187 aa, Homo sapiens
  MOD_RES (1)..(1): Any amino acid
XLCFHGLSSAVKLKLLLGTLHLPRRTVDETPAVRSALCPFYSFLHAVLRHSNKWMKGALMEIIQLASLDSDPWVLMVADILKSFPDTGSLNLELEEQNPNVQDILGELREKVGECEASAMLPLECQYLNKNALTTLAGPLTPPVKHFQLKRKPKSATLRAELLQKSTETAQQLKRSAGVPFHAKGRG

SEQ ID NO: 69472 - protein, 143 aa, Homo sapiens
MRNYLKERGDQTVLILHAKVAQKSYGNEKRFFCPPPCVYLMGSGWKKKKEQMERDGCSEQESQPCAFIGIGNSDQEMQQLNLEGKNYCTAKTLYISDSDKRKHFMLSVKMFYGNSDDIGVFLSKRIKVISKPSKKKQSLKNAD

SEQ ID NO: 69473 - protein, 38 aa, Homo sapiens
MKMKLCSKCFPRFRMTHHLMKQEQQSDPLQRETHKKTM

SEQ ID NO: 69474 - protein, 25 aa, Homo sapiens
MLAIKRCKHFELGGDKKRKGQVIQF

SEQ ID NO: 69475 - protein, 157 aa, Homo sapiens
LEEDTRILQYFVSQGFEFFCSQSLSKNFGIYDEGVGMLVVVAVNNQQLLCVLSQLEGLAQALWLNPPNTGARVITSILCNPALLGEWKQSLKEVVENIMLTKEKVKEKLQLLGTPGSWGHITEQSGTHGYLGLNCKGLGGWCPPFLTFGLYLSIKLH

SEQ ID NO: 69476 - protein, 59 aa, Homo sapiens
MDQLLGNMIEMWVDRMDNITQPERRKLSALALLSLLPSDNSFLYPWQPLFYTLTVKEPM

SEQ ID NO: 69477 - protein, 81 aa, Homo sapiens
MRAGPGPTVTLALVLAVSWAMELKPTAPPIFTGRPFVVAWDVPTQDCGPRLKVPLDLNAFDVQASPNEGFVNQNITIFYRD

SEQ ID NO: 69478 - protein, 46 aa, Homo sapiens
MESPASSQPASMPQSKERLVISMVTIYGPQQVPICAVNPVLSTLQT

SEQ ID NO: 69479 - protein, 181 aa, Homo sapiens
MCTALSPKVRSGPGLSDMHQYSQWLASRHEANLLPMKEDLALWLTNLLGKEITAETFMEKLDNGALLCQLAETMQEKFKESMDANKPTKNLPLKKIPCKTSAPSGSFFARDNTANFLSWCRDLGVDETCLFESEGLVLHKQPREVCLCLLELGRIAARYGVEPPGLIKLEKEIEQEETLSA

SEQ ID NO: 69480 - protein, 225 aa, Homo sapiens
MYQMSTLKSNKVIFQLKKNNFHQFRFFKRFIWSFALVAQAEVPWCNLGSLQPPHPRPRCEHMNRRRKFLLASVLALQNSSFIYPSCQKCFSRIILVSKRSNCPKCGSTGESGNANYRYKLSLKVAESNKLFVITVFGSCLDTFFGLTATGLHRYIQDPNKIPETLDNDTTQNLLTKAVETCFVGQSFIFGVTNFENQPGQGSDASNFLQQCSDHKRKAKALVACQ

SEQ ID NO: 69481 - protein, 77 aa, Homo sapiens
MSQDLGRGFLSPTTTCLAEPQDPVPCSSFSGVSDIQRCGHRLLPGGVEMASACSKRFVQMCNVGELWPSGLTGSFHF

SEQ ID NO: 69482 - protein, 56 aa, Homo sapiens
MSALCWGRGAAGLKRALRPCGRPGLPGKEGNTKGDGQAARGPRRGLLPARPGPLAL

SEQ ID NO: 69483 - protein, 174 aa, Homo sapiens
MRLLAFLSLLALVLQETGTASLPRKERKRREEQMPREGDSFEVLPLRNDVLNPDNYGEVIDLSNYEELTDYGDQLPEVKVTSLAPATSISPAKSTTAPGTPSSNPTMTRPTTAGLLLSSQPNHEDIPPLPRRTAYLYARFNRISRIRAEDFKGLTKLKRIDLSNNLISSIDNDA

SEQ ID NO: 69484 - protein, 56 aa, Homo sapiens
MRGLTWAALLGVEGAIHAKYDAIDKDTPIPTDRQIEVDIPRCHQYDELLSSPEGHA

SEQ ID NO: 69485 - protein, 159 aa, Homo sapiens
MKWLGESKNMVVNGRRNGGKLSNDHQQNQSKLQHTGKDTLKAGKNAVERRSNRCNGNSGFEGQSRYVPSSGMSAKELCENDDLATSLVLDPYLGFQTHKMNTSAFPSRSSRHFSKSDSFSHNNPVSGETEKPNSKKTWEVSLWKEWGTDLGLLKEGRKN

SEQ ID NO: 69486 - protein, 154 aa, Homo sapiens
MLRTTRGPGLGPPLLQAALGLGRAGWHWPAGRAASGGRGRAWLQPTGRETGVQVYNSLTGRKEPLIVAHAEAASWYSCGPTVYDHAHLGHACSYVRFDIIRRILTKVFGCSIVMVMGITDVDDKIIKRANERVLLCRPGWSAVAPSWLTATSAS

SEQ ID NO: 69487 - protein, 50 aa, Homo sapiens
MAHGPGALMLKCVVVGDGAVGKTCLLMSYANDAFPEEYVPTVFDHYAGRL

SEQ ID NO: 69488 - protein, 67 aa, Homo sapiens
MQTSSSRSVHLSEWQKNYFAITSGICTGPKADAYRAQILRIQYAWANSEISQDLNKQIVTSGSLDCQ

SEQ ID NO: 69489 - protein, 444 aa, Homo sapiens
  MOD_RES (1)..(1): Any amino acid
XCDASLHISNPRSDKRRRYSMLHSQESGSSVFYHSQDDGPGLEGGDCAKNSGAPFILGQAKNARLASGDSTTKHDLNLSQRRRAYSTNQITNHKPLPRATMASDPMPAAKRYPLRKARLQDLTNQTSLDVQRWQIDLQPLLNSGQDLNQGPKLRGPGARRPSLLPQGCQPFLPWGQETQAWSPVRERTSDSRSPGDLEPSHHPSAFETETSSDWDPPAESQERASPSRPATPAPVLGKALVKGLHDSQRLQWEVSFELGTPGPERGGAQDADLWSETFHHLAARAIIRDFEQLAEREGEIEQGSNRRYQVSALHTSKACNIISKYTAFVPVDVSKSRYLPTVVEYPNSGAALRMLGSRALAQQWRGTSSGFGRPQTMLGEDSAPGNGPRKCSQTLMGFKTKTETEHSVRGWKPRGALQNQSVLSTSWSHWPPKPRRTSSTPEPS

SEQ ID NO: 69490 - protein, 197 aa, Homo sapiens
MSVKEFLAKAKEDFLKKWENPTQNNAGLEDFERKKTLGTGSFGRVMLVKHKATEQYYAMKILDKQKVVKLKQIEHTLNEKRILQAVNFPFLVRLEYAFKDNSNLYMVMEYVPGGEMFSHLRRIGRFSEPHARFYAAQIVLTFEYLHSLDLIYRDLKPENLLIDHQGYIQVTDFGFAKRVKGRTWTLCGTPEYLAPEI

SEQ ID NO: 69491 - protein, 127 aa, Homo sapiens
KGVPALLSPELLYALARMGHGDEIGLGIPQLLEAVLKLLPLDTYVESPAAVMELVPSDKERGLQTPVWTEYESILRRAGCVRALAKIERFEFYERAKKAFAVVATGETALYGNLILRKGVLALNPLL

SEQ ID NO: 69492 - protein, 89 aa, Homo sapiens
  MOD_RES (1)..(1): Any amino acid
XARQQCLGAANPAPAKTITPSGMDPTTLILQMRRLRPRDLMVTQALGEQIWNLGPGVLGGPRGNSFRVQMKRRSRERRGVPERGGWAGP

SEQ ID NO: 69493 - protein, 152 aa, Homo sapiens
MKAETERSALDVKLKHARNQVDVEIKRRQRAEADCEKLERQIQLIREMLMCDTSGSIQLSEEQKSALAFLNRGQPSSSNAGNKRLSTIDESGSILSDISFDKTDESLDWDSSLVKTFKLKKREKRRSTSRQFVDGPPGPVKKTRSIGSAVDQ

SEQ ID NO: 69494 - protein, 1076 aa, Homo sapiens
  MOD_RES (1)..(1): Any amino acid
XIGKTKIFLKDHHDMLLEVERDKAITDRVILLQKVIRGFKDRSNFLKLKNAATLIQRHWRGHNCRKNYGLMRLGFLRLQALHRSRKLHQQYRLARQRIIQFQARCRAYLVRKAFRHRLWAVLTVQAYARGMIARRLHQRLRAEYLWRLEAEKMRLAEEEKLRKEMSAKKAKEEAERKHQERLAQLAREDAERELKEKEAARRKKELLEQMERARHEPVNHSDMVDKMFGFLGTSGGLPGQEGQAPSGFEDLERGRREMVEEDLDAALPLPDEDEEDLSEYKFAKFAATYFQGTTTHSYTRRPLKQPLLYHDDEGDQLAALAVWITILRFMGDLPEPKYHTAMSDGSEKIPVMTKIYETLGKKTYKRELQALQGEGEAQLPEGQKKSSVRHKLVHLTLKKKSKLTEEVTKRLHDGESTVQGNSMLEDRPTSNLEKLHFIIGNGILRPALRDEIYCQISKQLTHNPSKSSYARGWILVSLCVGCFAPSEKFVKYLRNFIHGGPPGYAPYCEERLRRTFVNGTRTQPPSWLELQATKSKKPIMLPVTFMDGTTKTLLTDSATTAKELCNALADKISLKDRFGFSLYIALFDKVSSLGSGSDHVMDAISQCEQYAKEQGAQERNAPWRLFFRKEVFTPWHSPSEDNVATNLIYQQVVRGVKFGEYRCEKEDDLAELASQQYFVDYGSEMILERLLNLVPTYIPDREITPLKTLEKWAQLAIAAHKKGIYAQRRTDAQKVKEDVVSYARFKWPLLFSRFYEAYKFSGPSLPKNDVIVAVNWTGVYFVDEQEQVLLELSFPEIMAVSSSRECRVWLSLGCSDLGCAAPHSGWAGLTPAGPCSPCWSCRGAKTTAPSFTLATIKGDEYTFTSSNAEDIRDLVVTFLEGLRKRSKYVVALQDNPNPAGEESGFLSFAKGDLIILDHDTGEQVMNSGWANGINERTKQRGDFPTDSVYVMPTVTMPPREIVALVTMTPDQRQDVVRLLQLRTAEPEVRAKPYTLEEFSYDYFRPPPKHTLSRVMVSKARGKDRLWSHTREPLKQALLKKLLGSEELSQEACLAFIDGRLPVQEDTLRQRAHRPDL

SEQ ID NO: 69495 - protein, 321 aa, Homo sapiens
MPGCPCPGCGMAGPRLLFLTALALELLERAGGSQPALRSRGTATACRLDNKESESWGALLSGERLDTWICSLLGSLMVGLSGVFPLLVIPLEMGTMLRSEAGAWRLKQLLSFALGGLLGNVFLHLLPEAWAYTCSASPGGEGQSLQQQQQLGLWVIAGILTFLALEKMFLDSKEEGTSQAPNKDPTAAAAALNGGHCLAQPAAEPGLGAVVRSIKVSGYLNLLANTIDNFTHGLAVAASFLVSKKVRGLGPVGLWRFQWQPCGFHLCLESLLLAPPLPAPSSKALIPHPPCCCPGRHCSLILSPWSVPVPSTPCWVPLSSC

SEQ ID NO: 69496 - protein, 148 aa, Homo sapiens
  MOD_RES (1)..(1): Any amino acid
XATRFHRLDEPPHICWDETHFGKMGSYYINRTFFFDVHPPLGKMLIGLAGYLSGYDGTFLFQKPGDKYEHHSYMGMRGFCAFLGSWLVPFAYLTVLDLSKSLSAALLTAALLTFGDCGKTPDCSCPVPHSAAPGSLYSHLCCSLHGAE

SEQ ID NO: 69497 - protein, 102 aa, Homo sapiens
MASMRESDTGLWLHNKLGATDELWAPPSIASLLTAAVIDNIRLCFHGLSSAVKLKLLLGTLHLPRRTVDEGLALSTRLECSGTIVTHCSLDLLTSDLPISAS

SEQ ID NO: 69498 - protein, 88 aa, Homo sapiens
MGAAVLCASFMSFGVKRRWFALGAALQLAISTYAAYIGGYVHYGDWLKVRMYSRTVAIIGGFLVLASGAGELYRRKPRSRSLQSTGQV

SEQ ID NO: 69499 - protein, 1522 aa, Homo sapiens
MQRGKPCRALPTLKCQTFCQRHGLMFEVVDLRWGIRNIEATDHLTTELCLEEVDRCWKTSIGPAFVALIGDQYGPCLIPSRIDEKEWEVLRDHLTARPSDLELVARYFQRDENAFPPTYVLQAPGTGEACEPEEATLTSVLRSGAQEARRLGLITQEQWQHYHRSVIEWEIERSLLSSEDREQGATVFLREIQDLHKHILEDCALRMVDRLADGCLDADAQNLLSSLKSHITDMHPGVLKTHRLPWSRDLVNPKNKTHACYLKELGEQFVVRANHQVLTRLRELDTAGQELAWLYQEIRHHLWQSSEVIQTFCGRQELLARLGQQLRHDDSKQHTPLVLFGPPGIGKTALMCKLAEQMPRLLGHKTVTVLRLLGTSQMSSDARGLLKSICFQVCLAYGLPLPPAQVLDAHTRVVQFFHTLLHTVSCRNFESLVLLLDAMDDLDSVRHARRVPWLPLNCPPRVHLILSACSGALGVLDTLQRVLLDPEAYWEVKPLSGNQGQQMIQLLLAAARRTLSPVHTDLLWASLPECGNPGRLRLAFEEARKWASFTVPVPLATTAEEATHQLCTRLEQTHGQLLVAHVLGYIVSSRHGLSEAELKDVLSLDDEVLQDVYRDWTPPSKELLRFPPLLWVRLRRDLGYYLARRPVDGFTLLAIAHRQLVEVVRERYLSGSERAKRHGVLADFFSGTWSQGTKKLITLPLVGKPLNLDRKVAPQPLWFSHTVANLRKLKELPYHLLHSGRLEELKQEVLGSMSWISCRGISGGIEDLLDDFDLCAPHLDSPEVGLVREALQLCRPAVELRGMERSLLYTELLARLHFFATSHPALVGQLCQQAQSWFQLCAHPVLVPLGGFLQPPGGPLRATLSGCHKGITAMAWGVEEKLLVIGTQDGIMAVWDMEEQHVIHMLTGHTGEVRCVKIFAKGTLANSASKDYTLHLWNLLSGQEKFTIWDGGSKNPAEPQIWNLHVDEAHKVVYSASGSKINAWNLETAEPVFHILGDASDPWMCMAVLASQATLLTVSRDGVVSLWSSATGKLQGKQHMSSIKEETPTCAVSVQKQGKLVTGFSNGSISLVSSKGDRLLEKLPDAVRFLVVSEDESLLAAGFGRSVRIFLADSRGFRRFMAMDLEHEDMVETAVFGTENNLIITGSLDALIQVWDLSDAHRSRVPAPFLDRTGLTAVSHNGSYVYFPKIGDKNKVTIWDLAEGEEQDSLDTSSEIRCLEVAEQRKLLFTGLVSGVVLVFPLNSRQDVICIPPPEARKAINCMSLSKCEDRLAIAYDNIVLVLDITSGDPCPVIDGPRYTFYTQLPETLSSVAILTDYRVVYSMTNGDLFLYECATSKAFPLETHRSRVACVEVSHKEQLVVSGSEDALLCLWDLQARKWKFEMSYTSSYCRGVQCACFSKDDKYVYVGLKDRSILVWSVLDGTLLTVQFVHAVVNRIIPTTSGFIAPTRHGYLIRENFQCLSAKASPQDPLKNFKKAMWMVKSRQREELVAAAGAPQDLESESAQGNETKSNKCSQVCLIV

SEQ ID NO: 69500 - protein, 153 aa, Homo sapiens
MKEAGQMQNLESARAGRSVSTQTGSMTGQIPRLSKVNLFTLLSLWMELFPAEAQRQKSQKNEEGKHGPLGDNEERTRVSTDKRQVKRTGLVVVKNMKIVGLHCSSEDLHAGQIALIKHGSRLKNCDLYFSRKPCSACLKMIVNGLLEAAKMPR

SEQ ID NO: 69501 - protein, 207 aa, Homo sapiens
MSAQSLPAATPPTQKPPRIIRPRPPSRSRAAQSPGPPHNGSSPQELPRNSNDAPTPMCTPIFWEPPAASLKPPALLPPSASRASLDSQTSPDSPSSTPTPSPVSRRSASPEPAPRSPVPPPKPSGSPCTPLLPMAGVLAQNGSASAPGTVRRLAGRFEGGAEGRAQDADAPEPGLQARADVNGEREAPLTGSGSQENGAPDAGLACP

SEQ ID NO: 69502 - protein, 73 aa, Homo sapiens
  MOD_RES (1)..(1): Any amino acid
XEERLRMREHVMNEVDTNKDRLVTLEEFLKATEKKEFLEPDSWEVIQQMEQKKLQQGIPPSGPAGELKFEPHI

SEQ ID NO: 69503 - protein, 100 aa, Homo sapiens
MASEDIAKLAETLAKTQVAGGQLSFKGKSLKLNTAEDAKDVIKEIEDFDSLEALRLEGNTVGVEAARVIAKALEKKSELKRCHWSDMFTGRLRTEIPPAL

SEQ ID NO: 69504 - protein, 1035 aa, Homo sapiens
MADNLDEFIEEQKARLAEDKAELESDPPYMEMKGKLSAKLSENSKILISMAKENIPPNSQQTRGSLGIDYGLSLPLGEDYERKKHKLKEELRQDYRRYLTQKNFLSTSETDPSTLGVSLPIGERLSAKERLKLERNKEYNQFLRGKEESSEKFRQVEKSTEPKSQRNKKPIGQVKPDLTSQIQTSCENSEGPRKDVLTPSEAYEELLNQRRLEEDRYRQLDDEIELRNRRIIKKANEEVGISNLKHQRFASKAGIPDRRFHRFNEDRVFDRRYHRPDQDPEVSEEMDERFRYESDFDRRLSRVYTNDRIAPLPPPPLLPPLATNYRTPYDDAYYFYGSRNTFDPSLAYYGSGMMGVQPAAYVSAPVTHQLAQPVVNTVGQNELKITSDQVINSGLIFEDKPKPSKQSLQSYQEALQQQIREREERRKKEREEKEEYEAKLEAEMRTYNPWGKGGGGAPLRDAKGNLITDLNRMHRQNIDAYHNPDARTYEDKRAVVSLDPNLATSNAENLEDAANKSSGHMQTQSSPFARGNVFGEPPTELQIKQQELYKNFLRFQIEEKKQREEAERERLRIAEEKEERRLAEQRARIQQEYEEEQEKKREKEEEQRLKNEEHIRLAEERQKEAERKKKEEEEKYNLQLQHYCERDNLIGEETKHMRQPSPIVPALQNKIASKLQRPPSVDSIIRSFIHESSMSRAQSPPVPARKNQLRAEEEKKNVIMELSEMRKQLRSEERRLQERLLHMDSDDEIPIRKKERNPMDIFDMARHRLQAPVRRQSPKGLDAATFQNVHDFNELKDRDSETRVDLKFMYLDPPRDHHTLEIQQQALLREQQKRLNRIKMQEGAKVDLDAIPSAKVREQRMPRDDTSDFLKNSLLESDSAFIGAYGETYPAIEDDVLPPPSQLPSARERRRNKWKGLDIDSSRPNVAPDGLSLKSISSVNVDELRVRNEERMRRLNEFHNKPINTDDESSLVDPDDIMKHIGDDGSNSVATEPWLRPGTSETLKRFMAEQLNQEQQQIPGKPGTFTWQGLSTAHG

SEQ ID NO: 69505 - protein, 669 aa, Homo sapiens
MVISHAAPHGPEDSAPQFSKLYPNASQHITPSYNYAPNMDKHWIMQYTGPMLPIHMEFTNILQRKRLQTLMSVDDSVERLYNMLVETGELENTYIIYTADHGYHIGQFGLVKGKSMPYDFDIRVPFFIRGPSVEPGSIVPQIVLNIDLAPTILDIAGLDTPPDVDGKSVLKLLDPEKPGNRFRTNKKAKIWRDTFLVERGKFLRKKEESSKNIQQSNHLPKYERVKELCQQARYQTACEQPGQKWQCIEDTSGKLRIHKCKGPSDLLTVRQSTRNLYARGFHDKDKECSCRESGYRASRSQRKSQRQFLRNQGTPKYKPRFVHTRQTRSLSVEFEGEIYDINLEEEEELQVLQPRNIAKRHDEGHKGPRDLQASSGGNRGRMLADSSNAVGPPTTVRVTHKCFILPNDSIHCERELYQSARAWKDHKAYIDKEIEALQDKIKNLREVRGHLKRRKPEECSCSKQSYYNKEKGVKKQEKLKSHLHPFKEAAQEVDSKLQLFKENNRRRKKERKEKRRQRKGEECSLPGLTCFTHDNNHWQTAPFWNLGSFCACTSSNNNTYWCLRTVNETHNFLFCEFATGFLEYFDMNTDPYQLTNTVHTVERGILNQLHVQLMELRSCQGYKQCNPRPKNLDVGNKDGGSYDLHRMLLFLVPCSAPLTSRAMVSDASF

SEQ ID NO: 69506 - protein, 212 aa, Homo sapiens
PPPPPPVPPPPTGATPPPPPPLPAGGAQGSSHDESSMSGLAAAIAGAKLRRVQRPEDASGGSSPSGTSKSDANRASSGGGGGGLMEEMNKLLAKRRKAASQSDKPAEKKEDESQMEDPSTSPSPGTRAASQPPNSSEAGRKPWERSNSVEKPVSSILSRMKPAGSVNDMALDAFDLDRMKQEILEEVVRELHKVKEEIIDAIRQELSGISTT

SEQ ID NO: 69507 - protein, 913 aa, Homo sapiens
MDHYDSQQTNDYMQPEEDWDRDLLLDPAWEKQQRKTFTAWCNSHLRKAGTQIENIEEDFRDGLKLMLLLEVISGERLAKPERGKMRVHKISNVNKALDFIASKGVKLVSIGAEEIVDGNVKMTLGMIWTIILRFAIQDISVEETSAKEGLLLWCQRKTAPYKNVNIQNFHISWKDGLGFCALIHRHRPELIDYGKLRKDDPLTNLNTAFDVAEKYLDIPKMLDAEDIVGTARPDEKAIMTYVSSFYHAFSGAQKAETAANRICKVLAVNQENEQLMEDYEKLASDLLEWIRRTIPWLENRVPENTMHAMQQKLEDFRDYRRLHKPPKVQEKCQLEINFNTLQTKLRLSNRPAFMPSEGRMVSDINNAWGCLEQVEKGYEEWLLNEIRRLERLDHLAEKFRQKASIHEAWTDGKEAMLRQKDYETATLSEIKALLKKHEAFESDLAAHQDRVEQIAAIAQELNELDYYDSPSVNARCQKICDQWDNLGALTQKRREALERTEKLLETIDQLYLEYAKRAAPFNNWMEGAMEDLQDTFIVHTIEEIQGLTTAHEQFKATLPDADKERLAILGIHNEVSKIVQTYHVNMAGTNPYTTITPQEINGKWDHVRQLVPRRDQALTEEHARQQHNERLRKQFGAQANVIGPWIQTKMEEIGRISIEMHGTLEDQLSHLRQYEKSIVNYKPKIDQLEGDHQLIQEALIFDNKHTNYTMEHIRVGWEQLLTTIARTINEVENQILTRDAKGISQEQMNEFRASFNHFDRDHSGTLGPEEFKACLISLGYDIGNDPQKTGMMDTDDFRACLISMGYNMGEAEFARIMSIVDPNRLGVVTFQAFIDFMSRETADTDTADQVMASFKILAGDKNYITMDELRRELPPDQAEYCIARMAPYTGPDSVPGALDYMSFSTALYGESDL

SEQ ID NO: 69508 - protein, 248 aa, Homo sapiens
MAMRELVEAECGGANPLMKLAGHFTQDKALRQEGLRPGPWPPGAPASEAASKPLGVASEDELVAEFLQDQNAPLVSRAPQTFKMDDLLAEMQQIEQSNFRQAPQRAPGVADLALSENWAQEFLAAGDAVDVTQDYNETDWSQEFISEVTDPLSVSPARWAEEYLEQSEEKLWLGEPEGTATDRWYDEYHPEEDLQHTASDFVAKVDDPKLANSEFLKFVRQIGEGQVSLESGAGSGRAQAEQWAAEFI

SEQ ID NO: 69509 - protein, 1647 aa, Homo sapiens
MMMMMMMKKMQHQRQQQADHANEANYARGTRLPLSGEGPTSQPNSSKQTVLSWQAAIDAARQAKAAQTMSTSAPPPVGSLSQRKRQQYAKSKKQGNSSNSRPARALFCLSLNNPIRRACISIVEWKPFDIFILLAIFANCVALAIYIPFPEDDSNSTNHNLEKVEYAFLIIFTVETFLKIIAYGLLLHPNAYVRNGWNLLDFVIVIVGLFSVILEQLTKETEGGNHSSGKSGGFDVKALRAFRVLRPLRLVSGVPSLQVVLNSIIKAMVPLLHIALLVLFVIIIYAIIGLELFIGKMHKTCFFADSDIVAEEDPAPCAFSGNGRQCTANGTECRSGWVGPNGGITNFDNFAFAMLTVFQCITMEGWTDVLYWVNDAIGWEWPWVYFVSLIILGSFFVLNLVLGVLSGEFSKEREKAKARGDFQKLREKQQLEEDLKGYLDWITQAEDIDPENEEEGGEEGKRNTSMPTSETESVNTENVSGEGENRGCCGSLCQAISKSKLSRRWRRWNRFNRRRCRAAVKSVTFYWLVIVLVFLNTLTISSEHYNQPDWLTQIQDIANKVLLALFTCEMLVKMYSLGLQAYFVSLFNRFDCFVVCGGITETILVELEIMSPLGISVFRCVRLLRIFKVTRHWTSLSNLVASLLNSMKSIASLLLLLFLFIIIFSLLGMQLFGGKFNFDETQTKRSTFDNFPQALLTVFQILTGEDWNAVMYDGIMAYGGPSSSGMIVCIYFIILFICGNYILLNVFLAIAVDNLADAESLNTAQKEEAEEKERKKIARKESLENKKNNKPEVNQIANSDNKVTIDDYREEDEDKDPYPPCDVPVGEEEEEEEEDEPEVPAGPRPRRISELNMKEKIAPIPEGSAFFILSKTNPIRVGCHKLINHHIFTNLILVFIMLSSAALAAEDPIRSHSFRNTILGYFDYAFTAIFTVEILLKMTTFGAFLHKGAFCRNYFNLLDMLVVGVSLVSFGIQSSAISVVKILRVLRVLRPLRAINRAKGLKHVVQCVFVAIRTIGNIMIVTTLLQFMFACIGVQLFKGKFYRCTDEAKSNPEECRGLFILYKDGDVDSPVVRERIWQNSDFNFDNVLSAMMALFTVSTFEGWPALLYKAIDSNGENIGPIYNHRVEISIFFIIYIIIVAFFMMNIFVGFVIVTFQEQGEKEYKNCELDKNQRQCVEYALKARPLRRYIPKNPYQYKFWYVVNSSPFEYMMFVLIMLNTLCLAMQHYEQSKMFNDAMDILNMVFTGVFTVEMVLKVIAFKPKGYFSDAWNTFDSLIVIGSIIDVALSEADPTESENVPVPTATPGNSEESNRISITFFRLFRVMRLVKLLSRGEGIRTLLWTFIKSFQALPYVALLIAMLFFIYAVIGMQMFGKVAMRDNNQINRNNNFQTFPQAVLLLFRCATGEAWQEIMLACLPGKLCDPESDYNPGEEYTCGSNFAIVYFISFYMLCAFLIINLFVAVIMDNFDYLTRDWSILGPHHLDEFKRIWSEYDPEAKGRIKHLDVVTLLRRIQPPLGFGKLCPHRVACKRLVAMNMPLNSDGTVMFNATLFALVRTALKIKTEGNLEQANEELRAVIKKIWKKTSMKLLDQVVPPAGDDEVTVGKFYATFLIQDYFRKFKKRKEQGLVGKYPAKNTTIALQMLERML

SEQ ID NO: 69510 - protein, 655 aa, Homo sapiens
MEVRKLSISWQFLIVLVLILQILSALDFDPYRVLGVSRTASQADIKKAYKKLAREWHPDKNKDPGAEDKFIQISKAYEILSNEEKRSNYDQYGDAGENQGYQKQQQQREYRFRHFHENFYFDESFFHFPFNSERRDSIDEKYLLHFSHYVNEVVPDSFKKPYLIKITSDWCFSCIHIEPVWKEVIQELEELGVGIGVVHAGYERRLAHHLGAHSTPSILGIINGKISFFHNAVVRENLRQFVESLLPGNLVEKVTNKNYVRFLSGWQQENKPHVLLFDQTPIVPLLYKLTAFAYKDYLSFGYVYVGLRGTEEMTRRYNINIYAPTLLVFKEHINRPADVIQARGMKKQIIDDFITRNKYLLAARLTSQKLFHELCPVKRSHRQRKYCVVLLTAETTKLSKPFEAFLSFALANTQDTVRFVHVYSNRQQEFADTLLPDSEAFQGKSAVSILERRNTAGRVVYKTLEDPWIGSESDKFILLGYLDQLRKDPALLSSEAVLPDLTDELAPVFLLRWFYSASDYISDCWDSIFHNNWREMMPLLSLIFSALFILFGTVIVQAFSDSNDERESSPPEKEEAQEKTGKTEPSFTKENSSKIPKKGFVEVTELTDVTYTSNLVRLRPGHMNVVLILSNSTKTSLLQKFALEVYTFTGKIIRW

SEQ ID NO: 69511 - protein, 41 aa, Homo sapiens
LEEQPECREEKRGSLHVWKSELVEVEDDVYLRHSSSLTYRL

SEQ ID NO: 69512 - protein, 1181 aa, Homo sapiens
MEHFLLEVAAAPLRLIAAKNEKSRSELGRFLAKQVWTPQDRQCVLSTLAQLLLDKDCTVLVGRQLRPLLLDLLERNAEAIKAGGQINHDLHERLCVSMSKLIGNHPDVLPFALRYFKDTSPVFQRLFLESSDANPVRYGRRRMKLRDLMEAAFKFLQQEQSVFRELWDWSVCVPLLRSHDTLVRWYTANCLALVTCMNEEHKLSFLKKIFNSDELIHFRLRLLEEAQLQDLEKALVLANPEVSLWRKQKELQYLQGHLVSSDLSPRVTAVCGVVLPGQLPAPGELGGNRSSSREQELALRSYVLVESVCKSLQTLAMAVASQNAVLLEGPIGCGKTSLVEYLAAVTGRTKPPQLLKVQLGDQTDSKMLLGMYRCTDVPGEFVWQPGTLTQAATMGHWILLEDIDYAPLDVVLQSRYPSLLAVVDHLLDIYIQLTGEKHHSWSDSSVGCEQAPEEVSEARRENKRPTLEGRELSLRDLLNWCNRIAHSFDSSSLSASLNIFQEALDCFTAMLSEHTSKLKMAEVIGSKLNISRKKAEFFCQLYKPEIVINELDLQVGRVRLLRKQSEAVHLQREKFTFAATRPSSVLIEQLAVCVSKGEPVLLVGETGTGKTSTIQYLAHITGHRLRVVNMNQQSDTADLLGGYKPVDHKLIWLPLREAFEELFAQTFSKKQNFTFLGHIQTCYRQKRWHDLLRLMQHVHKSAVNKDGKDSETGLLIKEKWEAFGLRLNHAQQQMKMTENTLLFAFVEGTLAQAVKKGEWILLDEINLAAPEILECLSGLLEGSSGSLVLLDRGDTEPLVRHPDFRLFACMNPATDVGKRNLPPGIRNRFTELYVEELESKEDLQVLIVDYLKGLSVNKNTVQGIINFYTALRKESGTKLVDGTGHRPHYSLRTLCRALRFAASNPCGNIQRSLYEGFCLGFLTQLDRASHPIVQKLICQHIVPGNVKSLLKQPIPEPKGGRLIQVEGYWIAVGDKEPTIDETYILTSSVKLNLRDIVRVVSAGTYPVLIQGETSVGKTSLIQWLAAATGNHCVRINNHEHTDIQEYIGCYTSDSSGKLVFKEGVLIDAMRKGYWIILDELNLAPTDVLEALNRLLDDNRELLVTETQEVVKAHPRFMLFATQNPPGLYGGRKVLSRAFRNRFVELHFDELPSSELETILHKRCSLPPSYCSKLVKVMLDLQ

SEQ ID NO: 69513 - protein, 36 aa, Homo sapiens
VLGTPTREQIREMNPNYTEFKFPQIKAHPWTKVGQG

SEQ ID NO: 69514 - protein, 216 aa, Homo sapiens
MNLLLNSISLLTFLSEFVVIHNGIITNYKDLRKFLESKGYEFESETDTETIAKLIKYVFDNRETEDITFSTLVERVIQQLEGAFALVFKSVHYPGEAVATRRGSPLLIGVRSKYKLSTEQIPILYRTCTLENVKNICKTRMKRLDSSACLHAVGDKAVEFFFASDASAIIEHTNRVIFLEDDDIAAVADGKLSIHRVKRSASDDPSRAIQTLQMEL

SEQ ID NO: 69515 - protein, 163 aa, Homo sapiens
METFPAVAEKVLKEFQVLLQHSPSPIGSTRMLQLMTINMFAVHNSQLKDCFSEECRSVIQEQAAALGLAMFSLLVRRCTCLLKESAKAQLSSPEDQDDQDDIKVSSFVPDLKELLPSVKVWSDWMLGYPDTWNPPPTSLDLPSHVAVDVWSTLADFCNILTAV

SEQ ID NO: 69516 - protein, 29 aa, Homo sapiens
GKKHLFDQDEETCWNSDQVHRALRLSTRL

SEQ ID NO: 69517 - protein, 340 aa, Homo sapiens
MALKVATVAGSAAKAVLGPALLCRPWEVLGAHEVPSRNIFSEQTIPPSAKYGGRHTVTMIPGDGIGPELMLHVKSVFRHACVPVDFEEVHVSSNADEEDIRNAIMAIRRNRVALKGNIETNHNLPPSHKSRNNILRTSLDLYANVIHCKSLPGVVTRHKDIDILIVRENTEGEYSSLEHESVAGVVESLKIITKAKSLRIAEYAFKLAQESGRKKVTAVHKANIMKLGDGLFLQCCREVAARYPQITFENMIVDNTTMQLVSRPQQFDVMVMPNLYGNIVNNVCAGLVGGPGLVAGANYGHVYAVFETATRNTGKSIANKNIANPTATLLASCMMLDHLK

SEQ ID NO: 69518 - protein, 104 aa, Homo sapiens
MTATVENLTFQKDTLGNAVDKNRRHGSTEPLVLAWSSQFRRLTWGCALDALHRSPCVAASQHGVTHLIRSSRTPHSTRCRKEDAQPGHHGNGAASVTAQARGQR

SEQ ID NO: 69519 - protein, 66 aa, Homo sapiens
MSSAPRGPPSVAPLPAGIGRSTAKTPGLPGSLEMARKTGKITGSSTYWMFDKIFFLGQKHWHYWDH

SEQ ID NO: 69520 - protein, 832 aa, Homo sapiens
MHKHYKVHFAKDAQSPNGHYFWDPELGHRKGCCHQWRQDSAALRAHGPCRPSPQSHWQLAYHSHQVGGSGWRRGLLPSVLQQQRQPQSQPSPPSPLRQRLCPIHEAQKGLPATSTVPKEPASAPQAPTLPTTAPAMARSGPALPSAAGVLLKPSEPTDARPLPAPAACGSFTAYSSDILTEDDVYCSCLAKTLCHVPVPVTVGFYAPFGCRLHMMLDKITALMQQEAAQRESEELQHVQWRPRAVSGWGVPQLLWYLVFLQPIITEVHLRRRNVQFLFIRFSAWQYAGTDKLWAGLVTTLCEGIRRHYGALPFSVYSVLGNKPATRQDCCQSEWHCRRRVCLGLLALLAALGLGVGLLYLSLGGHALGHGSPSGSLLKVFGGAATTLSGSGLLMAVYSVGKHLFVSQRKKIERLVSREKFGSQLGFMCEVKKEVELLTDFLCFLEIYQRRRLRVVLEVTGLDTCYPERVVGVLNAINTLLSDSHAPFIFILVVDPSILAACLESAGNMKGTADNGYLFLNRTVTLPFSVPIMGRRTKLQFLHDAVQSRDDLLYREMTRKPWLPGDAGGESAQLLAVQAQAGTERGQGRIDDEAARRIQEALFCLHDERDCLYEYVPDNVVSMRRIVNTVPITVRLLQQQQQQGDFGGPTPRQAVAWVVLANQWPCRLSWALQCLEDRQQTGGAPEGRARLWDVFRDNSRELHTMTKALQNVLDLDGDPELFERFLGADFPFTVAEAQSLLRCTVNLDHSIRRRMGLIRAVSALKPPSPPKSPTRDTPHAAHRANSASRAPPSGRASGQAGEGHHTGDLAHRGKLWPVACALFRPGQSSPGGP

SEQ ID NO: 69521 - protein, 75 aa, Homo sapiens
MPRQSLALLPRLECSGTILAQYNIHLLSSVKLSGKLQKLKWKKGELMEVKVMELKLQKNLFSSLAVKMGERLLLF

SEQ ID NO: 69522 - protein, 194 aa, Homo sapiens
  MOD_RES (1)..(1): Any amino acid
XLSEQQLDARRRGLEEYLEKVCSIRVIGESDIMQEFLSESDENYNGVSDVELRVALPDGTTVTVRVKKNSTTDQVYQAIAAKVGMDSTTVNYFALFEVISHSFVRKLAPNEFPHKLYIQNYTSAVPGTCLTIRKWLFTTEEEILLNDNDLAVTYFFHQIPAASLHFPLLKMRHQLSFLLHSYHIPIPFSSLPSP

SEQ ID NO: 69523 - protein, 47 aa, Homo sapiens
  MOD_RES (1)..(1): Any amino acid
XRPLHKTCSLFMRNIAPNISRAEIISLCKRYPGFMRVALSEPQPERR

SEQ ID NO: 69524 - protein, 687 aa, Homo sapiens
MMEELHSLDPRRQELLEARFTGVGVSKGPLNSESSNQSLCSVGSLSDKEVETPEKKQNDQRNRKRKAEPYETSQGKGTPRGHKISDYFERRVEQPLYGLDGSAAKEATEEQSALPTLMSVMLAKPRLDTEQLAQRGAGLCFTFVSAQQNSPSSTGSGNTEHSCSSQKQISIQHRQTQANCDLRRQIDEQQKMLEKYKERLNRCVTMSKKLLIEKSKQEKMACRDKSMQDRLRLGHFTTVRHGASFTEQWTDGYAFQNLIKQQERINSQREEIERQRKMLAKRKPPAMGQAPPATNEQKQRKSKTNGAENETLTLAEYHEQEEIFKLRLGHLKKEEAEIQAELERLERVRNLHIRELKRIHNEDNSQFKDHPTLNDRYLLLHLLGRGGFSEVYKAFDLTEQRYVAVKIHQLNKNWRDEKKENYHKHACREYRIHKELDHPRIVKLYDYFSLDTDSFCTVLEYCEGNDLDFYLKQHKLMSEKEARSIIMQIVNALKYLNEIKPPIIHYDLKPGNILLVNGTACGEIKITDFGLSKIMDDDSYNSVDGMELTSQGAGTYWYLPPECFVVGKEPPKISNKVDVWSVGVIFYQCLYGRKPFGHNQSQQDILQENTILKATEVQFPPKPVVTPEAKAFIRRCLAYRKEDRIDVQQLACDPYLLPHIRKSVSTSSPAGAAIASTSGASNNSSSN

SEQ ID NO: 69525 - protein, 20 aa, Homo sapiens
MLETILRMLDNDSILVDAIR

SEQ ID NO: 69526 - protein, 151 aa, Homo sapiens
MVDRSKLLPTSLQNEFIPKEVLLSLTYAANAGPCPENLLPPKKIKTPKGTLPRLVDHVWHHPVRRNKFKYLIDHPVSLTGAGRDISFLYDVTYAKGQTREKAVCPPHLARSLQSHDGVIVPHKPKTLTDTLIPEEFHIVSSTGVSGLECYD

SEQ ID NO: 69527 - protein, 148 aa, Homo sapiens
MFVASERKMRAHQVLTFLLLFVITSVASENASTSRGCGLDLLPQYVSLCDLDAIWGIVVEAVAGAGALITLLLMLILLVRLPFIKEKEKKSPVGLHFLFLLGTLGLFGLTFAFIIQEDETICSVRRFLWGVLFALCFSCLLSQAWRVR

SEQ ID NO: 69528 - protein, 453 aa, Homo sapiens
MAAATGAVAASAASGQAEGKKITDLRVIDLKSELKRRNLDITGVKTVLISRLKQAIEEEGGDPDNIELTVSTDTPNKKPTKGKGKKHEADELSGDASVEDDAFIKDCELENQEAHEQDGNDELKDSEEFGENEEENVHSKELLSAEENKRAHELIEAEGIEDIEKEDIESQEIEAQEGEDDTFLTAQDGEEEENEKEGSLAEADHTAHEEMEAHTTVKEAEDDNISVTIQAEDAITLDFDGDDLLETGKNVKITDSEASKPKDGQDAIAQSPEKESKDYEMNANHKDGKKEDCVKGDPVEKEARESSKKAESGDKEKDTLKKGPSSTGASGQAKSSSKESKDSKTSSKDDKGSTSSTSGSSGSSTKNIWVSGLSSNTKAADLKNLFGKYGKVLSAKVVTNARSPGAKCYGIVTMSSSTEVSRCIAHLHRTELHGQLISVEKVKGDPSKKEMKK

SEQ ID NO: 69529 - protein, 892 aa, Homo sapiens
MRNLKLFRTLEFRDIQGPGNPQCFSLRTEQGTVLIGSEHGLIEVDPVSREVKNEVSLVAEGFLPEDGSGRIVGVQDLLDQESVCVATASGDVILCSLSTQQLECVGSVASGISVMSWSPDQELVLLATGQQTLIMMTKDFEPILEQQIHQDDFGESKFITVGWGRKETQFHGSEGRQAAFQMQMHESALPWDDHRPQVTWRGDGQFFAVSVVCPETGARKVRVWNREFALQSTSEPVAGLGPALAWKPSGSLIASTQDKPNQQDIVFFEKNGLLHGHFTLPFLKDEVKVNDLLWNADSSVLAVWLEDLQREESSIPKTCVQLWTVGNYHWYLKQSLSFSTCGKSKIVSLMWDPVTPYRLHVLCQGWHYLAYDWHWTTDRSVGDNSSDLSNVAVIDGNRVLVTVFRQTVVPPPMCTYQLLFPHPVNQVTFLAHPQKSNDLAVLDASNQISVYKCGDCPSADPTVKLGAVGGSGFKVCLRTPHLEKRYKIQFENNEDQDVNPLKLGLLTWIEEDVFLAVSHSEFSPRSVIHHLTAASSEMDEEHGQLNVSSSAAVDGVIISLCCNSKTKSVVLQLADGQIFKYLWESPSLAIKPWKNSGGFPVRFPYPCTQTELAMIGEEECVLGLTDRCRFFINDIEVASNITSFAVYDEFLLLTTHSHTCQCFCLRDASFKTLQAGLSSNHVSHGEVLRKVERGSRIVTVVPQDTKLVLQMPRGNLEVVHHRALVLAQIRKWLDKLMFKEAFECMRKLRINLNLIYDHNPKVFLGNVETFIKQIDSVNHINLFFTELKEEDVTKTMYPAPVTSSVYLSRDPDGNKIDLVCDAMRAVMESINPHKYCLSILTSHVKKTTPELEIVLQKVHELQGRDPLTEKVLKVAVTATSLLQEMLPLILML

SEQ ID NO: 69530 - protein, 179 aa, Homo sapiens
  MOD_RES (1)..(1): Any amino acid
XQFRVIGPRHPIRALVGDEVELPCRISPGKNATGMEVGWYRPPFSRVVHLYRNGKDQDGDQAPEYRGRTELLKDAIGEGKVTLRIRNVRFSDEGGFTCFFRDHSYQEEAAMELKVEDPFYWVSPGVLVLLAVLPVLLLQITVGLVFLCLQYRLRGKLRAEIENLHRTFGQFLEELRNPF

SEQ ID NO: 69531 - protein, 115 aa, Homo sapiens
MFPPSGSTGLIPPSHFQARPLSTLPRMAPTWLSDIPLVQPPGHQDVSERRLDTQRPQVTMWERDVSSDRQEPGRRGRSWGLEGSQALSQQAEVIVRQLQELRRLEEEVRLLRETS

SEQ ID NO: 69532 - protein, 323 aa, Homo sapiens
MKSFLSPPVDEQSPLTFLPRALHVRAAHVAPACTLHVAQVFIWQYLMKRIPQNPRYQHIKSRLDTGNSMTKYTEKLEEIKKISLSPRLECGSAILAHCNLHLPGSIDSHASASGVVGITDYRYKKDELFKRLKVTTFAQLIIQVASLSDQTLEVTAEEIQRLEDNDSAASDPDAETTARTNGKGNPGEQSPSPEQFINNAGAGDSSRSTLQSVISGVGELDLDKGPVKKAEPHTKDKPYPDCPFLLLDVRDRDSYQQCHIVGAYSYPIATLSRTMNPYSNDILEYKNAHGKIIILYDDDERLASQAATTMCERGFENLFMLSG

SEQ ID NO: 69533 - protein, 82 aa, Homo sapiens
MAAVAGSGAAAAPSSLLLVVGSEFGSPGLLTYVLEELERAQGLCVPTLCHLLQHCERPAEPAPPWRQPGDPGPPEPIRQVPV

SEQ ID NO: 69534 - protein, 143 aa, Homo sapiens
MDELVKPENKILDYLTSFSGITKKILNPVTTKLKDVQRQLKALLPPDAVLVGHSLDLDLRALKMIHPYVIDTSLLYVREQGRRFKLKFLAKVILGKDIQCPDRLGHDATEDARTILELARYFLKHGPKKIAELNLEALANHQE

SEQ ID NO: 69535 - protein, 300 aa, Homo sapiens
MEPTENPCQGPLDQLEELEKIFQEDHYPDSDKRREIAQTVGVTPQRIMVWFQNRRAKWRKMEKLNGKESKDNPAAPGPASSQCSSAAEILPAVPMEPKPDPFPQESPLDTFPEPPMLLTSDQTLAPTQPSEGAQRVVTPPLFSPPPVRRADLPFPLGPVHTPQLMPLLMDVAGSDSSHKDGPCGSWGTSITLPPPCSYLEELEPQDYQQSNQPGPFQFSQAPQPPLFQSPQPKLPYLPTFPFSMPSSLTLPPPEDSLFMFPCGPSGGTSQGYCPGASSGQILMQPPAGNIGTASWSDPCL

SEQ ID NO: 69536 - protein, 192 aa, Homo sapiens
MAAEADGPLKRLLVPILLPEKCYDQLFVQWDLLHVPCLKILLSKGLGLGIVAGSLLVKLPQVFKILGAKSAEGLSLQSVMLELVALTGTMVYSITNNFPFSSWGEALFLMLQTITICFLVMHYRGQTVKGAGDLPKSRLCGSWEPCWELSFSRQPPTTTTGTQASSQPSQSSCCLGAPWPESSLPFRKPEIP

SEQ ID NO: 69537 - protein, 113 aa, Homo sapiens
MPSKYRKNIWIKRGDFLIVDPIEEGEKVKAEISFVLCKDHVRSLQKEGFWPEAFSEVAEKHNNRNRQTQPELPAEPQLSGEESSSEDDSDLFVNTNRRQYHESEEESEEEEAA

SEQ ID NO: 69538 - protein, 140 aa, Homo sapiens
MADDDVLFEDVYELCEVIGKGPFSVVRRCINRETGQQFAVKIVDVAKFTSSPGLSTEDLKREASICHMLKHPHIVELLETYSSDGMLYMVFEFMDGADLCFEIVKRADAGFVYSEAVASILDKHSWKQLGDHLNTALSSA

SEQ ID NO: 69539 - protein, 16 aa, Homo sapiens
MYMQDYWRTWLKGLRG

SEQ ID NO: 69540 - protein, 1234 aa, Homo sapiens
MANGGGGGGGSSGGGGGGGGSSLRMSSNIHANHLSLDASSSSSSSSSSSSSSSSSSSSSSVHEPKMDALIIPVTMEVPCDSRGQRMWWAFLASSMVTFFGGLFIILLWRTLKYLWTVCCHCGGKTKEAQKINNGSSQADGTLKPVDEKEEAVAAEVGWMTSVKDWAGVMISAQTLTGRVLVVLVFALSIGALVIYFIDSSNPIESCQNFYKDFTLQIDMAFNVFFLLYFGLRFIAANDKLWFWLEVNSVVDFFTVPPVFVSVYLNRSWLGLRFLRALRLIQFSEILQFLNILKTSNSIKLVNLLSIFISTWLTAAGFIHLVENSGDPWENFQNNQALTYWECVYLLMVTMSTVGYGDVYAKTTLGRLFMVFFILGGLAMFASYVPEIIELIGNRKKYGGSYSAVSGRKHIVVCGHITLESVSNFLKDFLHKDRDDVNVEIVFLHNISPNLELEALFKRHFTQVEFYQGSVLNPHDLARVKIESADACLILANKYCADPDAEDASNIMRVISIKNYHPKIRIITQMLQYHNKAHLLNIPSWNWKEGDDAICLAELKLGFIAQSCLAQGLSTMLANLFSMRSFIKIEEDTWQKYYLEGVSNEMYTEYLSSAFVGLSFPTVCELCFVKLKLLMIAIEYKSANRESRSRKRILINPGNHLKIQEGTLGFFIASDAKEVKRAFFYCKACHDDITDPKRIKKCGCKRLEDEQPSTLSPKKKQRNGGMRNSPNTSPKLMRHDPLLIPGNDQIDNMDSNVKKYDSTGMFHWCAPKEIEKVILTRSEAAMTVLSGHVVVCIFGDVSSALIGLRNLVMPLRASNFHYHELKHIVFVGSIEYLKREWETLHNFPKVSILPGTPLSRADLRAVNINLCDMCVILSANQNNIDDTSLQDKECILASLNIKSMQFDDSIGVLQANSQGFTPPGMDRSSPDNSPVHGMLRQPSITTGVNIPIITELVNDTNVQFLDQDDDDDPDTELYLTQPFACGTAFAVSVLDSLMSATYFNDNILTLIRTLVTGGATPELEALIAEENALRGGYSTPQTLANRDRCRVAQLALLDGPFADLGDGGCYGDLFCKALKTYNMLCFGIYRLRDAHLSTPSQCTKRYVITNPPYEFELVPTDLIFCLMQFDHNAGQSRASLSHSSHSSQSSSKKSSSVHSIPSTANRQNRPKSRESRDKQNATRMNRMGQEKKWFTDEPDNAYPRNIQIKPMSTHMANQINQYKSTSSLIPPIREVEDEC

SEQ ID NO: 69541 - protein, 259 aa, Homo sapiens
  MOD_RES (1)..(1): Any amino acid
XFTAQAPSGRGAAVGSGTRLASLRLLTELESPAWWPFSSKLWKTPPETKPREDVSMTSCEPFGKEGILIKIPAVISHRTESHVKPGRLTVLVSGLEIHDSSSLLMHRFEREDVDDIKVHSPYEISIRQRFIGKPDMAYRLISAKMPEVIPILEVQFSKKMELLEDALVLRSARTSSPAEKSCSVWHAASGLMGRTLHREPPAGDQEGTALHLQTSLPALSEADTQELTQGFRPMSLSTQTVLVMLCSESAGALWRQRLS

SEQ ID NO: 69542 - protein, 451 aa, Homo sapiens
MSLHFLYYCSEPTLDVKIAFCQGFDKQVDVSYIAKHYNMSKSKVDNQFYSVEVGDSTFTVLKRYQNLKPIGSGAQGIVCAAYDAVLDRNVAIKKLSRPFQNQTHAKRAYRELVLMKCVNHKNIISLLNVFTPQKTLEEFQDVYLVMELMDANLCQVIQMELDHERMSYLLYQMLCGIKHLHSAGIIHRDLKPSNIVVKSDCTLKILDFGLARTAGTSFMMTPYVVTRYYRAPEVILGMGYKENVDIWSVGCIMGEMVRHKILFPGRDYIDQWNKVIEQLGTPCPEFMKKLQPTVRNYVENRPKYAGLTFPKLFPDSLFPADSEHNKLKASQARDLLSKMLVIDPAKRISVDDALQHPYINVWYDPAEVEAPPPQIYDKQLDEREHTIEEWKELIYKEVMNSEEKTKNGVVKGQPSPSERRDISHIDWTTEHNDHIQFSSILFKRFSQTAWQ

SEQ ID NO: 69543 - protein, 140 aa, Homo sapiens
MYPQGRHPTPLQSGQPFKFSILEICDRIKEEFQFLQAQYHSLKLECEKLASEKTEMQRHYVMYYEMSYGLNIEMHKQAEIVKRLSGICAQIIPFLTQESASPSPPESLVEEERPSGPGGGGKQRADEKEPSGPYESDEDK

SEQ ID NO: 69544 - protein, 102 aa, Homo sapiens
MAMRELVEAECGGANPLMKLAGHFTQDKALRQEGLRPGPWPPGAPASEAASKPLGVASEDELVAEFLQDQNAPLVSRAPQTFKMDDLLAEMQQIEQSNFRQA

SEQ ID NO: 69545 - protein, 216 aa, Homo sapiens
  MOD_RES (1)..(1): Any amino acid
XGQSVWRGRRTPSSPCWPPGPVLAEPSGGWDRAPTMGNAQERPSETIDRERKRLVETLQADSGLLLDALLARGVLTGPEYEALDALPDAERRATGTAAMTLHAQATGRRRHPARGPHAPGCPELQTLTRPGALRAPRRCNPGPRRSQSQSWKLRPLKRLNRSRSQSQSWNPRLKQNQSRNWSQNRTQSPSPTSRKGTSPKIPEGQSSDRRCPAHAG

SEQ ID NO: 69546 - protein, 1191 aa, Homo sapiens
MLVGQGAGPLGPAVVTAAVVLLLSGVGPAHGSEDIVVGCGGFVKSDVEINYSLIEIKLYTKHGTLKYQTDCAPNNGYFMIPLYDKGDFILKIEPPLGWSFEPTTVELHVDGVSDICTKGGDINFVFTGFSVNGKVLSKGQPLGPAGVQVSLRNTGTEAKIQSTVTQPGGKFAFFKVLPGDYEILATHPTWALKEASTTVRVTNSNANAASPLIVAGYNVSGSVRSDGEPMKGVKFLLFSSLVTKEDVLGCNVSPVPGFQPQDESLVYLCYTVSREDGSFSFYSLPSGGYTVIPFYRGERITFDVAPSRLDFTVEHDSLKIEPVFHVMGFSVTGRVLNGPEGDGVPEAVVTLNNQIKVKTKADGSFRLENITTGTYTIHAQKEHLYFETVTIKIAPNTPQLADIVATGFSVCGQISIIRFPDTVKQMNKYKVVLSSQDKDKSLVTVETDAHGSFCFKANPGTYKVQVMVPEAETRAGLTLKPQTFPLTVTDRPVMDVAFVQFLASVSGKVSCLDTCGDLLVTLQSLSRQGEKRSLQLSGKVNAMTFTFDNVLPGKYKISIMHEDWCWKNKSLEVEVLEDDVSAVEFRQTGYMLRCSLSHAITLEFYQDGNGRENVGIYNLSKGVNRFCLSKPGVYKVTPRSCHRFEQAFYTYDTSSPSILTLTAIRHHVLGTITTDKMMDVTVTIKSSIDSEPALVLGPLKSVQELRREQQLAEIEARRQEREKNGNEEGEERMTKPPVQEMVDELQGPFSYDFSYWARSGEKITVTPSSKELLFYPPSMEAVVSGESCPGKLIEIHGKAGLFLEGQIHPELEGVEIVISEKGASSPLITVFTDDKGAYSVGPLHSDLEYTVTSQKEGYVLTAVEGTIGDFKAYALAGVSFEIKAEDDQPLPGVLLSLSGGLFRSNLLTQDNGILTFSNLSPGQYYFKPMMKEFRFEPSSQMIEVQEGQNLKITITGYRTAYSCYGTVSSLNGEPEQGVAMEAVGQNDCSIYGEDTVTDEEGKFRLRGLLPGCVYHVQLKAEGNDHIERALPHHRVIEVGNNDIDDVNIIVFRQINQFDLSGNVITSSEYLPTLWVKLYKSENLDNPIQTVSLGQSLFFHFPPLLRDGENYVVLLDSTLPRSQYDYILPQVSFTAVGYHKHITLIFNPTLIPLLLQLTSRLQGVGALGQAASDNSGPEDAKRQAKKQKTRRT

SEQ ID NO: 69547 - protein, 154 aa, Homo sapiens
MSSRKLSGPKGRRLSEKKRKPAWTDRILWRLKRQPCAGPDTPIPPASHFSLSLRGYSSHMTYGISDHKPVSGTFDLELKPLVSAPLIVLMPEDLWTVENDMMVSYSSTSDFPSSPWDWIGLYKVGLRDVNDYVSYAWVGDSKVSCSDNLNQVYI

SEQ ID NO: 69548 - protein, 88 aa, Homo sapiens
MAFSDLTSRTVHLYDNWIKDADPRVEDWLLMSSPLPQTILLGFYVYFVTSLGPKLMENRKPFELKKAMITYNFFIVLFSVYMCYEILF

SEQ ID NO: 69549 - protein, 176 aa, Homo sapiens
MSRDAVKFGRMSKKQRDSLHAEVQKQLQQRQQQQQEPVVKTPPAGAQGADTLTYTLGLPDGQLPLGSSPDLPEASACPPGLLKASGSGPSYSNNLAKAGLNGASCHLEYSPERGKAEGRESFYSTGSQLTPDRCGLRFEEHRHPGLGELGQGPDSYGSPSFRSTPEAPYASLTEIE

SEQ ID NO: 69550 - protein, 150 aa, Homo sapiens
MTKDNNLLGKFELTGIPPAPRGVPQIEVTFDIDANGILNVSAVDKSTGKENKITITNDKGRLSKEDIERMVQEAEKYKAEDEKQRDKVSSKNSLESYAFNMKATVEDEKLQGKINDEDKQKILDKCNEIINWLDKNQTAEKEEFEHQQKE

SEQ ID NO: 69551 - protein, 398 aa, Homo sapiens
YDCIKYDVQHNGSLKLENTMELYRLSKALADIVIPQEYGITKAEKLEIAKGYCTPLVRKIRSDLQRTQDDDTVNKLHPVYSRGVLSPERHVRTRLYFTSESHVHSLLSILRYGALCNESKDEQWKRAMDYLNVVNELNYMTQIVIMLYEDPNKDLSSEERFHVELHFSPGAKGCEEDKNLPSGYGYRPASRENEGRRPFKIDNDDEPHTSKRDEVDRAVILFKPMVSEPIHIHRKSPLPRSRKTATNDVVSENANYLRTPRTLVEQKQNPTVGFELYSMVPSICPLETLHNALSLKQVDEFLASIASPSSDVPRKTAEISSTALRSSPIMRKKVSLNTYTPAKILPTPPATLKSTKASSKPATSGPSSAVVPNTSSRKKNITSKTETHEHKKNTGKKK

SEQ ID NO: 69552 - protein, 83 aa, Homo sapiens
MRLFLSLPVLVVVLSIVLEGPAPAQGTPDVSSALDKLKEFGNTLEDKARELISRIKQSELSAKMREDDISPCCPGWSRTPDLK

SEQ ID NO: 69553 - protein, 335 aa, Homo sapiens
MNGTRNWCTLVDVHPEDQAAAGRKTYAMVSSHSAGHSLASELVESHDGHEEIIKVYLKGRSGDKMIHEKNINQLKSEVQYIQEVVLEKPNGFSQSPTALYSSPPEVDTCINEDVESLRKTVQDLLAKLQEAKRQHQSDCVAFEVTLSRYQREAEQSNVALQREEDRVEQKEAEVGELQRRLLGMETEHQALLAKVREGEVALEELRSNNADCQAEREKAATLEKEVAGLREKIHHLDDMLKSQQRKVRQMIEQLQNSKAVIQSKDATIQELKEKIAYLEAENLEMHDRMEHLIEKQISHGNFSTQARAKTENPGSIRISKPPSPKPMPVIRVVET

SEQ ID NO: 69554 - protein, 92 aa, Homo sapiens
MAVWLAQWLGPLLLVSLWGLLAPASLLRRLGEHIQQFQESSAQGLGLSLGPGAAALPKVGWLEQLLDPFNVSDRRSFLQAIPQPWPQPGAPW

SEQ ID NO: 69555 - protein, 55 aa, Homo sapiens
MGWVCLPVSLGGDLVSSSRAISGHLYLPSTSPDPEAWGQGGEVRCQQWKDSANNM

SEQ ID NO: 69556 - protein, 1537 aa, Homo sapiens
MEKKLLIKSKELQDSQDKCHKMEQEMTRLHRRVSEVEAVLSQKEVELKASETQRSLLEQDLATYITECSSLKRSLEQARMEVSQEDDKALQLLHDIREQSRKLQEIKEQEYQAQVEEMRLMMNQLEEDLVSARRRSDLYESELRESRLAAEEFKRKATECQHKLLKAKDQGKPEVGEYAKLEKINAEQQLKIQELQEKLEKAVKASTEATELLQNIRQAKERAERELEKLQNREDSSEGIRKKLVEAEERRHSLENKVKRLETMERRENRLKDDIQTKSQQIQQMADKILELEEKHREAQVSAQHLEVHLKQKEQHYEEKIKVLDNQIKKDLADKETLENMMQRHEEEAHEKGKILSEQKAMINAMDSKIRSLEQRIVELSEANKLAANSSLFTQRNMKAQEEMISELRQQKFYLETQAGKLEAQNRKLEEQLEKISHQDHSDKNRLLELETRLREVSLEHEEQKLELKRQLTELQLSLQERESQLTALQAARAALESQLRQAKTELEETTAEAEEEIQALTAHRDEIQRKFDALRNSCTVITDLEEQLNQLTEDNAELNNQNFYLSKQLDEASGANDEIVQLRSEVDHLRREITEREMQLTSQKQTMEALKTTCTMLEEQVMDLEALNDELLEKERQWEAWRSVLGDEKSQFECRVRELQRMLDTEKQSRARADQRITESRQVVELAVKEHKAEILALQQALKEQKLKAESLSDKLNDLEKKHAMLEMNARSLQQKLETERELKQRLLEEQAKLQQQMDLQKNHIFRLTQGLQEALDRADLLKTERSDLEYQLENIQVLYSHEKVKMEGTISQQTKLIDFLQAKMDQPAKKKKVPLQYNELKLALEKEKARCAELEEALQKTRIELRSAREEAAHRKATDHPHPSTPATARQQIAMSAIVRSPEHQPSAMSLLAPPSSRRKESSTPEEFSRRLKERMHHNIPHRFNVGLNMRATKCAVCLDTVHFGRQASKCLECQVMCHPKCSTCLPATCGLPAEYATHFTEAFCRDKMNSPGLQTKEPSSSLHLEGWMKVPRNNKRGQQGWDRKYIVLEGSKVLIYDNERWVTALESVVAGGRVSREKAEADAKLLGNSLLKLEGDDRLDMNCTLPFSDQVVLVGTEEGLYALNVLKNSLTHVPGIGAVFQIYIIKDLEKLLMIAGEERALCLVDVKKVKQSLAQSHLPAQPDISPNIFEAVKGCHLFGAGKIENGLCICAAMPSKVVILRYNENLSKYCIRKEIETSEPCSCIHFTNYSILIGTNKFYEIDMKQYTLEEFLDKNDHSLAPAVFAASSNSFPVSIVQVNSAGQREEYLLCFHEFGVFVDSYGRRSRTDDLKWSRLPLAFAYREPYLFVTHFNSLEVIEIQARSSAGTPARAYLDIPNPRYLGPAISSGAIYLASSYQDKLRVICCKGNLVKESGTEHHRGPSTSRSSPNKRGPPTYNEHITKRVASSPAPPEGPSHPREPSTPHRYREGRTELRRDKSPGRPLEREKSPGRMLSTRRERSPGRLFEDSSRGRLPAGAVRTPLSQVNKVWDQSSV

SEQ ID NO: 69557 - protein, 326 aa, Homo sapiens
MEQSRSQQRGGEQSWWGSDPQYQYMPFEHCTSYGLPSENGGLQHRLRKDAGPRHNVHPTQIYGHHKEQFSDREQDIGMPKKTGSSSTVDSKDEDHYSKCQDCIHRLGQVVRRKLGEDGIFLVLLGLLMALVSWSMDYVSAKSLQAYKWSYAQMQPSLPLQFLVWVTFPLVLILFSALFCHLISPQAVGSGIPEMKTILRGVVLKEYLTMKAFVAKVVALTAGLGSGIPVGKEGPFVHIASICAAVLSKFMSVFCGVYETVPGQLDLLVSACAVGVGCCFAAPVGGVLFSIEVTSTYFAVRNYWRGFFAATFSAFVFRVLAVWNKDA

SEQ ID NO: 69558 - protein, 130 aa, Homo sapiens
MAEPSAATQSHSISSSSFGAEPSAPGGGGSPGACPALGTKSCSSSCAAGVHCDRPSIPASFPEHPAFLSKKIGQVEEQIDKETKNPNGVSSREAKTALDADDRFTLLTAQKPPTEYSKVEGIYTYSLSPS

SEQ ID NO: 69559 - protein, 846 aa, Homo sapiens
MPKAPKQQPPEPEWIGDGESTSPSDKVVKKGKKDKKIKKTFFEELAVEDKQAGEEEKVLKEKEQQQQQQQQQQQKKKRDTRKGRRKKDVDDDGEEKELMERLKKLSVPTSDEEDEVPAPKPRGGKKTKGGNVFAALIQDQSEEEEEEEKHPPKPAKPEKNRINKAVSEEQQPALKGKKGKEEKSKGKAKPQNKFAALDNEEEDKEEEIIKEKEPPKQGKEKAKKAEQGSEEEGEGEEEEEEGGESKADDPYAHLSKKEKKKLKKQMEYERQVASLKAANAAENDFSVSQAEMSSRQAMLENASDIKLEKFSISAHGKELFVNADLYIVAGRRYGLVGPNGKGKTTLLKHIANRALSIPPNIDVLLCEQEVVADETPAVQAVLRADTKRLKLLEEERRLQGQLEQGDDTAAERLEKVYEELRATGAAAAEAKARRILAGLGFDPEMQNRPTQKFSGGWRMRVSLARALFMEPTLLMLDEPTNHLDLNAVIWLNNYLQGWRKTLLIVSHDQGFLDDVCTDIIHLDAQRLHYYRGNYMTFKKMYQQKQKELLKQYEKQEKKLKELKAGGKSTKQAEKQTKEALTRKQQKCRRKNQDEESQEAPELLKRPKEYTVRFTFPDPPPLSPPVLGLHGVTFGYQGQKPLFKNLDFGIDMDSRICIVGPNGVGKSTLLLLLTGKLTPTHGEMRKNHRLKIGFFNQQYAEQLRMEETPTEYLQRGFNLPYQDARKCLGRFGLESHAHTIQICKLSGGQKARVVFAELACREPDVLILDEPTNNLDIESIDALGEAINEYKGAVIVVSHDARLITETNCQLWVVEEQSVSQIDGDFEDYKREVLEALGEVMVSRPRE

SEQ ID NO: 69560 - protein, 160 aa, Homo sapiens
MAADISESSGADCKGDPRNSAKLDADYPLRVLYCGVCSLPTEYCEYMPDVAKCRQWLEKNFPNEFAKLTVENSPKQEAGISEGQGTAGEEEEKKKQKRGGRGQIKQKKKTVPQKVTIAKIPRAKKKYVTRVCGLATFEIDLKEAQRFFAQKFSCGASPPK

SEQ ID NO: 69561 - protein, 98 aa, Homo sapiens
MTTPNKGNKALKVKREPGENGTSLTDEELVTMSVRELNQHLRGLSKEEIVQLKQRRRTLKNRGYAASCRVKRVTQKEELEKQKAELQQEVEKLASENA

SEQ ID NO: 69562 - protein, 173 aa, Homo sapiens
  MOD_RES (1)..(1): Any amino acid
XLTGWLGTVVSTLMALLLSQDRSLIASGLYGYNATLVGVLMAVFSDKGDYFWWLLLPVCAMSMTCPIFSSALNSMLSKWDLPVFTLPFNMALSMYLSATGHYNPFFPAKLVIPITTAPNISWSDLSALEPCSRPILESAWQTLWLRERVKEELWGKKSKHNQRSSAVKNLGCG

SEQ ID NO: 69563 - protein, 106 aa, Homo sapiens
MGLLLPFSDCFREPCNQNAQTNAASFDQDQLYTWAAVSQPTHSLDYSEGQFPRRVPSMGPPSKPPDEEHRLEDAETESQSAVSETPQKRSDAVQKRLQYFTYLGKN

SEQ ID NO: 69564 - protein, 78 aa, Homo sapiens
MWLGTSGKSGLPGHCLENPLQECHPAQLEEWALKGISRPSVISQPEQKEEPWVLPLQNFEARKIPRESHTDCEHQVAK

SEQ ID NO: 69565 - protein, 49 aa, Homo sapiens
AVVVPSGQEQRYTCHMQHEGLQEPLTLSWGGKGGSCSQAACSNSAQGSD

SEQ ID NO: 69566 - protein, 626 aa, Homo sapiens
MEGKWLLCMLLVLGTAIVEAHDGHDDDVIDIEDDLDDVIEEVEDSKPDTTAPPSSPKVTYKAPVPTGEVYFADSFDRGTLSGWILSKAKKDDTDDEIAKYDGKWEVEEMKESKLPGDKGLVLMSRAKHHAISAKLNKPFLFDTKPLIVQYEVNFQNGIECGGAYVKLLSKTPELNLDQFHDKTPYTIMFGPDKCGEDYKLHFIFRHKNPKTGIYEEKHAKRPDADLKTYFTDKKTHLYTLKSRGTNHLCFVHKEMGVSFPKTPGARHCSYPKASVLNPDNSFEILVDQSVVNSGNLLNDMTPPVNPSREIEDPEDRKPEDWDERPKIPDPEAVKPDDWDEDAPAKIPDEEATKPEGWLDDEPEYVPDPDAEKPEDWDEDMDGEWEAPQIANPRCESAPGCGVWQRPVIDNPNYKGKWKPPMIDNPSYQGIWKPRKIPNPDFFEDLEPFRMTPFSAIGLELWSMTSDIFFDNFIICADRRIVDDWANDGWGLKKAADGAAEPGVVGQMIEAAEERPWLWVVYILTVALPVFLVILFCCSGKKQTSGMEYKKTDAPQPDVKEEEEEKEEEKDKGDEEEEGEEKLEEKQKSDAEEDGGTVSQEEEDRKPKAEEDEILNRSPRNRKPRRE

SEQ ID NO: 69567 - protein, 80 aa, Homo sapiens
NVLWRFKFSQLKGSSDDGKTRVKLLFQNLDTKQIEMKELEFQDLRAVLHCIHSFIAAKVASVDPGFMDSQSLARKYMYSS

SEQ ID NO: 69568 - protein, 251 aa, Homo sapiens
MSFAEIKHKYLWSEPQNCSATKSNYLRGTGPYPPSVDWRKKGNFVSPVKNQGACGSCWTFSTTGALESAIAIATGKMLSLAEQQLVDCAQDFNNHGCQGGLPSQAFEYILYNKGIMGEDTYPYQGKDGYCKFQPGKAIGFVKDVANITIYDEEAMVEAVALYNPVSFAFEVTQDFMMYRTGIYSSTSCHKTPDKVNHAVLAVGYGEKNGIPYWIVKNSWGPQWGMNGYFLIERGKNMCGLAACASYPIPLV

SEQ ID NO: 69569 - protein, 249 aa, Homo sapiens
MAEQEPTAEQLAQIAAENEEDEHSVNYKPPAQKSIQEIQELDKDDESLRKYKEALLGRVAVSADPNVPNVVVTGLTLVCSSAPGPLELDLTGDLESFKKQSFVLKEGVEYRIKISFRVNREIVSGMKYIQHTYRKGVKIDKTDYMTTTRPTTCPGSGISPSRRTGRTEPSQRRAGQTDGRTTDRRMCPPQPLPSPYQSADRPSVPLPPWSASLAWLNRVPPTPLLSPPPPTGPASSVSCLVAASACAVG

SEQ ID NO: 69570 - protein, 70 aa, Homo sapiens
MDQTTGEPQCEVARRKLQEIEDRIIDEDEEVEADRNVNHLPSLVLSDTMKTGLKREFDEVFTKKMIESMS

SEQ ID NO: 69571 - protein, 113 aa, Homo sapiens
MIGSGHLQSLQRLIDSQMETSCQITFEFVDQEQLKDPVCYLKKAFLLVQDIMEDTMRFRDNTPNAIAIVQLQELSLRLKSCFTKDYEEHDKACVRTFYETPLQLLEKVKNVFN

SEQ ID NO: 69572 - protein, 61 aa, Homo sapiens
MENPSPAAALGKALCALLLATLGAAGQPLGGESICSARALAKYSITFTGKWSQTAFPKQYP

SEQ ID NO: 69573 - protein, 616 aa, Homo sapiens
MGDILAHESELLGLVKEYLDFAEFEDTLKTFSKECKIKGKPLCKTVGGSFRDSKSLTIQKDLVAAFDNGDQKVFFDLWEEHISSSIRDGDSFAQKLEFYLHIHFAIYLLKYSVGRPDKEELDEKISYFKTYLETKGAALSQTTEFLPFYALPFVPNPMVHPSFKELFQDSWTPELKLKLIKFLALISKASNTPKLLTIYKENGQSNKEILQQLHQQLVEAERRSVTYLKRYNKIQADYHNLIGVTAELVDSLEATVSGKMITPEYLQSVCVRLFSNQMRQSLAHSVDFTRPGTRLTTSHPGEQRETVLQAYISNDLLDCYSHNQRSVLQLLHSTSDVVRQYMARLINAFASLAEGRLYLAQNTKVLQMLEGRLKEEDKDIITRENVLGALQKFSLRRPLQTAMIQDGLIFWLVDVLKDPDCLSDYTLEYSVALLMNLCLRSTGKNMCAKVAGLVLKVLSDLLGHENHEIQPYVNGALYSILSVPSIREEARAMGMEDILRCFIKEGNAEMIRQIEFIIKQLNSEELPDGVLESDDDEDEDDEEDHDIMEADLDKDELIQPQLGELSGEKLLTTEYLGIMTNTGKTRRKGLANVQWSGDEPLQRPVTPGGHRNGYPV

SEQ ID NO: 69574 - protein, 325 aa, Homo sapiens [sequence omitted]

SEQ ID NO: 69575 - protein, 158 aa, Homo sapiens
MGIRNESFMKLAAVGTWMGDFVTAWMVTDMMLQDKPYPDWGKSARAFWKKGNVRITLFWTVLFTLTSVVVLVITTDWISWDKLNRGFLPSDEVSRAFLASFILVFDLLIVMQDWEFPHFMGDVDVNLPGLHTPHMQFKIPFFQKIFKEEYRIHITGKW

SEQ ID NO: 69576 - protein, 81 aa, Homo sapiens
  MOD_RES (1)..(1): Any amino acid
XGFGGSRGGGGYGGSGDGYNGFGNDGRSLLLVLSALKNRNSSVQVRGRKERPCEDLYLSHCTSLSLPCSLHELFCSSNSIL

SEQ ID NO: 69577 - protein, 266 aa, Homo sapiens
MVVVAAAPNPADGTPKVLLLSGQPASAAGAPAGQALPLMVPAQRGASPEAASGGLPQARKRQRLTHLSPEEKALRRKLKNRVAAQTARDRKKARMSELEQQVVDLEEEVKLLKNQKLLLENQLLREKTHGLVVENQELRQRLGMDALVAEEEAEAKGNEVRPVAGSAESAALRLRAPLQQVQAQLSPLQNISPWILAVLTLQIQSLISCWAFWTTWTQSCSSNALPQSLPAWRSSQRSTQKDPVPYQPPFLCQWGRHQPSWKPLMN

SEQ ID NO: 69578 - protein, 116 aa, Homo sapiens
MKHLWFFLLLVAAPRWVLSQLQLQESGPGLVKPSQTLSLTCTVSGGSISSGDYYWSWIRQPPGKGLEWIGYIYYSGSTYYNPSLKSRVTISVDTSKNQFSLKLSSVTAADTAVYYC

SEQ ID NO: 69579 - protein, 1348 aa, Homo sapiens
MVIKTDELPAAAPADSAREHGSQAGGKGRPGAAELPSVMLLNGDCPESLKKEAAAAEPPRENGLDEAGPGDETTGQEVIVIQDTGFSVKILAPGIEPFSLQVSPQEMVQEIHQVLMDREDTCHRTCFSLHLDGNVLDHFSELRSVEGLQEGSVLRVVEEPYTVREARIHVRHVRDLLKSLDPSDAFNGVDCNSLSFLSVFTDGDLGDSGKRKKGLEMDPIDCTPPEYILPGSRERPLCPLQPQNRDWKPLQCLKVLTMSGWNPPPGNRKMHGDLMYLFVITAEDRQVSITASTRGFYLNQSTAYHFNPKPASPRFLSHSLVELLNQISPTFKKNFAVLQKKRVQRHPFERIATPFQVYSWTAPQAEHAMDCVRAEDAYTSRLGYEEHIPGQTRDWNEELQTTRELPRKNLPERLLRERAIFKVHSDFTAAATRGAMAVIDGNVMAINPSEETKMQMFIWNNIFFSLGFDVRDHYKDFGGDVAAYVAPTNDLNGVRTYNAVDVEGLYTLGTVVVDYRGYRVTAQSIIPGILERDQEQSVIYGSIDFGKTVVSHPRYLELLERTSRPLKILRHQVLNDRDEEVELCSSVECKGIIGNDGRHYILDLLRTFPPDLNFLPVPGEELPEECARAGFPRAHRHKLCCLRQELVDAFVEHRYLLFMKLAALQLMQQNASQLETPSSLENGGPSSLESKSEDPPGQEAGSEEEGSSASGLAKVKELAETIAADDGTADPRSREVIRNACKAVGSISSTAFDIRFNPDIFSPGVRFPESCQDEVRDQKQLLKDAAAFLLSCQIPGLVKDCMEHAVLPVDGATLAEVMRQRGINMRYLGKVLELVLRSPARHQLDHVFKIGIGELITRSAKHIFKTYLQGVELSGLSAAISHFLNCFLSSYPNPVAHLPADELVSKKRNKRRKNRPPGAADNTAWAVMTPQELWKNICQEAKNYFDFDLECETVDQAVETYGLQKITLLREISLKTGIQVLLKEYSFDSRHKPAFTEEDVLNIFPVVKHVNPKASDAFHFFQSGQAKVQQGFLKEGCELINEALNLFNNVYGAMHVETCACLRLLARLHYIMGDYAEALSNQQKAVLMSERVMGTEHPNTIQEYMHLALYCFASSQLSTALSLLYRARYLMLLVFGEDHPEMALLDNNIGLVLHGVMEYDLSLRFLENALAVSTKYHGPKALKVALSHHLVARVYESKAEFRSALQHEKEGYTIYKTQLGEDHEKTKESSEYLKCLTQQAVALQRTMNEIYRNGSSANIPPLKFTAPSMASVLEQLNVINGILFIPLSQKDLENLKAEVARRHQLQEASRNRDRAEEPMATEPAPAGAPGDLGSQPPAAKDPSPSVQG

SEQ ID NO: 69580 - protein, 161 aa, Homo sapiens
MAAAAVARLWWRGILGASALTRGTGRPSVLLLPVRRESAGADTRPTVRPRNDVAHKQLSAFGEYVAEILPKYVQQVQVSCFNELEVCIHPDGVIPVLTFLRDHTNAQFKSLVDLTAVDVPTRQNRFETESCSVARLECSGMILAHCNLRLPGSSDSPASAP

SEQ ID NO: 69581 - protein, 138 aa, Homo sapiens
MSTKQEARRDEGEARTRGQEAQLRDRAHLSQQRRLKQATQFLHKDSADLLPLDSLKRLGTSKDLQPRSVIQRRLVEGNPNWLQGEPPRMQDLIHGQESRRKTSRTEIPALLVNCKCQDQLLRVAVDTGTQYNRISAGC

SEQ ID NO: 69582 - protein, 119 aa, Homo sapiens
MALPQGLLTFRDVAIEFSQEEWKCLDPAQRTLYRDVMLENYRNLVSLGSCCAVEVGLDLLGSRHPPRPPKKLGLQAPTPVPNYWLLFLNFLHMCVLRANMSLLWTTSSWFLLIESVFAF

SEQ ID NO: 69583 - protein, 43 aa, Homo sapiens
MAVAGAVSGEPLVHWCTQQLRKTFGLDVSEEIIQEMKAKKVNS

SEQ ID NO: 69584 - protein, 81 aa, Homo sapiens
  MOD_RES (1)..(1): Any amino acid
XIGDEVRALHDTGKFTDGQLVSQKSDSSKDIRGDKITWIEGKEPGCETIGLLMSSMDDLIRHCNGKLGSYKINGRTKVKKV

SEQ ID NO: 69585 - protein, 142 aa, Homo sapiens
FDSYLVQIFGSSSPQPGFGMSGEELSESTPEPQKEISESLSVTRDQDEDDKAPEPTWADDLPATTSSEATTTPRPLLSTPVDGAEDPRCLEALKPGNCGEYVVRWYYDKQVNSCARFWFSGCNGSGNRFNSEKECQETCIQG

SEQ ID NO: 69586 - protein, 848 aa, Homo sapiens
  MOD_RES (1)..(1): Any amino acid
XENEEVAPPATFSRAHETKEPWPTDSQLLAGKVRATGRTARGKEENQVWLGNALLLQGGSLEDKGLEEEDEMPHQEASGLGCRGAPEEPDSQEHESKEMLFFAGETGLPLFPRFALSVEGAEPTDHGHPQAVSKGHNRCALTIDELAQDVEACFQQLSTLQPGSRGWQCSASACRGENWSFAQKWHSGWERAHSQQVWGNWGICSNEEAKSKESGEGDKPGKTTALGTSEVPGNPGTLPHWDEASPNPPQGPAEPWGALERVRSRFHQLISGLKKQRSQILHDNTKLHGDQERFHERVCALEREREREVTKISRLERDNHRLVGDISQLKKELDQYLQAISDLEDCNGKSYCKILELEEENETLKGNLGQLQKATSESVRKSKDTMEQVTLENWKLQTLISELGVSYKELIKDIVLGIEDMIRALSGENEHLLRRVHVLEREVTLQRSTDQGRLVRGREHLQGKAKMHALDKEVQVTPLTGQLLSRACGPPLEEEMSLAAGQTGPSTGTGNSRRGADSPPPSLVWRNTGVANALQGNVSGAEVKEAHLEKEEKRPRCSVAQGQALSSLSNGPMLRDSEAEVTEEDPRLRAQQLHHRVLTLQCQLRDQGAAHQASLDEATRLQEELQAKLEELQKKQHEAKLAVTPLKAKIASLVRKCRERNRLITHLLQELHRHGLGNLLLSELAQNMLNDVALAEYTATFLAPGVPETSHHLDVKSEMTAALRAQTYLLNPEMDSVLQSSLSSESWPIPEPEWPAQTAQLDSLKLPLSLVSTLDPGTCLAAVTVEPGLPAQRLQEKGGMPCPALQVDNVPAPSELLSPARILAFHQELRQSICSNSQVHKSPLELEM

SEQ ID NO: 69587 - protein, 86 aa, Homo sapiens
MQGSKRILRSHEIVLPPSGQVETDLALTFSLQYPHFLKREGNKLQIMLQRRKRYKNRTILGYKTLAAGSISMAEVMQHPSEGGQVL

SEQ ID NO: 69588 - protein, 124 aa, Homo sapiens
QYSRLSGGGHYNSFSPDLALDSPGTDHFVIIAQLKEEVATLKKMLHQKDQMILEKEKKITELKADFQYQESQMRAKMNQMEKTHKEVTEQLQRWALAILPGLVLNSWLQAILPPQPHKVLGLQA

SEQ ID NO: 69589 - protein, 164 aa, Homo sapiens
MAVGKFLLGSLLLLSLQLGQGWGPDARGVPVADGEFSSEQVAKAGGTWLGKDFQGPSVTSQLSPALTLLTVSALPSHRHPPPPCPPAPSPVWSMPAVEPDPVRGRARPGLRLRGEGHLPLLRRQLPPWCPHPAWPGAGPAAGPGPSPRRALLPAHSLHRRGLPR

SEQ ID NO: 69590 - protein, 151 aa, Homo sapiens
MDDDIAALVVDNGSGMCKAGFAGDDAPRAVFPSIVGRPRHQGVMVGMGQKDSYVGDEAQSKRGILTLKYPIEHGIVTNWDDMEKIWHHTFYNELRVAPEEHPVLLTEAPLNPKANREKMTQVSGPPSTPQPCTLLSRLCYPCTPLAVPLAS

SEQ ID NO: 69591 - protein, 64 aa, Homo sapiens
MRLKISLLKEPKHQELVSCVGWTTAEELYSCSDDHQIVKWNLLTSETTQIVKLPDDIYPIDFHW

SEQ ID NO: 69592 - protein, 176 aa, Homo sapiens
MNESKPGDSQNLACVFCRKHDDCPNKYGEKKTKEKWNLTVHYYCLLMSSGIWQRGKEEEGVYGFLIEDIRKEVNRASKLKCCVCKKNGASIGCVAPRCKRSYHFPCGLQRECIFQFTGNFASFCWDHRPVQIITSNNYRESLPCTICLEFIEPIPSYNILRSPCCKNAWFHRDCLQ

SEQ ID NO: 69593 - protein, 65 aa, Homo sapiens
MGCDRNCGLIAGAVIGAVLAVFGGILMPVGDLLIQKTIKKQVVLEEGTIAFKNWVKTGTEVYRQF

SEQ ID NO: 69594 - protein, 256 aa, Homo sapiens
MKRRKYGFIYKTHLFGRPTVRVMGADNVRRILLGEHRLVSVHWPASVRTILGSGCLSNLHDSSHKQRKKPRGTRMLRAGDHRGSGQQPGAVAELRRARPPGLPRGEAPHVPNRHAHPTGLRTPTGGRRGLRAAACGGLRGNDPQSLLAAHRRALQRAVPGHEGAEPHSRAHRAEHSRQDLRAAGIRGGPGLQRRAAAVDRALVGEGRAAGHAGTKAIFNRTPLWRTRNHGQCSHISDHLPGALPTCSPESARRAEE

SEQ ID NO: 69595 - protein, 154 aa, Homo sapiens
RKVLEHTTHTLLVGESATTFAQSMGFINEDLSTTASQALHSDWLARNCQPNYWRNVIPDPSKYCGPYKPPGILKQDIPIHKETEDDRGHDTIGDSPIPGAGAYADDTAGAAAATGNGDILMRFLPSYQAVEYMRRGEDPTIACQKVISRIQKHF

SEQ ID NO: 69596 - protein, 670 aa, Homo sapiens
MTPQSLLQTTLFLLSLLFLVQGAHGRGHREDFRFCSQRNQTHRSSLHYKPTPDLRISIENSEEALTVHAPFPAAHPASRSFPDPRGLYHFCLYWNRHAGRLHLLYGKRDFLLSDKASSLLCFQHQEESLAQGPPLLATSVTSWWSPQNISLPSAASFTFSFHSPPHTAAHNASVDMCELKRDLQLLSQFLKHPQKASRRPSAAPASQQLQSLESKLTSVRFMGDMVSFEEDRINATVWKLQPTAGLQDLHIHSRQEEEQSEIMEYSVLLPRTLFQRTKGRSGEAEKRLLLVDFSSQALFQDKNSSQVLGEKVLGIVVQNTKVANLTEPVVLTFQHQLQPKNVTLQCVFWVEDPTLSSPGHWSSAGCETVRRETQTSCFCNHLTYFAVLMVSSVEVDAVHKHYLSLLSYVGCVVSALACLVTIAAYLCSRRKPRDYTIKVHMNLLLAVFLLDTSFLLSEPVALTGSEAGCRASAIFLHFSLLTCLSWMGLEGYNLYRLVVEVFGTYVPGYLLKLSAMGWGFPIFLVTLVALVDVDNYGPIILAVHRTPEGVIYPSMCWIRDSLVSYITNLGLFSLVFLFNMAMLATMVVQILRLRPHTQKWSHVLTLLGLSLVLGLPWALIFFSFASGTFQLVVLYLFSIITSFQGCSFYVPILLSFDIKKKYMFIVENLE

SEQ ID NO: 69597 - protein, 74 aa, Homo sapiens
MGGQVSASNSFSRLHCRNANEDWMSALCPRLWDVPLHHLSIPGSHDTMTYCLNKKSPISHEESRLLQLLNKALP

SEQ ID NO: 69598 - protein, 196 aa, Homo sapiens
  MOD_RES (1)..(1): Any amino acid
XHSENSRATPGACLSPQHSQDGAWRRPAAAEETLGVRDGHQACRDFLELAEIHSRKWQRALQYEQEQRVHLEETIEQLAKQHNSLERAFHSAPGRPANPSKSFIEGSLLTPKGEDSEEDEDTEYFDAMEDSTSFITVITEAKEDSRKAEGSTGTSSVDWSSADNGSSKVKRRVRIPNKPNYSLNLWSIMKNCIGRE

SEQ ID NO: 69599 - protein, 43 aa, Homo sapiens
MPELAVQKVVVHPLVLLSVVDHFNRVSPCCPRCPCSSQTPELK

SEQ ID NO: 69600 - protein, 297 aa, Homo sapiens
MRDAGDPSPPNKMLRRSDSPENKYSDSTGHSKAKNVHTHRVRERDGGTSYSPQENSHNHSALHSSNSHSSNPSNNPSKTSDAPYDSADDWSEHISSSGKKYYYNCRTEVSQWEKPKEWLEREQRQKEANKMAVNSFPKDRDYRREVMQATATSGFASGIIPTSVFSNCELKWKTSIPVMPVVCSHRIFCLKQADTMTETTDCQEQRLTVVLRQYSTPSNQWFIQLLPQALFLLVHLRYSLITSQRNHLMLMEHLLYQNCLHPHLLSLHRKQKEKNLHQETNPYHILAQLLPRLLPLD

SEQ ID NO: 69601 - protein, 465 aa, Homo sapiens
LGAFAKEEAARIRLGGPEPWKGPPSSRAAPELLEYGRSRCARCRVSRVGEDWIFLVLLGLLMALVSWVMDYAIAACLQAQQWMSRGLNTSILLQYLAWVTYPVVLITFSAGFTQILAPQAVGSGIPEMKTILRGVVLKEYLTLKTFIAKVIGLTCALGSGMPLGKEGPFVHIASMCAALLSKFLSLFGGIYENESRNTEMLAAACAVGVGCCFAAPIGGVLFSIEVTSTFFAVRNYWRGFFAATFSAFIFRVLAVWNRDEETITALFKTRFRLDFPFDLQELPAFAVIGIASGFGGALFVYLNRKIVQVMRKQKTINRFLMRKRLLFPALVTLLISTLTFPPGFGQFMAGQLSQKETLVTLFDNRTWVRQGLVEELEPPSTSQAWNPPRANVFLTLVIFILMKFWMSALATTIPVPCGAFMPVFVIGAAFGRLVGESMAAWFPDGIHTDSSTYRIVPGGYAVVGA

SEQ ID NO: 69602 - protein, 209 aa, Homo sapiens; identical to SEQ ID NO: 43167

SEQ ID NO: 69603 - protein, 126 aa, Homo sapiens
MRKDTDDIESPKRSIRDSGYIDCWDSERSDSLSPPRHGRDDSFDSLDSFGSRSRQTPSPDVVLRGSSDGRGSDSESDLPHRKLPDVKKDDMSARRTSHGEPKSAVPFNQYLPNKSNQTAYVPAPLR

SEQ ID NO: 69604 - protein, 53 aa, Homo sapiens
  MOD_RES (1)..(1): Any amino acid
XHEPVRIAYDRPRGRPMSKKKGPGRAQLPEGPDGCPVSHLSRNPRTWTSPSRS

SEQ ID NO: 69605 - protein, 639 aa, Homo sapiens
MQSLTKGNDLHWLACALYVACRKSVPTVSKGTVEGNYVSLTRILKCSEQSLIEFFNKMKKWEDMANLPPHFRERTERLERNFTVSAVIFKKYEPIFQDIFKYPQEEQPRQQRGRKQRRQPCTVSEIFHFCWVLFIYAKGNFPMISDDLVNSYHLLLCALDLVYGNALQCSNRKELVNPNFKGLSEDFHAKDSKPSSDPPCIIEKLCSLHDGLVLEAKGIKEHFWKPYIRKLYEKKLLKGKEENLTGFLEPGNFGESFKAINKAYEEYVLSVGNLDERIFLGEDAEEEIGTLSRCLNAGSGTETAERVQMKNILQQHFDKSKALRISTPLTGVRYIKENSPCVTPVSTATHSLSRLHTMLTGLRNAPSEKLEQILRTCSRDPTQAIANRLKEMFEIYSQHFQPDEDFSNCAKEIASKHFRFAEMLYYKVLESVIEQEQKRLGDMDLSGILEQDAFHRSLLACCLEVVTFSYKPPGNFPFITEIFDVPLYHFYKVIEVFIRAEDGLCREVVKHLNQIEEQILDHLAWKPESPLWEKIRDNENRVPTCEEVMPPQNLERADEICIAGSPLTPRRVTEVRADTGGLGRSITSPTTLYDRYSSPPASTTRRRLFVENDSPSDGGTPGRMPPQPLVNAVPVQNVS

SEQ ID NO: 69606 - protein, 256 aa, Homo sapiens
MAEQVALSRTQVCGILREELFQGDAFHQSDTHIFIIMGASGDLAKKKIYPTIWWLFRDGLLPENTFIVGYARSRLTVADIRKQSEPFFKATPEEKLKLEDFFARNSYVAGQYDDAASYQRLNSHMNALHLGSQANRLFYLALPPTVYEAVTKNIHESCMSQIGWNRIIVEKPFGRDLQSSDRLSNHISSLFREDQIYRIDHYLGKEMVQNLMVLRFANRIFGPIWNRDNIACVILTFKEPFGTEGRGGYFDEFGII

SEQ ID NO: 69607 - protein, 62 aa, Homo sapiens
MAANLSRNGPALQEAYVRVVTEKSPTDWALFTYEGNSNDIRVAGTGGGPCDHQRTGRGGCGA

SEQ ID NO: 69608 - protein, 220 aa, Homo sapiens
  MOD_RES (1)..(1): Any amino acid
XGSMRRRSVPARPRGRLGERLENYDDPHKTPASPVVHIRGLIDGVVEADLVEALQEFGPISYVVVMPKKRQALVEFEDVLGACNAVNYAADNQIYIAGHPAFVNYSTSQKISRPGDSDDSRSVNSVLLFTILNPIYSITTDVLYTICNPCGPVQRIVIFRKNGVQAMVEFDSVQSAQRAKASLNGADIYSGCCTLKIEYAKPTRLNVFKNDQDTWDYTNP

SEQ ID NO: 69609 - protein, 126 aa, Homo sapiens
MGVNDLWQILEPVKQHIPLRNLGGKTIAVDLSLWVCEAQTVKKMMGSVMKPHLRNLFFRISYLTQMDVKLVFVMEGEPPKLKADVISKRNQSRYGSSGKSWSQKTGRSHFKSVLRECLHMLECLGI

SEQ ID NO: 69610 - protein, 87 aa, Homo sapiens
DANPVVIEPSSVLNGGKYSFGTAAHPMEQVEDRIGSSLSYVNTTEEKFSDNISTASEASETAGSGYIINTRRRTIKTNSTADSWKRL

SEQ ID NO: 69611 - protein, 65 aa, Homo sapiens
MGWLRPGPRPLCPPARASWAFSHRFPSPLAPRRSPTPFFMASLLCCGPKLAACGIVLSAWGVIML

SEQ ID NO: 69612 - protein, 168 aa, Homo sapiens
MGRVSSAAGSGDPRPPPWLRLHTTQLYQHVPETRWPIVYSPRYNITFMGLEKLHPFDAGKWGKVINFLKEEKLLSDSMLVEAREASEEDLLVVHTRRYLNELKGVASTTAPATVAGASVPMRTSRSPSSFCLSVWRASPGLPSLILMPIRAMGMSETSWTTSVCTSWM

SEQ ID NO: 69613 - protein, 133 aa, Homo sapiens
  MOD_RES (1)..(1): Any amino acid
XECPQHSPLEDIKQRKVLDLRRWYCISRPQYKTSCGISSLISCWNFLYSTMGAGNLPPITQEEALHILGFQPPFEDIRFGPFTGNTTLMRWFRQINDHFHVKGCSYVLYKPHGKNKTAGETGEEKAEKGLSVQ

SEQ ID NO: 69614 - protein, 290 aa, Homo sapiens
  MOD_RES (1)..(1): Any amino acid
XSFVAGAVEPHKAPALERLLWRACRGFLIASFRELEQPLEHPVTGEPATWMTFLISYWGEQIGQKIRKITDCFHCHVFPFLQQEEARLGALQQLQQQSQELQEVLGETERFLSQVLGRVLQLLPPGQVQVHKMKAVYLALNQCSVSTTHKCLIAEAWCSVRDLPALQEALRDSSLPGHRGCLRRGPLPGGQPRSLHHHHLPLPVCCDVRGCGPRAAHVPVRPGHGPCGEPTGCEGRAERDLADFLQGPLPAPAYGPVLHLHRLHLQRVLQSRHQHLPLGLECGRHGQPVW

SEQ ID NO: 69615 - protein, 111 aa, Homo sapiens
MASFGWKRKIGEKVSKVTSQQFEAEAADEKDVVDNDEGNWLHAIKRRKEILLEGCAEKSKQLKDEGASLAENKRCFRFCFLLIVSCHRHVRSAFHPPAMILRPPSHVELRP

SEQ ID NO: 69616 - protein, 155 aa, Homo sapiens
MELGELLYNKSEYIETASGNKVSRQSVLCGSQNIVLNGKTIVMNDCIIRGDLANVRVGRHCVVKSRSVIRPPFKKFSKGVAFFPLHIGDHVFIEEDCVVNAAQIGSYVHVGKNCVIGRRCVLKDCCKILDNTVLPPETVVPPFTVFSGCPGNLGC

SEQ ID NO: 69617 - protein, 83 aa, Homo sapiens
MGNSRSRVGRSFCSQFLPEEQAEIDQLFDALSSDKNSPNVSSKSFSLKALQNHVGEALPPEMVTRLYDGMRRVDLTGKAKGPS

SEQ ID NO: 69618 - protein, 155 aa, Homo sapiens
  MOD_RES (1)..(1): Any amino acid
XTCDVACLMFDGSDPKSFAHCASVYKHHYMDGQTPCLFVSSKADLPEGVAVSGPSPAEFCRKHRLPAPVPFSCAGPAEPSTTIFTQLATMAAFPHLVHAEPRILRALPPFPGPRWPVGMRRAGRQSFGPKAGVGGSPLKFGAVSVVVAEDRRLGS

SEQ ID NO: 69619 - protein, 227 aa, Homo sapiens
MWNCAALGQSHEARATFKITSGVTYNPNLQDKLSVDFKVLAFDLQQMIDEIFLSSNLKNEYKNSRVLQFENGSIIVVFDLFFAQWVSDENVKEELIQGLEANKSSQLVTFHIDLNSVDILASLENFSTVSPATTSDKLTTTSHLATPGNVSIECLPGSSPCTDALTCIKADLFCDGEVNCPDGSDEDNKMCATVCDGRFLLTGSSGSFQATHYPKPSETSVVCQWII

SEQ ID NO: 69620 - protein, 223 aa, Homo sapiens
MLKNKQPTPVNIRASMQQQQQLASARNRRLAQQMENRPSVQAALKLKQSLKQRLGKSNIQARLGRPIGALARGAIGGRGLPIIQRGLPRGGLRGGRATRTLLRGGMSLRGQNLLRGGRAVAPRMGLRRGGVRGRGGPGRGGLGRGAMGRGGIGGRGRGMIGRGRGGFGGRGRGRGRGRGALARPVLTKEQLDNQLDAYMSKTKGHLDAELDAYMAQTDPETND

SEQ ID NO: 69621 - protein, 136 aa, Homo sapiens
GGSAVPSECLDAMEEPDHGALLLLPGRPHPHGQSVITVIGGEEHFEDYGEGSEAELSPETLCNGQLGCSDPAFLTPSTDPLAAKLHSILTDEAFEFYCSQCHKQINRLEDLSARLSDLEMNSPTKRLSSKKVASFV

SEQ ID NO: 69622 - protein, 270 aa, Homo sapiens
LEFISDGALAIEVWGHRCAGNGSSIWEVDSLHAKTRTLHDRWNEVTRRIEMWISILELNELGEYAAVELHQAKDVNTGGIFQLRQEEDLNCVRERWSDALIKRREYLDEQIKKVSNKTEKTEDDVEREAQLVEQWVGLTEERNAVLVPAPGSGIPGAPADWIPPPGMETHIPVLFLDLNADDLSANEQLVGPHASGVNSILPKEHGSQFFYLPIIKHSDDEVSATASWDSSVHDSVHLNRVTPQNERIYLIVKTTVQLSHPAAMELVLRK

SEQ ID NO: 69623 - protein, 103 aa, Homo sapiens
MNKSNLNSLDEQEGVKSGMYVVIEVKVATQEGKEITCRSYLMTNYESAPPSPQYKKIICMGAKENGLPLEYQEKLKAIEPNDYTGKVSEEIEDIIKKGETQTL

SEQ ID NO: 69624 - protein, 113 aa, Homo sapiens
MSSPLQRAVGDTKRALSASSSSSASLPFDDRDSNHTSEGNGDSLLADEDTDFEDSLNRNVKKRAAKRPPKTTPVAKHPKKGSRVVHRHSRKQSEPPANDLFNAVKAAKSDMQL

SEQ ID NO: 69625 - protein, 118 aa, Homo sapiens
MSADGGGIQDTQDKETPPEVPDRGHPHQEMPSKLGEAVPSGDTQESLHIKMEPEEPHSEGASQEDGAQGAWGWAPLSHGSKEKALFLPGGALPSPRIPVLSREGRTRDRQMAAALLTA

SEQ ID NO: 69626 - protein, 164 aa, Homo sapiens
MRQGLLVLALVLVLVLVLAAGSQVQEWYPRESHALNWNKFSGFWYILATATDAQGFLPARDKRKLGASVVKVNKVGQLRVLLAFRRLKGCQSQEVILRKDGKKPVFGNACAYAAGPREGQEGDRQNVSSFQSLKEFMDACDILGLSKAAVILPKDASRTHTILP

SEQ ID NO: 69627 - protein, 97 aa, Homo sapiens
MAGAAPRVRYLAGFCCPLGGLAAGKPRVLCHEAEVFLSTGSELVYVYDQEGGLLTAAFRFPDQVWHLELLAPRRLLYALCARRGLYCLSLDHPGRSR

SEQ ID NO: 69628 - protein, 98 aa, Homo sapiens
MLRPGAQLLRGLLLRSCPLQGSPGRPRSVCGREGEEKPPLSAETQWKDRAETVIIGGGCVGVSLAYHLAKAGMKDVVLLEKSELTAGSTWHADFGLVK

SEQ ID NO: 69629 - protein, 74 aa, Homo sapiens
MPKTMHFLFRFIVFFYLWGLFTAQRQKKEESTEEVKIEVLHRPENCSKTSKKGDLLNAHYDGYLAKDGSKFYCR

SEQ ID NO: 69630 - protein, 379 aa, Homo sapiens
MSDGEGPSADDSASAASSMEVTDRIASLEQRVQMQEDDIQLLKSALADVVRRLNITEEQQAVLNRKGPTKARPLMQTLPLRTTVNNGTVLPKKPTGSLPSPSGVRKETAVPATKSNIKRTSSSERVSPGGRRESNGDSRGNRNRTGSTSSSSSGKKNSESKPKEPVFSAEEGYVKMFLRGRPVTMYMPKDQVDSYSLEAKVELPTKRLKLEWVYGYRGRDCRNNLYLLPTGETVYFIASVVVLYNVEEQLQRHYAGHNDDVKCLAVHPDRITIATGQVAGTSKDGKQLPPHVRIWDSVTLNTLHVIGIGFFDRAVTCIAFSKSNGGTNLCAVDDSNDHVLSVWDWQKEEKLADVKCSNEAVFAADFHPTDTNIIVTCGK

SEQ ID NO: 69631 - protein, 176 aa, Homo sapiens
MAAPRWSASGPWIRGNGQGCGSLFTLVSKPFCAAAAASTAINAQRLAEKLRAQKREQDTKKEPVSTNAVQRRVQEIVRFTRQLQRVHPNVLAKALTRGILHQDKNLVVINKPYGLPVHGGPGVQLCITDVLPILAKMLHGHKAEPLHLCHRLDKETTGAQQHSLLRPRGAPAHHWN

SEQ ID NO: 69632 - protein, 84 aa, Homo sapiens
  MOD_RES (1)..(1): Any amino acid
XAQQSATVANPVPGANPDLLPHFLVEPEDVYIVKNKPVLLVCKAVPATQIFFKCNGEWVRQVDHVIERSTDGSSEGDREGWRPM

SEQ ID NO: 69633 - protein, 393 aa, Homo sapiens
  MOD_RES (372)..(372): Any amino acid
LTDRQTDTAPSPSYHLLPGRRRTVDAAASRGQGPEPAPGGGVEGVGARGVALKLFVQLLGCSRFGGAVVRAGEAEPSGAARSASSGREEPQPEEGEEEEEKEEERGPQWRLGARKPGSWTGEAAVCADSAPAARAPQALARASGRGGRVARRGAEESGPPHSPSRRGSASRAGPGRASETMNFLLSWVHWSLALLLYLHHAKWSQAAPMAEGGGQNHHEVVKFMDVYQRSYCHPIETLVDIFQEYPDEIEYIFKPSCVPLMRCGGCCNDEGLECVPTEESNITMQIMRIKPHQGQHIGEMSFLQHNKCECRPKKDRARQENPCGPCSERRKHLFVQDPQTCKCSCKNTDSRCKARQLELNERTCRCDKPRRXAGQEEGASLRVSGTRSLTRKD

SEQ ID NO: 69634 - protein, 162 aa, Homo sapiens
MIKCLSVEVQAKLRSGLAISSLGQCVEELALNSIDAEAKCVAVRVNMETFQVQVIDNGFGMGSDDVEKVGNRYFTSKCHSVQDLENPRFYGFRGEALANIADMASAVEISSKKNRTMKTFVKLFQSGKALKACEADVTRASAGTTVTVYNLFYQLPVRRKCM

SEQ ID NO: 69635 - protein, 480 aa, Homo sapiens
MGDEDKRITYEDSEPSTGMNYTPSMHQEAQEETVMKLKGIDANEPTEGSILLKSSEKKLQETPTEANHVQRLRQMLACPPHGLLDRVITNGMLLAGFLIRNIPVINDNVQIKHKWSSSLRSIALSIILVRAGLGLDSKALKKLKGVCVRLSMGPCIVEACTSALLAHYLLGLPWQWGFILGFVLGAVSPAVVVPSMLLLQGGGYGVEKGVPTLLMAAGSFDDILAITGFNTCLGIAFSTGSTVFNVLRGVLEVVIGVATGSVLGFFIQYFPSRDQDKLVCKRTFLVLGLSVLAVFSSVHFGFPGSGGLCTLVMAFLAGMGWTSEKAEVEKIIAVAWDIFQPLLFGLIGAEVSIASLRPETVGLCVATVGIAVLIRILTTFLMVCFAGFNLKEKIFISFAWLPKATVQAAIGSVALDTARSHGEKQLEDYGMDVLTVAFLSILITAPIGSLLIGLLGPRLLQKVEHQNKDEEVQGETSVQV

SEQ ID NO: 69636 - protein, 139 aa, Homo sapiens
  MOD_RES (1)..(1): Any amino acid
XTPDQLMKDKVFSEVSPLYTPFTKPASLFSSSLRCADLTLPEDISQLCKDINNDYLAERSIEEVYYLWCLAGGDLEKELVNKEIIRSKPPICTLPNFLFEDGESFGQGRDRSSLLDDTTVTLSLCQLRNEQTFCLQVGS

SEQ ID NO: 69637 - protein, 273 aa, Homo sapiens
  MOD_RES (1)..(1): Any amino acid
XCRQDVATNLLKLFLGQGLAKDFLDLLFQLELSRTSETNTLFRSNSLASKSMESFLKVAGMQYLHGVLGPIINKVFEEKKCSGLHRPQTEAEVLEQSAQTLRAHLGALLSALSRSVRACPAVVRATFRQLFRRVRERFPGAQHENVPFIAVTSFLCLRFFSPAIMSPKLFHLRERHADARTSRTLLLLAKAVQNVGNMDTPASRAKEAWMEPLQPTVRQGVAQLKDFITKLVDIEEKDELDLQRTLSLQAPPVKEGPLFIHRTKGKGPLMSSS

SEQ ID NO: 69638 - protein, 612 aa, Homo sapiens
MQFQHSVLSTSTQLLFKDLLQNTDAHKRAFHEIYRTRSVNGIPVPPDQLEDMAERFHFVSSTSELHLMKMEFLELKYRLLSLLVLAESKLKSWIIKYGRRESVEQLLQNYVSFIENSKFFEQYEVTYQILKQTAEMYVKADGSVEEAENVMKFMNETTAQWRNLSVEVRSVRSMLEEVISNWDRYGNTVASLQAWLEDAEKMLNQSENAKKDFFRNLPHWIQQHTAMNDAGNFLIETCDEMVSRDLKQQLLLLNGRWRELFMEVKQYAQADEMDRMKKEYTDCVVTLSAFATEAHKKLSEPLEVSFMNVKLLIQDLEDIEQRVPVMDAQYKIITKTAHLITKESPQEEGKEMFATMSKLKEQLTKVKECYSPLLYESQQLLIPLEELEKQMTSFYDSLGKINEIITVLEREAQSSALFKQKHQELLACQENCKKTLTLIEKGSQSVQKFVTLSNVLKHFDQTRLQRQIADIHVAFQSMVKKTGDWKKHVETNSRLMKKFEESRAELEKVLRIAQEGLEEKGDPEELLRRHTEFFSQLDQRVLNAFLKACDELTDILPEQEQQGLQEAVRKLHKQWKVSQDRTETPCILNEGRSLSVLRSKCKRNLEIPGKSL

SEQ ID NO: 69639 - protein, 108 aa, Homo sapiens
MAPEENAGTELLLQGFERRFLAVRTLRSFPWQVGGGASGEARGGRGSPGADGMGLRAETPGAPATCTLRHLKVRLSAAVASTSNWLHVPREGSHRALPTHSIACLMFL

SEQ ID NO: 69640 - protein, 105 aa, Homo sapiens
MSVAENEDQLRAKGYDKTPDFILQVPVAVEGHIIHWIESKASFGDECSHHAYLHDQFWSYWNRFGPGLVIYWYGFIQELDCNRERGILLKACFPTNIVTLCHSIA

SEQ ID NO: 69641 - protein, 21 aa, Homo sapiens
MPSVTFGSVHPSDVLDMPVDP

SEQ ID NO: 69642 - protein, 53 aa, Homo sapiens
MRLAGPLRIVVLVVSVGVTWIVVSILLGGPGSGFPRIQQLFTSPESSVTADLR

SEQ ID NO: 69643 - protein, 317 aa, Homo sapiens
MVSKFPVIVGHEATGIVESIGEGVTTVKPGDKVIPLFLPQCRECNACRNPDGNLCIRSDITGRGVLADGTTRFTCKGKPVHHFMNTSTFTEYTVVDESSVAKIDDAAPPEKVCLIGCGFSTGYGAAVKTGKVKPGSTCVVFGLGGVGLSVIMGCKSAGASRIIGIDLNKDKFEKAMAVGATECISPKDSTKPISEVLSEMTGNNVGYTFEVIGHLETMIDALASCHMNYGTSVVVGVPPSAKMLTYDPMLLFTGRTWKGCVFGGLKSRDDVPKLVTEFLAKKFDLDQLITHVLPFKKISEGFELLNSGQSIRTVLTF

SEQ ID NO: 69644 - protein, 270 aa, Homo sapiens
MADIIARLREDGIQKRVIQEGRGELPDFQDGTKHVVLYPLVAKSLRNIAVGKDPLEGQRHCCGVAQMREHSSLGHADLDALQQNPQPLIFHMEMLKVESPGTYQQDPWAMTDEEKAKAVPLIHQEGNRLYREGHVKEAAAKYYDAIACLKNLQMKEQPGSPEWIQLDQQITPLLLNYCQCKLVVEEYYEVLDHCSSILNKYDDNVKAYFKRGKAHAAVWNAQEAQADFAKVLELDPALAPVVSRELRALEARIRQKDEEDKARFRGIFSH

SEQ ID NO: 69645 - protein, 269 aa, Homo sapiens
MFANLKYVSLGILVFQTTSLVLTMRYSRTLKEEGPRYLSSTAVVVAELLKIMACILLVYKDSKCSLRALNRVLHDEILNKPMETLKLAIPSGIYTLQNNLLYVALSNLDAATYQVTYQLKILTTALFSVSMLSKKLGVYQWLSLVILMTGVAFVQWPSDSQLDSKELSAGSQFVGLMAVLTACFSSGFAGVYFEKILKETKQSVWIRNIQLGFFGSIFGLMGVYIYDGELVSKNGFFQGYNRLTWIVVVLQCLFPWSHPCNNSYFFVWL

SEQ ID NO: 69646 - protein, 97 aa, Homo sapiens
MVRYSLDPENPTKSCKSRGSNLRVHFKNTRETAQAIKGMHIRKATKYLKDVTLQKQCVPFRRYNGGVGRCAQAKQWGWTQGRWPKKSAEFLLHMLKN

SEQ ID NO: 69647 - protein, 377 aa, Homo sapiens
DDYFRNWNPNKPFDQALDPSKDPCLKVKCSPHKVCVTQDYQTALCVSRKHLLPRQKKGNVAQKHWVGPSNLVKCKPCPVAQSAMVCGSDGHSYTSKCKLEFHACSTGKSLATLCDGPCPCLPEPEPPKHKAERSACTDKELRNLASRLKDWFGALHEDANRVIKPTSSNTAQGRFDTSILPICKDSLGWMFNKLDMNYDLLLDPSEINAIYLDKYEPCIKPLFNSCDSFKDGKLSNNEWCYCFQKPGGLPCQNEMNRIQKLSKGKSLLGAFIPRCNEEGYYKATQCHGSTGQCWCVDKYGNELAGSRKQGAVSCEEEQETSGDFGSGGSVVLLDDLEYERELGPKDKEGKLRVHTRAVTEDDEDEDDDKEDEVGYIW

SEQ ID NO: 69648 - protein, 40 aa, Homo sapiens
MVMEKPSPLLVGREFVRQYYTLLNKAPEYLHRIYTTKYYL

SEQ ID NO: 69649 - protein, 463 aa, Homo sapiens
MLRRALLCLAVAALVRADAPEEEDHVLVLRKSNFAEALAAHKYLLVEFYAPWCGHCKALAPEYAKAAGKLKAEGSEIRLAKVDATEESDLAQQYGVRGYPTIKFFRNGDTASPKEYTAGREADDIVNWLKKRTGPAATTLPDGAAAESLVESSEVAVIGFFKDVESDSAKQFLQAAEAIDDIPFGITSNSDVFSKYQLDKDGVVLFKKFDEGRNNFEGEVTKENLLDFIKHNQLPLVIEFTEQTAPKIFGGEIKTHILLFLPKSVSDYDGKLSNFKTAAESFKGKILFIFIDSDHTDNQRILEFFGLKKEECPAVRLITLEEEMTKYKPESEELTAERITEFCHRFLEGKIKMPHGVVTANSWLPFGINWERRTRTMRTSSSPRWTRLPTRWRPSKCTASPHSSSFLPVPTGRSLITTGNARWMVLRNSWRAVARMGQGMMTISRTWKKQRSQTWRKTMIRKL

SEQ ID NO: 69650 - protein, 530 aa, Homo sapiens
MPLRSPSPSPWPGPLHAEMHVLLALSGRGCLVLRHVVMGSHSPCAHTPCAPPAPTGAKRTLAASGSQSSNGPEPGGQQLKTRTLSGMASKTTTTIIPKRIAHSPSLQSLKKPIIPKEFGGKVPTVIRQRYLNLFIEECLKFCTSNQEAIEKALNEEKVAYDRSPSKNIYLNVAVNTLKKLRGLAPSAVPGLSKTSGRRVVSHEVVLGGRLAAKTSFSLSRPSSPRVEDLKGAALYSRLREYLLTQDQLKENGYPFPHPERPGGAIIFTAEEKRPKDSSCRTCCRCGTEYLVSSSGRCIRDEECYYHWGRLRRNRVAGGWETQYMCCSAAAGSVGCQVAKQHVQDGRKERLEGFVKTFEKELSGDTHPGIYALDCEMSYTTYGLELTRVTVVDTDVHVVYDTFVKPDNEIVDYNTRFSGVTEADLADTSVTLRDVQAVLLSMFSADTILIGHSLESDLLALKVIHSTVVDTSVLFPHRLGLPYKRSLRNLMADYLRQIIQDNVDGHSSSEDAGACMHLVIWKVREDAKTKR

SEQ ID NO: 69651 - protein, 137 aa, Homo sapiens
MWQNDLQPLLIERYPGSPGSYAARQHIMQRIQRLQADWVLEIDTFLSQTPYGYRSFSNIISTLNPTAKRHLVLACHYDSKYFSHWNNRVFVGATDSAVPCAMMLELARALDKKLLSLKTVSDSKPDLSLQLIFFDGE

SEQ ID NO: 69652 - protein, 502 aa, Homo sapiens
MPVKMLFKELLLLLMMMPLQHYTKTCGFVVYQNDKLFQSKTFTAKSDFSQKIISSKTDENEQDQSASVDMVFSPKYNQKEFQLYSYACVYWNLSAKDWDTYGCQKDKGTDGFLRCRCNHTTNFAVLMTFKKDYQYPKSLDILSNVGCALSVTGLALTVIFQIVTRKVRKTSVTWVLVNLCISMLIFNLLFVFGIENSNKNLQTSDGDINNIDFDNNDIPRTDTINIPNPMCTAIAALLHYFLLVTFTWNALSAAQLYYLLIRTMKPLPRHFILFISLIGWGVPAIVVAITVGVIYSQNGNNPQWELDYRQEKICWLAIPEPNGVIKSPLLWSFIVPVTIILISNVVMFITISIKVLWKNNQNLTSTKKVSSMKKIVSTLSVAVVFGITWILAYLMLVNDDSIRIVFSYIFCLFNTTQGLQIFILYTVRTKVFQSEASKVLMLLSSIGRRKSLPSVTRPRLRVKMYNFLRSLPTLHERFRLLETSPSTEEITLSESDNAKESI

SEQ ID NO: 69653 - protein, 101 aa, Homo sapiens
MGGLEPCSRLLLLPLLLAVSDCSCSTVSPGVLAGIVMGDLVLTVLIALAVYFLGRLVPRGRGAAEATRKQRITETESPYQELQGQRSDVYSDLNTQRPYYK

SEQ ID NO: 69654 - protein, 160 aa, Homo sapiens
MREIVHLQAGQCGNQIGAKFWEVISDEHGIDPTGTYHGDSDLQLERINVYYNEAESCDCLQGFQLTHSLGGGTGSGMGTLLISKIREEFPDRIMNTFSVVPSPKVSDTVVEPYNATLSVHQLVENTDETYCIDNEALYDICFRTLKLTTPTYGDLNHLVS

SEQ ID NO: 69655 - protein, 128 aa, Homo sapiens
MAVRSLWAGRLRVQRLLAWSAAWESKGWPLPFSTATQRTAGEDCRSEDPPDELGPPLAERALRVKAVKLEKEVQDLTVRYQRAIADCENIRRRTQRCVEDAKIFGERFIYNKNVFGWAQWLMPVIPAL

SEQ ID NO: 69656 - protein, 49 aa, Homo sapiens
MLTFFLVSGGSLWLFVGLLPYLTLVFNRVCPLTSGEDADTGDPEDTATA

SEQ ID NO: 69657 - protein, 178 aa, Homo sapiens
MVYQAASNGDVNALTAVIREDPSILECCDSEGCTPLMHAVSGRQADTVKLLLKMGANINMQDAYGRTSLCLATYLGWLEGCVSLLRNGAKHNIPDKNGRLPLHAATAEPDMRLLTVLLQQSNISEINHQDNEGMTPLHWAAFHNQPQHTQMLLKKGADPTLVDKDFKTALHWAVQVRN

SEQ ID NO: 69658 - protein, 156 aa, Homo sapiens
MEEIDRFQDPAAASISDGDCDAREEKQRELARKGSLKNGSMGSPVNQQPKKNNVMARTRLVVPNKGYSSLDQSPDEKPLVALDTDSDDDFDMSRYSSSGYSSAEQINQDLNIQLLKDGYRLDEIPDDEDLDLIPPKSVNPTCMCCQATSSTACHIQ

SEQ ID NO: 69659 - protein, 141 aa, Homo sapiens; identical to SEQ ID NO: 65428
  MOD_RES (1)..(1): Any amino acid

SEQ ID NO: 69660 - protein, 174 aa, Homo sapiens
MIDVRYQIDNKKMVRIAAKFIIHAPPGEFNEVFNDVRLLLNNDNLLREGAAHAFAQYNLDQFTPVKIEGYEDQVLITEHGDLGNGKFLDPKNRICFKFDHLRKEATDPRPCEVENAVESWRTSVETALRAYVKEHYPNGVCTVYGKKIDGQQTIIACIESHQFQAKNFCCCFYF

SEQ ID NO: 69661 - protein, 446 aa, Homo sapiens
  MOD_RES (1)..(1): Any amino acid
XSTKGPSVFPLAPCSRSTSGGTAALGCLVKDYFPEPVTVSWNSGALTSGVHTFPAVLQSSGLYSLSSVVTVPSSSLGTQTYTCNVNHKPSNTKVDKRVELKTPLGDTTHTCPRCPEPKSCDTPPPCPRCPEPKSCDTPPPCPRCPEPKSCDTPPPCPRCPAPELLGGPSVFLFPPKPKDTLMISRTPEVTCVVVDVSHEDPEVQFKWYVDGVEVHNAKTKPREEQYNSTFRVVSVLTVLHQDWLNGKEYKCKVSNKALPAPIEKTISKTKGQPREPQVYTLPPSREEMTKNQVSLTCLVKGFYPSDIAVEWESSGQPENNYNTTPPMLDSDGSFFLYSKLTVDKSRWQQGNIFSCSVMHEALHNRFTQKSLSLSPELQLEESCAEAQDGELDGLWTTITIFITLFLLSVCYSATVTFFKVKWIFSSVVDLKQTIIPDYRNMIGQGA

SEQ ID NO: 69662 - protein, 88 aa, Homo sapiens
  MOD_RES (1)..(1): Any amino acid
XDESETAVKPPAPPLPQMMEGNGNGHEHCSDCENEEDNSYNRGGLSPANDTGAKKKKKKQKKKKEKGSETDSAQDQPVKVGVQKYEHG

SEQ ID NO: 69663 - protein, 444 aa, Homo sapiens
MAATVNLELDPIFLKALGFLHSKSKDSAEKLKALLDESLARGIDSSYRPSQKDVEPPKISSTKNISIKQEPKISSSLPSGNNNGKVLTTEKVKKEAEKRPADKMKSDITEGVDIPKKPRLEKPETQSSPITVQSSKDLPMADLSSFEETSADDFAMEMGLACVVCRQMMVASGNQLVECQECHNLYHRDCHKPQVTDKEANDPRLVWYCARCTRQMKRMAQKTQKPPQKPAPAVVSVTPAVKDPLVKKPETKLKQETTFLAFKRTEVKTSTVISGNSSSASVSSSVTSGLTGWAAFAAKTSSAGPSTAKLSSTTQNNTGKPATSSANQKPVGLTGLATSSKGGIGSKIGSNNSTTPTVPLKPPPPLTLGKTGLSRSVSCDNVSKVGLPSPSSLVPGSSSQLSGNGNSGTSGPSGSTTSKTTSESSSSPSASLKGPTSQNHSSML

SEQ ID NO: 69664 - protein, 110 aa, Homo sapiens
MKDEAGERDREVSSLNSKLLSLQLDIKNLHDVCKRQRKTLQDNQLCMEEAMNSSHDKKQAQALAFEESEVEFGSSKQCHLRQLQQLKKKLLVLQQELEFHTEELQTSYYS

SEQ ID NO: 69665 - protein, 234 aa, Homo sapiens
MKTLAGLVLGLVIFDAAVTAPTLESINYDSETYDATLEDLDNLYNYENIPVDKVEIEIATVMPSGNRELLTPPPQPEKAQEEEEEEESTPRLIDGSSPQEPEFTGVLGPHTNEDFPTCLLCTCISTTVYCDDHELDAIPPLPKNTAYFYSRFNRIKKINKNDFASLSDLKRIDLTSNLISEIDEDAFRKLPQLRELVLRDNKIRQLPELPTTLTFIDISNNRLGRKGIKQEAFK

SEQ ID NO: 69666 - protein, 339 aa, Homo sapiens
MSQTGSHPGRGLAGRWLWGAQPCLLLPIVPLSWLVWLLLLLLASLLPSARLASPLPREEEIVFPEKLNGSVLPGSGAPARLLCRLQAFGETLLLELEQDSGVQVEGLTVQYLGQAPELLGGAEPGTYLTGTINGDPESVASLHWDGGALLGVLQYRGAELHLQPLEGGTPNSAGGPGAHILRRKSPASGQGPMCNVKAPLGSPSPRPRRAKRFASLSRFVETLVVADDKMAAFHGAGLKRYLLTVMAAAAKAFKHPSIRNPVSLVVTRLVILGSGEEGPQVGPSAAQTLRSFCAWQRGLNTPEDSDPDHFDTAILFTRQVRPQSAPQAMHCTILRSATT

SEQ ID NO: 69667 - protein, 1233 aa, Homo sapiens
MSNITIDPDVKPGEYVIKSLFAEFAVQAEKKIEVVMAEPLEKLLSRSLQRGEDLQFDQLISSMSSVAEHCLPSLLRTLFDWYRRQNGTEDESYEYRPRSSTKSKGDEQQRERDYLLERRDLAVDFIFCLVLVEVLKQIPVHPVPDPLVHEVLNLAFKHFKHKEGYSGTNTGNVHIIADLYAEVIGVLAQSKFQAVRKKFVTELKELRQKEQSPHVVQSVISLIMGMKFFRVKMYPVEDFEASFQFMQECAQYFLEVKDKDIKHALAGLFVEILIPVAAAVKNEVNVPCLKNFVEMLYQTTFELSSRKKHSLALYPLITCLLCVSQKQFFLNNWHIFLQNCLSHLKNKDPKMSRVALESLYRLLWVYVIRIKCESNTVTQSRLMSIVSALFPKGSRSVVPRDTPLNIFVKIIQFIAQERLDFAMKEIIFDLLSVGKSTKTFTINPERMNIGLRVFLVIADSLQQKDGEPPMPTTGVILPSGNTLRVKKIFLNKTLTDEEAKVIGMSVYYPQVRKALDSILRHLDKEVGRPMCMTSVQMSNKEPEDMITGERKPKIDLFRTCIAAIPRLIPDGMSRTDLIELLARLTIHMDEELRALAFNTLQALMLDFPDWREDVLSGFVYFIVREVTDVHPTLLDNAVKMLVQLINQWKQAAQMHNKNQDTQHGVANGASHPPPLERSPYSNVFHVVEGFALVILCSSRPATRRLAVSVLREIRALFALLEIPKGDDELAIDVMDRLSPSILESFIHLTGADQTTLLYCPSSIDLQTLAEWNSSPISHQFDVISPSHIWIFAHVTQGQDPWIISLSSFLKQENLPKHCSTAVSYAWMFAYTRLQLLSPQVDINSPINAKKVNTTTSSDSYIGLWRNYLILCCSAATSSSSTSAGSVRCSPPETLASTPDSGYSIDSKIIGIPSPSSLFKHIVPMMRSESMEITESLVLGLGRTNPGAFRELIEELHPIIKEALERRPENMKRRRRRDILRVQLVRIFELLADAGVISHSASGGLDNETHFLNNTLLEYVDLTRQLLEAENEKDSDTLKDIRCHFSALVANIIQNVPVHQRRSIFPQQSLRHSLFMLFSHWAGPFSIMFTPLDRYSDRNMQINRHQYCALKAMSAVLCCGPVADNVGLSSDGYLYKWLDNILDSLDKKVHQLGCEAVTLLLELNPDQSNLMYWAVDRCYTGSGRVAAGCFKAIANVFQNRDYQCDTVMLLNLILFKAADSSRSIYEVAMQLLQR

SEQ ID NO: 69668 - protein, 176 aa, Homo sapiens
MRRPGRKGTGGGQAPSPIANTFLHYRTSKVRVLRAARLERLVGELVFGDREQDPSFMPAFLATYRTFVPTACLLGFLLPPMPPPPPPGVEIKKTAVQDLSFNKNLRAVVSVLGSWLQDHPQDFRDHPAHSDLGSVRTFLGWAAPGSAEAQKAEKLLEDFLEEAEREQEEEPPQVWT

SEQ ID NO: 69669 - protein, 437 aa, Homo sapiens
MGYQRQEPVIPPQRDLDDRETLVSEHEYKEKTCQSAALFNVVNSIIGSGIIDFSLVLLIKGGALSGTDTYQSLVNKTFGFPGYLLLSVLQFLYPFIAMISYNIIAGDTLSKVFQRIPGVDPENVFIGRHFIIGLSTVTFTLPLSLYRNIAKLGKVSLISTGLTTLILGIVMARAISLGPHIPKTEDAWVFAKPNAIQAVGVMSFAFICHHNSFLVYSSLEEPTVAKWSRLIHMSIVISVFICIFFATCGYLTFTGFTQGDLFENYCRNDDLVTFGRFCYGVTVILTYPMECFVTREVIANVFFGGNLSSVFHIVVTVMVITVATLVSLLIDCLGIVLELNGVLCATPLIFIIPSACYLKLSEEPRTHSDKIMSCVMLPIGAVVMVFGFVMAITNTQDCTHGQEMFYCFPDNFSLTNTSESHVQQTTQLSTLNISIFQ

SEQ ID NO: 69670 - protein, 164 aa, Homo sapiens
MDPLFQQTHKQVHEIQSCMGRLETADKQSVHIENEIQASIDQIFSRLERLEILSSKEPPNKRQNARLRVDQLKYDVQHLQTALRNFQHRRHAREQQERQREELLSRTFTTNGTQKKILDIANMLGLSNTVMRLIEKRAFQDKYFMIGGMLLTCVVMFLVVQYLT

SEQ ID NO: 69671 - protein, 28 aa, Homo sapiens
MKWPLLDVPSSATVKDTRSPSPAHLSNK

SEQ ID NO: 69672 - protein, 145 aa, Homo sapiens
MSKSESPKEPEQLRKLFIGGLSFETTDESLRSHFEQWGTLTDCVDSQRPGAHLTVKKIFVGGIKEDTEEHHLRDYFEQYGKIEVIEIMTDRGSGKKRGFAFVTFDDHDSVDKIVIQKYHTVNGHNCEVRKALSKQEMASASSSQR

SEQ ID NO: 69673 - protein, 103 aa, Homo sapiens
MIEDVQSLLDEEQEQMFAFRSRARSTDTFNYATYHTLEEIYDFLDLLVAENPHLVSKIQIGNTYEGRPIYVLKFSTGGSKRPAIWIDTGIHSREWVTQASGVW

SEQ ID NO: 69674 - protein, 180 aa, Homo sapiens
MAGYEYVSPEQLAGFDKYKYSAVDTNPLSLYVMHPFWNTIVKVFPTWLAPNLITFSGFLLVVFNFLLMAYFDPDFYASAPGHKHVPDWVWIVVGILNFVAYTLGCALCVTLPMSLLNFFRSYKNNTLKLNSVYEAMVPLFSPCLLFILSTAWILWSPSDILELHPRVFYFMVGTAFANST

SEQ ID NO: 69675 - protein, 43 aa, Homo sapiens
MGHTGAVWCVDADWDTKHVLTGSADNSCRLWDCETVWRGVGEC

SEQ ID NO: 69676 - protein, 200 aa, Homo sapiens
MAMEMRLPVARKPLSERLGRDTKKHLVVPGDTITTDTGFMRGHGTYMGEEKLIASVAGSVERVNKLICVKALKTRYIGEVGDIVVGRITEVQQKRWKVETNSRLDSVLLLSSMNLPGGELRRRSAEDELAMRGFLQEGDLISAEVQAVFSDGAVSLHTRSLKYGKTHFHDLPCGASVILGNNGFIWIYPTPEHKEEEAGG

SEQ ID NO: 69677 - protein, 103 aa, Homo sapiens
  MOD_RES (1)..(1): Any amino acid
XLRLHPPIPTFARGCTQDVVLPDSRVIPKGNVCNINIFAIHHNPSVWPDPEVYDPFRFDPENAQKRSPMAFIPFSAGPREPRRTPEIVLRAEDGLWLRVEPLG

SEQ ID NO: 69678 - protein, 135 aa, Homo sapiens
MPSPRPVLLRGARAALLLLLPPRLLARPSLLLRRSLSAASCPPISLPAAASRSSMDGAGAEEVLAPLRLAVRQQGDLVRKLKEDKAPQVDVDKAVAELKARKRVLEAKMESRPVAQAGVQWCDLSSLQPLPPGFK

SEQ ID NO: 69679 - protein, 114 aa, Homo sapiens
MFLLLNCIVAVSQNMGIGKNGDLPRPPLRNEFRYFQRMTTTSSVEGKQNLVIMGRKTWFSIPEKNRPLKDRINLVLSRELKEPPQGAHFLARSLDDALKLTERPELANKVDMIW

SEQ ID NO: 69680 - protein, 183 aa, Homo sapiens
MARHGLPLLPLLSLLVGAWLKLGNGQATSMVQLQGGRFLMGTNSPDSRDGDGPVREATVKPFAIDIFPVTNKDFRDFVREKKYRTEAEMFGWSFVFEDFVSDELRNKATQPMKSVLWWLPVEKAFWRQPAGPGSGIRERLEHPVLHVKFTHGGTGSSQTAPTCGRESSPRETKLRMASMESPQ

SEQ ID NO: 69681 - protein, 125 aa, Homo sapiens
MGIQSGKNFINTNAADIIMGVAKKPKPIYVDKRTGDKHDLEPSGLVPKYINKKDYGVTPEYICKRNEEIKKAQEDYDRYIQENLKKAAMKRLSDEEREAVLQGLKKNWEEVHKEFQSLSVFIDSI

SEQ ID NO: 69682 - protein, 385 aa, Homo sapiens
KEQSELDQDLDDVEEVEEEETGEETKLKARQLTVQMMQNPQILAALQERLDGLVETPTGYIESLPRVVKRRVNALKNLQVKCAQIEAKFYEEVHDLERKYAVLYQPLFDKRFEIINAIYEPTEEECEWKPDEEDEISEELKEKAKIEDEKKDEEKEDPKGIPEFWLTVFKNVDLLSDMVQEHDEPILKHLKDIKVKFSDAGQPMSFVLEFHFEPNEYFTNEVLTKTYRMRSEPDDSDPFSFDGPEIMGCTGCQIDWKKGKNVTLKTIKKKQKHKGRGTVRTVTKTVSNDSFFNFFAPPEVPESGDLDDDAEAILAADFEIGHFLRERIIPRSVLYFTGEAIEDDDDDYDEEGEEADEEGEEEGDEENDPDYDPKKDQNPAECKQQ

SEQ ID NO: 69683 - protein, 269 aa, Homo sapiens
  MOD_RES (1)..(1): Any amino acid
XILYLEETEGIPDQMTLKTIYERISKNIPTTKDVEPLLEIDGDIRNFEVFLSSRTPVLVARDVKVFLPCTVNLDPKLREIIADVRAAREQISIGGLAYPPLPLHEGPPRAPSGYSQPPSVCSSTSFNGPFAGGVVSPQPHSSYYSGMTGPQHPFYNRPFFAPYLYTPRYYPGGSQHLISRPSVKTSLPRDQNNGLEVIKEDAAEGLSSPTDSSRLCDSGFNKQRQGSGPAPGPVVLLNSLNVDAVCEKLKQIEGLDQSMLPQYCTTIKK

SEQ ID NO: 69684 - protein, 128 aa, Homo sapiens
MDADSDVALDILITNVVCVFRTRCHLNLRKIALEGANVIYKRDVGKVLMKLRKPRITATIWSSGKIICTGATSEEEAKFGARRLARSLQKLGFQVIFTDFKVVNVLAVCNMPFEIRLPEFTKNNRPHA

SEQ ID NO: 69685 - protein, 119 aa, Homo sapiens
MPWAERNLLVYSSSKETLLTFRDVAIEFSLEEWKCLDLAQQNLYRDVMLENYRNLFSVGLTVCKPGLITCLEQRKEPWNVKRQEAADGHPAMSSHFTQDLLPEQGIQDAFPKRILRGYG

SEQ ID NO: 69686 - protein, 228 aa, Homo sapiens
MIYMESGIVKITSLDGHAYLCLPRSQHEFTVHFLCKVSQKSDSSAVLSETNNKAPKDKLVEKTGKICIRGNLPGQRLKNKENEFHCQIMKSKETLKKMSCVNGTEGREELPSPGTKHTCVYTWVKQCWSVAACPEEWKYPLSLALHFHNKISNMSKIDAHITQSRFLTSDISEERGKVVSVLPRALSLSCPVPHLHRWNFCDSLLQRQSDEYSYPELVKMVWYKGVTY

SEQ ID NO: 69687 - protein, 124 aa, Homo sapiens
MSPQLTSAFRNLPKTFVCHLNEMKTNKHTWNMLLFLRSWLHRSTTSPAYHVLVILFEEQGHTDGLHVRSGGSRMFGGSRSKINSARKTNKQVFVSYNLQNTDSNFALLVENRIKEEMEAFPEKF

SEQ ID NO: 69688 - protein, 578 aa, Homo sapiens
MPLPASAPAEATPMPSSEAQETEAAPEKENRVDVGAEERAAATRPRQKSWLVRHFSLLLRRDRQAQKAGQLFSGLLALNVVFLGGAFICSMIFNKVAVTLGDVWILLATLKVLSLLWLLYYVASTTRRPHAVLYQDPHAGPLWVRGSLVLFGSCTFCLNIFRVGYDVSHIRCKSQLDLVFSVIEMVFIGVQTWVLWKHCKDCVRVQTNFTRCGLMLTLATNLLLWVLAVTNDSMHREIEAELGILMEKSTGNETNTCLCLNATACEAFRRGFLMLYPFSTEYCLICCAVLFVMWKNVGRHVAPHMGAHPATAPFHLHGAIFGPLLGLLVLLAGVCVFVLFQIEASGPAIACQYFTLYYAFYVAVLPTMSLACLAGTAIHGLEERELDTVKNPTRSLDVVLLMGAALGQMGIAYFSIVAIVAKRPHELLNRLILAYSLLLILQHIAQNLFIIEGLHRRPLWETVPEGLAGKQEAEPPRRGSLLELGQGLQRASLAYIHSYSHLNWKRRALKEISLFLILCNITLWMMPAFGIHPEFENGLEKDFYGYQIWFAIVNFGLPLGVFYRMHSVGGLVEVYLGA

SEQ ID NO: 69689 - protein, 83 aa, Homo sapiens
MRIRMTDGRTLVGCFLCTDRDCNVILGSAQEFLKPSGQCPGNAHPPDSFSAGEPRVLGLAMVPGHHIVSIEVQRESLTGPPYL

SEQ ID NO: 69690 - protein, 549 aa, Homo sapiens
MSELSDEASEPELLNRSLSMWHGLGTQVSGEELDVPLDLHTAASIGQYEVVKECVQREPICGFTPLMEAAAAGHEIIVQYFLNHGVKVDARDHSGATARMLAKQYGHMKIVALMDTYSPSLPKSLYRSPEKYEDLSSSDESCPAPQRQRPCRKKGVSIHEGPRALARITGIGLGGRAPRPRYEQAPPRGYVTFNSSGENPLEEEGLCCRDVTSPINERDVESSSSSSSREEHAFCANLGPVQSSSSSEGLARAQGLSSEASVESNEDSDHACKSSARKQAKSYMKTKNPDSQWPPRAATDREGFLAESSPQTQRAPYSGPQDLAALLEQIGCLKYLQVFEEQDVDLRIFLTLTESDLKEIGITLFGPKRKMTSAIARWHSSARPPGDALELAYADRLEAEMQELAIQLHKRCEEVEATRGQVCQEQELRAVVESCLLEQDRAREDLQARLRETWALARDAALVLDQLRACQAELSSRVRQDQPPGAATLGLAVPPADSKGWQASLQAMSLPELSGALEDRVREMGQALCLVTQSLEKLQVLNGKKWRET

SEQ ID NO: 69691 - protein, 1539 aa, Homo sapiens
MPPQPPGSQSESSSHPALSQSPMPQERGFMAGTQRNPQMAQYGPQQTGPSMSPHPSPGGQMHAGISSFQQSNSSGTYGPQMSQYGPQGNYSRPPAYSGVPSASYSGPGPGMGISANNQMHGQGPSQPCGAVPLGRMPSAGMQNRPFPGNMSSMTPSSPGMSQQGGPGMGPPMPTVNRKAQEAAAAVMQAAANSAQSRQGSFPGMNQSGLMASSSPYSQPMNNSSSLMNTQAPPYSMAPAMVNSSAASVGLADMMSPGESKLPLPLKADGKEEGTPQPESKSKDSYSSQGISQPPTPGNLPVPSPMSPSSASISSFHGDESDSISSPGWPKTPSSPKSSSSTTTGEKITKVYELGNEPERKLWVDRYLTFMEERGSPVSSLPAVGKKPLDLFRLYVCVKEIGGLAQVNKNKKWRELATNLNVGTSSSAASSLKKQYIQYLFAFECKIERGEEPPPEVFSTGDTKKQPKLQPPSPANSGSLQGPQTPQSTGSNSMAEVPGDLKPPTPASTPHGQMTPMQGGRSSTISVHDPFSDVSDSSFPKRNSMTPNAPYQQGMSMPDVMGRMPYEPNKDPFGGMRKVPGSSEPFMTQGQMPNSSMQDMYNQSPSGAMSNLGMGQRQQFPYGASYDRRHEPYGQQYPGQGPPSGQPPYGGHQPGLYPQQPNYKRHMDGMYGPPAKRHEGDMYNMQYSSQQQEMYNQYGGSYSGPDRRPIQGQYPYPYSRERMQGPGQIQTHGIPPQMMGGPLQSSSSEGPQQNMWAARNDMPYPYQNRQGPGGPTQAPPYPGMNRTDDMMVPDQRINHESQWPSHVSQRQPYMSSSASMQPITRPPQPSYQTPPSLPNHISRAPSPASFQRSLENRMSPSKSPFLPSMKMQKVMPTVPTSQVTGPPPQPPPIRREITFPPGSVEASQPVLKQRRKITSKDIVTPEAWRVMMSLKSGLLAESTWALDTINILLYDDSTVATFNLSQLSGFLELLVEYFRKCLIDIFGILMEYEVGDPSQKALDHNAARKDDSQSLADDSGKEEEDAECIDDDEEDEEDEEEDSEKTESDEKSSIALTAPDAAADPKEKPKQASKFDKLPIKIVKKNNLFVVDRSDKLGRVQEFNSGLLHWQLGGGDTTEHIQTHFESKMEIPPRRRPPPPLSSAGRKKEQEGKGDSEEQQEKSIIATIDDVLSARPGALPEDANPGPQTESSKFPFGIQQAKSHRNIKLLEDEPRSRDETPLCTIAHWQDSLAKRCICVSNIVRSLSFVPGNDAEMSKHPGLVLILGKLILLHHEHPERKRAPQTYEKEEDEDKGVACSKDEWWWDCLEVLRDNTLVTLANISGQLDLSAYTESICLPILDGLLHWMVCPSAEAQDPFPTVGPNSVLSPQRLVLETLCKLSIQDNNVDLILATPPFSRQEKFYATLVRYVGDRKNPVCREMSMALLSNLAQGDALAARAIAVQKGSIGNLISFLEDGVTMAQYQQSQHNLMHMQPPPLEPPSVDMMCRAAKALLAMARVDENRSEFLLHEGRLLDISISAVLNSLVASVICDVLFQIGQL

SEQ ID NO: 69692 - protein, 83 aa, Homo sapiens
MDWFHCNQCFRKDGAHFFVTSCGHIFCKKCVTLEKCAVCGTACKHLALSDNLKPQEKMFFKSPVETALQYFSHISQTLYQQRR

SEQ ID NO: 69693 - protein, 1084 aa, Homo sapiens
  MOD_RES (1)..(1): Any amino acid
XPYKPQWCRSREAWALYLFSPQNRFRVSCQKVITHKMFDHVVLVFIFLNCVTIALERPDIDPGSTERVFLSVSNYIFTAIFVAEMMVKVVALGLLSGEHAYLQSSWNLLDGLLVLVSLVDIVVAMASAGGAKILGVLRVLRLLRTLRPLRVISRAPGLKLVVETLISSLRPIGNIVLICCAFFIIFGILGVQLFKGKFYYCEGPDTRNISTKAQCRAAHYRWVRRKYNFDNLGQALMSLFVLSSKDGWVNIMYDGLDAVGVDQQPVQNHNPWMLLYFISFLLIVSFFVLNMFVGVVVENFHKCRQHQEAEEARRREEKRLRRLERRRRSTFPSPEAQRRPYYADYSPTRRSIHSLCTSHYLDLFITFIICVNVITMSMEHYNQPKSLDEALKYCNYVFTIVFVFEAALKLVAFGFRRFFKDRWNQLDLAIVLLSLMGITLEEIEMSAALPINPTIIRIMRVLRIARVLKLLKMATGMRALLDTVVQALPQVGNLGLLFMLLFFIYAALGVELFGRLECSEDNPCEGLSRHATFSNFGMAFLTLFRVSTGDNWNGIMKDTLRECSREDKHCLSYLPALSPVYFVTFVLVAQFVLVNVVVAVLMKHLEESNKEAREDAELDAEIELEMAQGPGSARRVDADRPPLPQESPGARDAPNLVARKVSVSRMLSLPNDSYMFRPVVPASAPHPRPLQEVEMETYGAGTPLESCASLQIPLAVSSPARSGEPLHALSPRGTARSPSLSRLLCRQEAVHTDSLEGKIDSPRDTLDPAEPGEKTPVRPVTQGGSLQSPPRSPRPASVRTRKHTFGQRCVSSRPAAPGGEEAEASDPADEEVSHITSSACPWQPTAEPHGPEASPVAGGERDLRRLYSVDAQGFLDKPGRADEQWRPSAELGSGEPGEAKAWGPEAEPALGARRKKKMSPPCISVEPPAEDEGSARPSAAEGGSTTLRRRTPSCEATPHRDSLEPTEGSGAGGDPAAKGERWGQASCRAEHLTVPSFAFEPLDLGVPSGDPFLDGSHSVTPESRASSSGAIVPLEPPESEPPMPVGDPPEKRRGLYLTVPQCPLEKPGSPSATPAPGGGADDPV

SEQ ID NO: 69694 - protein, 42 aa, Homo sapiens
  MOD_RES (1)..(1): Any amino acid
XLCYDVDTGRELASKQVQFDPDSPETSKFPRQIPVRPLTRAS

SEQ ID NO: 69695 - protein, 49 aa, Homo sapiens
  MOD_RES (1)..(1): Any amino acid
XREAGEQGDIEPRRMVRHPDSHQLFIGNLPHEVDKSELKDFFQTHHVQR

SEQ ID NO: 69696 - protein, 153 aa, Homo sapiens
MLKKQSAGLVLWGAILFVAWNALLLLFFWTRPAPGRPPSVSALDGDPASLTREVIRLAQDAEVELERQRGLLQQIGDALSSQRGRVPTAAPPAQPRVPVTPAPAVIPILVIACDRSTVRRCLDKLLHYRPSAELFPIIVSQDCGHEETAQAIA

SEQ ID NO: 69697 - protein, 163 aa, Homo sapiens
MWLAAAAPSLARRLLFLGPPPPPLLLLVFSRSSRRRLHSLGLAAMPEKRPFERLPADVSPINYSLCLKPDLLDFTFEGKLEAAAQVRQATNQIVMNCADIDIITASYAPEGDEEIHATGFNYQNEDEKVTLSFPSTLQTGTGTLKIDFVGELNDKMKGFYRSY

SEQ ID NO: 69698 - protein, 70 aa, Homo sapiens
  MOD_RES (1)..(1): Any amino acid
XPQALTALEVTRSGLTVDQLHGVLSVWRTLPKGTKSWEEAVAAGNSGDPYPMGPFACLVQSLRSSALEDM

SEQ ID NO: 69699 - protein, 37 aa, Homo sapiens
MWASCCGLLNEVMGTGAVRGQQSAFAGATGPFRFTPN

SEQ ID NO: 69700 - protein, 60 aa, Homo sapiens
MFVELNNLLNTTPDRAEQGKLTLLCDAKTDGSFLVHHFLSFYLKGCQPDHGAGAWAACVP

SEQ ID NO: 69701 - protein, 107 aa, Homo sapiens
MLARALLLCAVLALSHTANPCCSHPCQNRGVCMSVGFDQYKCDCTRTGFYGENCSTPEFLTRIKLFLKPTPNTVHYILTHFKGFWNVVNNIPFLRNAIMSYVLTYHI

SEQ ID NO: 69702 - protein, 126 aa, Homo sapiens
MLRRALLCLAVAALVRADAPEEEDHVLVLRKSNFAEALAAHKYLLVEFYAPWCGHCKALAPEYAKAAGKLKAEGSEIRLAKVDATEESDLAQQYGVRGYPTIKFFRNGDTASPKEYTGLAERLMTS

SEQ ID NO: 69703 - protein, 1818 aa, Homo sapiens
  MOD_RES (1)..(1): Any amino acid
XLLAILDCVHVTTIFPISKMAKGEENKGSNVMRSIHGVGELMTQVVLRGGGFLPMTPMAAAPEGNVKQAEPEKEDIMVMDTKLKIIEILQFILNVRLDYRISCLLCIFKREFDESNSQTSETSSGNSSQEGPSNVPGALDFEHIEEQAEGIFGGSEENTPLDLDDHGGRTFLRVLLHLTMHDYPPLVSGALQLLFRHFSQRQEVLQAFKQVQLLVTSQDVDNYKQIKQDLDQLRSIVEKSELWVYKGQGPDETMDGASGENEHKKTEEGNNKPQKHESTSSYNYRVVKEILIRLSKLCVQESASVRKSRKQQQRLLRNMGAHAVVLELLQIPYEKAEDTKMQEIMRLAHEFLQNFCAGNQQNQALLHKHINLFLNPGILEAVTMQHIFMNNFQLCSEINERVVQHFVHCIETHGRNVQYIKFLQTIVKAEGKFIKKCQDMVMAELVNSGEDVLVFYNDRASFQTLIQMMRSERDRMDENSPLMYHIHLVELLAVCTEGKNVYTEIKCNSLLPLDDIVRVVTHEDCIPEVKIAYINFLNHCYVDTEVEMKEIYTSNHMWKLFENFLVDICRACNNTSDRKHADSILEKYVTEIVMSIVTTFFSSPFSDQSTTLQTRQPVFVQLLQGVFRVYHCNWLMPSQKASVESCIRVLSDVAKSRAIAIPVDLDSQVNNLFLKSHSIVQKTAMNWRLSARNAARRDSVLAASRDYRNIIERLQDIVSALEDRLRPLVQAELSVLVDVLHRPELLFPENTDARRKCESGGFICKLIKHTKQLLEENEEKLCIKVLQTLREMMTKDRGYGEKLISIDELDNAELPPAPDSENATEELEPSPPLRQLEDHKRGEALRQVLVNRYYGNVRPSGRRESLTSFGNGPLSAGGPGKPGGGGGGSGSSSMSRGEMSLAEVQCHLDKEGASNLVIDLIMNASSDRVFHESILLAIALLEGGNTTIQHSFFCRLTEDKKSEKFFKVFYDRMKVAQQEIKATVTVNTSDLGNKKKDDEVDRDAPSRKKAKEPTTQITEEVRDQLLEASAATRKAFTTFRREADPDDHYQPGEGTQATADKAKDDLEMSAVITIMQPILRFLQLLCENHNRDLQNFLRCQNNKTNYNLVCETLQFLDCICGSTTGGLGLLGLYINEKNVALINQTLESLTEYCQGPCHENQNCIATHESNGIDIITALILNDINPLGKKRMDLVLELKNNASKLLLAIMESRHDSENAERILYNMRPKELVEVIKKAYMQGEVEFEDGENGEDGAASPRNVGHNIYILAHQLARHNKELQSMLKPGGQVDGDEALEFYAKHTAQIEIVRLDRTMEQIVFPVPSICEFLTKESKLRIYYTTERDEQGSKINDFFLRSEDLFNEMNWQKKLRGTLEPHWSGLLWTAMLISLAIVIALPKPHGIRALIASTILRLIFSVGLQPTLFLLGAFNVCNKIIFLMSFVGNCGTFTRGYRAMVLDVEFLYHLLYLVICAMGLFVHEFFYSLLLFDLVYREETLLNVIKSVTRNGRSIILTAVLALILVYLFSIVGYLFFKDDFILEVDRLPNETAVPETGESLASEFLFSDVCRVESGENCSSPAPREELVPAEETEQDKEHTCETLLMCIVTVLSHGLRSGGGVGDVLRKPSKEEPLFAARVIYDLLFFFMVIIIVLNLIFGVIIDTFADLRSEKQKKEEILKTTCFICGLERDKFDNKTVTFEEHIKEEHNMWHYLCFIVLVKVKDSTEYTGPESYVAEMIKERNLDWFPRMRAMSLVSSDSEGEQNELRNLQEKLESTMKLVTNLSGQLSELKDQMTEQRKQKQRIGLLGHPPHMNVNPQQPA

SEQ ID NO: 69704 - protein, 141 aa, Homo sapiens
MVHLTPEEKTAVNALWGKVNVDAVGGEALGRLLVVYPWTQRFFESFGDLSSPDAVMGNPKVKAHGKKVLGAFSDGLAHLDNLKGTFSQLSELHCDKLHVDPENFRVCKKVPEALQIGSTCLFYKEYMGKEKSKGTVQGING

SEQ ID NO: 69705 - protein, 467 aa, Homo sapiens
  MOD_RES (1)..(1): Any amino acid
XKREAETFKEQGNAYYAKKDYNEAYNYYTKAIDMCPKNASYYGNRAATLMMLGRFREALGDAQQSVRLDDSFVRGHLREGKCHLSLGNAMAACRSFQRALELDHKNAQAQQEFKNANAVMEYEKIAETDFEKRDFRKVVFCMDRALEFAPACHRFKILKAECLAMLGRYPEAQSVASDILRMDSTNADALYVRGLCLYYEDCIEKAVQFFVQALRMAPDHEKACIACRNAKALKAKKEDGNKAFKEGNYKLAYELYTEALGIDPNNIKTNAKLYCNRGTVNSKLRKLDDAIEDCTNAVKLDDTYIKAYLRRAQCYMDTEQYEEAVRDYEKVYQTEKTKEHKQLLKNAQLELKKSKRKDYYKILGVDKNASEDEIKKAYRKRALMHHPDRHSGASAEVQKEEEKKFKEVGEAFTILSDPKKKTRYDSGQDLDEEGMNMGDFDPNNIFKAFFGGPGGFSFEANYQPLFS

SEQ ID NO: 69706 - protein, 102 aa, Homo sapiens
DEYCFYNGKTHRECPGCFVPFAVCVVSRFPYYNSLKDCLSWPRRKQLTTVPFCVIMLENEPRQIAELVLFLLLAKHSHLRPSALTRGTSPMESEQEPYCSNQ

SEQ ID NO: 69707 - protein, 483 aa, Homo sapiens
MGNCHTVGPNEALVVSGGCCGSDYKQYVFGGWAWAWWCISDTQRLSLEVMTILCRCENIETSEGVPLFVTGVAQVPCPCLLDCKWGNSKGFWKLCQVCQISLEIMTLQPRCEDVETAEGVALTVTGVAQVKIMTEKELLAVACEQFLGKNVQDIKNVVLQTLEGHLRSILGTLTVEQIYQDRDQFAKLVREVAAPDVGRMGIEILSFTIKDVYDKVDYLSSLGKTQTAVVQRDADIGVAEAERDAGIREAECKKEMLDVKFMADTKIADSKRAFELQKSAFSEEVNIKTAEAQLAYELQGAREQQKIRQEEIEIEVVQRKKQIAVEAQEILRTDKELIATVRRPAEAEAHRIQQIAEGEKVKQVLLAQAEAEKIRKIGEAEAAVIEAMGKAEAERMKLKAEAYQKYGDAAKMALVLEALPQIAAKIAAPLTKVDEIVVLSGDNSKVTSEVNRLLAELPASVHALTGVDLSKIPLIKKATGVQV

SEQ ID NO: 69708 - protein, 447 aa, Homo sapiens
  MOD_RES (1)..(1): Any amino acid
XHFSLTLNTNHGHILVDYSKNLVTEDVMRMLVDLAKSRGVEAARERMFNGEKINYTEGRAVLHVALRNRSNTPILVDGKDVMPEVNKVLDKMKSFCQRVRSGDWKGYTGKTITDVINIGIGGSDLGPLMVTEALKPYSSGGPRVWYVSNIDGTHIAKTLAQLNPESSLFIIASKTFTTQETITNAETAKEWFLQAAKDPSAVAKHFVALSTNTTKVKEFGIDPQNMFEFWDWVGGRYSLWSAIGLSIALHVGFDNFEQLLSGAHWMDQHFRTTPLEKNAPVLLALLGIWYINCFGCETHAMLPYDQYLHRFAAYFQQGDMESNGKYITKSGTRVDHQTGPIVWGEPGTNGQHAFYQLIHQGTKMIPCDFLIPVQTQHPIRKGLHHKIFVQGIIWDINSFDQWGVELGKQLAKKIEPELDGSAQVTSHDASTNGLINFIKQQREARVQ

SEQ ID NO: 69709 - protein, 1134 aa, Homo sapiens
MRMSDTVTVKDETATMKDLEAEVKDTTRVENLIKSENYGKILVEKNEHCIENNIDLQRPLQSFGQTGKRSKSSSKLKLVRSLAVCEESPPPPAPEISQENQEKIQIQLTQSFEKEEKPSKDEAEKEKASDKLPRKMLSRDSSQEYTDSTGIDLHEFLVNTLKNNPRDRMMLLKLEQEILDFIGNNESPRKKFPPMTSYHRMLLHRVAAYFGLDHNVDQSGKSVIVNKTSNTRIPDQKFNEHIKDDKGEDFQKRYILKRDNSSFDKDDNQMRIRLKDDRRSKSIEEREEEYQRARDRIFSQDSLCSQENYIIDKRLQDEDASSTQQRRQIFRVNKDASGRSTNSHQSSTENELKYSEPRPWSSTDSDSSLRNLKPAVTKASSFSGISVLTRGDSSGSSKSIGRLSKTGSESSGSVGSSTGSLSHIQQPLPGTALSQSSHGAPVVYPTVSTHSSLSFDGGLNGQVASPSTSFFLLPLEAAGIPPGSILINPQTGQPFINPDGSPVVYNPPMTQQPVRSQVPGPPQPPLPAPPQQPAANHIFSQPVHPLQSSSQPVQYSTAPYPSPFLPVSPTQQYSVQDNLGSQFSHMSLARQPSADGSDPHAAMFQSTVVLQSPQQSGYIMTAAPPPHPPPPPPPPPPPPPLPPGQPVPTAGYPASGHPVSQPVLQQQGYIQQPSPQMPACYCAPGHYHSSQPQYRPVPSVHYNSHLNQPLPQPAQQTGYQVIPNQQQNYQGIVGVQQPQSQSLVSGQPNSIGNQIQGVVIPYTSVPTYQVSLPQGSQGIPHQTYQQPVMFPNQSNQGSMPTTGMPVYYSVIPPGQQNNLSSSVGYLQHPGSEQVQFPRTTSPCSSQQLQGHQCTAGPPPPPGGGMVMMQLSVPNNPQSCAHSPPQWKQNKYYCDHQRGQKCVEFSSVDNIVQHSPQLSSPIISPAQSPAPAQLSTLKTVRPSGPPLSIMPQFSRPFVPGQGDSRYPLLGQPLQYNPPAVLHGHIPNQQGQPGSRHGNRGRRQAKKAASTDLGAGETVVGKVLEITELPDGITRMEAEKLFGELFKIGAKIRWLRDPQSQPRRHPLCCGSGDNTANPERSKPSDLASTYTVLATFPSISAAQNALKKQINSVNKFKLRTSKKHYDFHILERASSQ

SEQ ID NO: 69710 - protein, 58 aa, Homo sapiens
MGSRIELGDVTPHNIKQLKRLNQVIFPVSYNDKFYKDVLEKNLKVPSGQNADVQKTDN

SEQ ID NO: 69711 - protein, 158 aa, Homo sapiens
MTLRAAVFDLDGVLALPAVFGVLGRTEEALALPRGLLNDAFQKGGPEGATTRLMKGEITLSQWIPLMEENCRKCSETAKVCLPKNFSIKEIFDKAISARKINRPMLQAALMLRKKGFTTAILTNTWLDDRAERDGLAQLMCELKMHFDFLIESCQVGM

SEQ ID NO: 69712 - protein, 23 aa, Homo sapiens
MTSQPVPNETIIVLPSNVINFSQ

SEQ ID NO: 69713 - protein, 740 aa, Homo sapiens
RPRNPYVKMYFLPDRSDKSKRRTKTVKKILEPKWNQTFVYSHVHRRDFRERMLEITVWDQPRVQEEESEFLGEILIELETALLDDEPHWYKLQTHDESSLPLPQPSPFMPRRHIHGESSSKKLQRSQRISDSDISDYEVDDGIGVVPPVGYRSSARESKSTTLTVPEQQRTTHHRSRSVSPHRGNDQGKPRSRLPNVPLQRSLDEIHPTRRSRSPTRHHDASRSPVDHRTRDVDSQYLSEQDSELLMLPRAKRGRSAECLHTTSELQPFLDRARSASTNCLRPDTSLHSPERERMHRQRSPTQSPPADTSFSSRRGRQLPQVPVRSGSIEQASLVVEERTRQMKMKVHRFKQTTGSGSSQELDREQYSKYNIHKDQYRSCDNVSAKSSDSDVSDVSAISRTSSASRLSSTSFMSEQSERPRGRISSFTPKMQGRRMGTSGRSIMKSTSVSGEMYTLEHNDGSQSDTAVGTVGAGGKKRRSSLSAKVVAIVSRRSRSTSQLSQTESGHKKLKSTIQRSTETGMAAEMRKMVRQPSRESTDGSINSYSSEGNLIFPGVRLGADSQFSDFLDGLGPAQLVGRQTLATPAMGDIQIGMEDKKGQLEVEVIRARSLTQKPGSKSTPAPYVKVYLLENGACIAKKKTRIARKTLDPLYQQSLVFDESPQGKVLQVIVWGDYGRMDHKCFMGVAQILLEELDLSSMVIGWYKLFPPSSLVDPTLTPLTRRASQSSLESSTGPPCIRS

SEQ ID NO: 69714 - protein, 219 aa, Homo sapiens
MDPMELRNVNIEPDDESSSGESAPDSYIGIGNSEKAAMSSQFANEDTESQKFLTNGFLGKKKLADYADEHHPGTTSFGMSSFNLSNAIMGSGILGLSYAMANTGIILFIIMLLAVAILSLYSVHLLLKTAKEGGSLIYEKLGEKAFGWPGKIGAFVSITMQNIGAMSSYLFIIKYELPEVIRAFMGLEENTGEWYLNGNYLIIFVSVGIILPLSLLKNL

SEQ ID NO: 69715 - protein, 1000 aa, Homo sapiens
MSVSFHTHTKELWTWMEDLQKEMLEDVCADSVDAVQELIKQFQQQQTATLDATLNVIKEGEDLIQQLRDSAVSNNKTPHSSSISHIESVLQQLDDAQVQMEELFHERKIKLDIFLQLRIFEQYTIEVTAELDAWNEDLLRQMNDFNTEDLTLAEQRLQRHTERKLAMNNMTFEVIQQGQDLHQYITEVQASGIELICEKDIDLAAQVQELLEFLHEKQHELELNAEQTHKRLEQCLQLRHLQAEVKQVLGWIRNGESMLNASLVNASSLSEAEQLQREHEQFQLAIEKTHQSALQVQQKAEVLLQAGHYDADAIRECAEKVALHWQQLMLKMEDRLKLVNASVAFYKTSEQVCSVLESLEQEYRRDEDWCGGRDKLGPAAEIDHVIPLISKHLEQKEAFLKACTLARRNAEVFLKYIHRNNVSMPSVASHTRGPEQQVKAILSELLQRENRVLHFWTLKKRRLDQCQQYVVFERSAKQALDWIQETGEFYLSTHTSTGETTEETQELLKEYGEFRVPAKQTKEKVKLLIQLADSFVEKGHIHATEIRKWVTTVDKHYRDFSLRMGKYRYSLEKALGVNTEDNKDLELDIIPASLSDREVKLRDANHEVNEEKRKSARKKEFIMAELLQTEKAYVRDLHECLETYLWEMTSGVEEIPPGILNKEHIIFGNIQEIYDFHNNIFLKELEKYEQLPEDVGHCFVTWADKFQMYVTYCKNKPDSNQLILEHAGTFFDEIQQRHGLANSISSYLIKPVQRITKYQLLLKELLTCCEEGKGELKDGLEVMLSVPKKANDAMHVSMLEGFDENLDVQGELILQDAFQVWDPKSLIRKGRERHLFLFEISLVFSKEIKDSSGHTKYVYKNKLLTSELGVTEHVEGDPCKFALWSGRTPSSDNKTVLKASNIETKQEWIKNIREVIQERIIHLKGALKEPLQLPKTPAKQRNNSKRDGVEDIDSQGDGSSQPDTISIASRTSQNTVDSDKDGNLVPRWHLGPGDPFSTYV

SEQ ID NO: 69716 - protein, 91 aa, Homo sapiens
MAWQGLVLAACLLMFPSTTADCLSRCSLCAVKTQDGPKPINPLICSLQCQAALLPSEEWERCQSFLSFFTPSTLGLNDKEDLGSKSVGEGP

SEQ ID NO: 69717 - protein, 511 aa, Homo sapiens
QIDQFLVVARSVGTFARALDCSSSVRQPSLHMSAAAASRDITLFHAMDTLHKNIYDISKAISALVPQGGPVLCRDEMEEWSASEANLFEEALEKYGKDFTDIQQDFLPWKSLTSIIEYYYMWKTTDRYVQQKRLKAAEAESKLKQVYIPNYNKPNPNQISVNNVKAGVVNGTGAPGQSPGAGRACESCYTTQSYQWYSWGPPNMQCRLCASCWTYWKKYGGLKMPTRLDGERPGPNRSNMSPHGLPARSSGSPKFAMKTRQAFYLHTTKLTRIARRLCREILRPWHAARHPYLPINSAAIKAECTARLPEASQSPLVLKQAVRKPLEAVLRYLETHPRPPKPDPVKSVSSVLSSLTPAKVAPVINNGSPTILGKRSYEQHNGVDGNMKKRLLMPSRGTYLGLANHGQARHMGPSRNLLLNGKSYPTKVRLIRGGSLPPVKRRRMNWIDAPDDVFYMATEETRKIRKLLSSSETKRAARRPYKPIALRQSQALPPRPPPPAPVNDEPIVIED

SEQ ID NO: 69718 - protein, 119 aa, Homo sapiens
MRLPKNTPEEKDRRTAALQEGLRRAVSVPLTLAETVASLWPALQELARCGNLACRSDLQVAAKALEMGVFGAYFNVLINLRDITDEAFKDQIHHRVSSLLQEAKTQAALVLDCLETRQE

SEQ ID NO: 69719 - protein, 189 aa, Homo sapiens
  MOD_RES (1)..(1): Any amino acid
XLDNSLNSQSNTNTDRFLQQLTEENFELISKLWTDIQQKIATQSQITPPGTPSSALSSGEQRAALNATNAVKRLQTRLQPEESTETLDSSYVVGHVLNSRKQKQLLNKEGAKRTIEVSIPGAEAPESSKCSTVSPVSGINTRRSSGATGNSCSPLNATSGSGRFTPLNPRAKIEKQNEEGWFALSTHVS

SEQ ID NO: 69720 - protein, 117 aa, Homo sapiens
  MOD_RES (1)..(1): Any amino acid
XLHNFSARLWEQLVHFHVMRLTDSLFLWVGATPHLRNLAVAMCSRYVPCPHHLHDADLLGPPGKLFLQLCKETDPVSPGQAAHRGQDSSCSHSPGSPVRVPQKGERSFFFFFFFASG

SEQ ID NO: 69721 - protein, 637 aa, Homo sapiens [sequence omitted]

SEQ ID NO: 69722 - protein, 89 aa, Homo sapiens
MAEGEDVGWWRSWLQQSYQAVKEKSSEALEFMKRDLTEFTQVVQHDTACTIAATASVVKEKLAGPRNCLTPGFPSSAWRRRRGRSQSSL

SEQ ID NO: 69723 - protein, 93 aa, Homo sapiens
MSSSGLNSEKVAALIQKLNSDPQFVLAQNVGTTHDLLDICLKRATVQRAQHVFQHAVPQEGKPITNQKSSGVGFHFSHTFLDLPDSVPFWCLI

SEQ ID NO: 69724 - protein, 391 aa, Homo sapiens
MKSWQLIAVVGDALQDIKADCNTCVEIEDRKVSRQQMNCEREQLRGNQEAAAAPDTMAQPYASAQFAPPQNGIPAEYTAPHPHPAPEYTGQTTVPEHTLNLYPPAQTHSEQSPADTSAQTVSGTATTDDAAPTDGQPQTQPSENTENKSQPKRLHVSNIPFRFRDPDLRQMFGGFGFVTFENSADADRAREKLHGTVVEGRKIEVNNATARVMTNKKTVNPYTNGWKLNPVVGAVYSPEFYAGTVLLCQANQEGSSMYSAPSSLVYTSAMPGFPYPAATAAAAYRGAHLRGRGRTVYNTFRAAAPPPPIPAYGGVVYQDGFYGADIYGGYAAYRYAQPTPATAAAYSDRNQFVFVAADEISCNTSAVTDEFMLPTPTTTHLLQPPPTALVP

SEQ ID NO: 69725 - protein, 150 aa, Homo sapiens
MGLTVSALFSRIFGKKQMRILMVGLDAAGKTTILYKLKLGEIVTTIPTIGFNVETVEYKNICFTVWDVGGQDKIRPLWRHYFQNTQGLIFVVDSNDRERVQESADELQKMEDELRDAVLLVFANKQDMPNAMPVSELTDKLGLQHLRSRT

SEQ ID NO: 69726 - protein, 139 aa, Homo sapiens
MQAMDPAAADLYEEDGKDLDFYDFEPLPTLPEDEENVSLADILSLRDRGLSEQEAWAVCLECSLSMRSVAHAAIFQSLCITPDTLAFNTSGNVCFMEQLSDDPEGAFVPPEFDVTGNTFEPSAATMNPASRHSSPHLGS

SEQ ID NO: 69727 - protein, 103 aa, Homo sapiens [sequence omitted]

SEQ ID NO: 69728 - protein, 225 aa, Homo sapiens
MFLRGRPVPMMIPDELAPTYSLDTRSELPSCRLKLEWVYGYRGRDCRANLYLLPTGEIVYFVASVAVLYSVEEQRQRHYLGHNDDIKCLAIHPDMVTIATGQVAGTTKEGKPLPPHVRIWDSVSLSTLHVLGLGVFDRAVCCVGFSKSNGGNLLCAVDESNDHMLSVWDWAKETKVVDVKCSNEAVLVATFHPTDPTVLITCGKSHIYFWTLEGGSLSKRQGLFE

SEQ ID NO: 69729 - protein, 680 aa, Homo sapiens
MFLGLCDFAKMHHQQRMAALGTDKELSDLLDFSAMFSPPVSSGKNGPTSLASGHFTGSNVEDRSSSGSWGNGGHPSPSRNYGDGTPYDHMTSRDLGSHDNLSPPFVNSRIQSKTERGSYSSYGRESNLQGCHQQSLLGGDMDMGNPGTLSPTKPGSQYYQYSSNNPRRRPLHSSAMEVQTKKVRKVPPGLPSSVYAPSASTADYNRDSPGYPSSKPATSTFPSSFFMQDGHHSSDPWSSSSGMNQPGYAGMLGNSSHIPQSSSYCSLHPHERLSYPSHSSADINSSLPPMSTFHRSGTNHYSTSSCTPPANGTDSIMANRGSGAAGSSQTGDALGKALASIYSPDHTNNSFSSNPSTPVGSPPSLSGTAVWSRNGGQASSSPNYEGPLHSLQSRIEDRLERLDDAIHVLRNHAVGPSTAMPGGHGDMHGIIGPSHNGAMGGLGSGYGTGLLSANRHSLMVGTHREDGVALRGSHSLLPNQVPVPQLPVQSATSPDLNPPQDPYRGMPPGLQGQSVSSGSSEIKSDDEGDENLQDTKSSEDKKLDDDKKDIKSITRSRSSNNDDEDLTPEQKAEREKERRMANNARERLRVRDINEAFKELGRMVQLHLKSDKPQTKLLILHQAVAVILSLEQQVRERNLNPKAACLKRREEEKVSSEPPPLSLAGPHPGMGDASNHMGQM

SEQ ID NO: 69730 - protein, 149 aa, Homo sapiens
MSLSRSEEMHRLTENVYKRVEEKYQRNLFPIFSPSALKPESRNFRGESWQGTIMEQFNPSLRNFIAMGKNYEKALAGVTYAAKGYFDALVKMGELASESQGSKELGDVLFQMAEVHRQIQNQLEEMLKSFHNELLTQLEQKVELDSRLR

SEQ ID NO: 69731 - protein, 64 aa, Homo sapiens
  MOD_RES (1)..(1): Any amino acid
XTGCLTLSQYILLDPILMFFIMAAMLSMVKYNSCADSGPGDGFFSSAFQARLSGNNLHNASIPE

SEQ ID NO: 69732 - protein, 201 aa, Homo sapiens
MCGQKFELKIDNVRFVGHPTLLQHALGQISKTDPSPKREAPTMILFNVVFALRANADPSVINCLHNLSRRIATVLQHEERRCQYLTREAKLILALQDEVSAMADGNEGPQSPFHHILPKCKLARDLKEAYDSLCTSGVVRLHINSWLEVSFCLPHKIHYAASSLIPPEAIERSLKAIRPYHALLLLSDEKSLLGELPIDCS

SEQ ID NO: 69733 - protein, 104 aa, Homo sapiens
MSEKSVEAAAELSAKDLKEKKEKVEEKASRKERKKEVVEAPVPLVVMVGKACSQPEATPSPGPHRRRRTGLRRKKKKLPRMERRKMKGKKKMRKKKKRMMKGPR

SEQ ID NO: 69734 - protein, 155 aa, Homo sapiens
MMLGTEGGEGFVVKVRGLPWSCSADEVQRFFSVFKSNNVEMDWVLKHTGPNSPDTANDGFVRLRGLPFGCSKEEIVQFFSGLEIVPNGITLPVDFQGRSTGEAFVQFASQEIAEKALKKHKERIGHRYIEIFKSSRAEVRTHYDPPRKLMAMQRP

SEQ ID NO: 69735 - protein, 110 aa, Homo sapiens
MAFQPPYSSSLFRKRDNASGASVVAIDNKIEQAMDLVKNHLMYAVREEVEILKEQIRELVEKNSQLERENTLLKTLASPEQLEKFQSCLSPEEPAPESPQVPEAPGGSAV

SEQ ID NO: 69736 - protein, 772 aa, Homo sapiens
MGVDFDVKTFCHNLRATKPPYECPVETCRKVYKSYSGIEYHLYHYDHDNPPPPQQTPLRKHKKKGRQSRPANKQSPSPSEVSQSPGREVMSYAQAQRMVEVDLHGRVHRISIFDNLDVVSEDEEAPEEAPENGSNKENTETPAATPKSGKHKNKEKRKDSNHHHHHNVSASTTPKLPEVVYRELEQDTPDAPPRPTSYYRYIEKSAEELDEEVEYDMDEEDYIWLDIMNERRKTEGVSPIPQEIFEYLMDRLEKESYFESHNKGDPNALVDEDAVCCICNDGECQNSNVILFCDMCNLAVHQECYGVPYIPEGQWLCRRCLQSPSRAVDCALCPNKGGAFKQTDDGRWAHVVCALWIPEVCFANTVFLEPIDSIEHIPPARWKLTCYICKQRGSGACIQCHKANCYTAFHVTCAQQAGLYMKMEPVRETGANGTSFSVRKTAYCDIHTPPGSARRLPALSHSEGEEDEDEEEDEGKGWSSEKVKKAKAKSRIKMKKARKILAEKRAAAPVVSVPCIPPHRLSKITNRLTIQRKSQFMQRLHSYWTLKRQSRNGVPLLRRLQTHLQSQRNCDQVGRDSEDKNWALKEQLKSWQRLRHDLERARLLVELIRKREKLKRETIKVQQIAMEMQLTPFLILLRKTLEQLQEKDTGNIFSEPVPLSEVPDYLDHIKKPMDFFTMKQNLEAYRYLNFDDFEEDFNLIVSNCLNSRGRAAGLAGEPEAPASGRTAKAASGAAGRSECQQAECGPLTACKDDQERDDGTAAEACPSARDGT

SEQ ID NO: 69737 - protein, 125 aa, Homo sapiens
MAGWQSYVDNLMCDGCCQEAAIVGYCDAKYVWAATAGGVFQSITPIEIDMIVGKDREGFFTNGLTLGAKKCSVIRDSLYVDGDCTMDIRTKSQVLVFVMGKEGVHGGGLNKKAYSMAKYLRDSGF

SEQ ID NO: 69738 - protein, 417 aa, Homo sapiens
MPSEGRCWETLKALRSSDKGRLCYYRDWLLRREDVLEECMSLPKLSSYSGWVVEHVLPHMQENQPLSETSPSSTSASALDQPSFVPKSPDASSAFSPASPATPNGTKGKDESQHTESMVLQSSRGIKVEGCVRMYELVHRMKGTEGLRLWQEEQERKVQALSEMASEQLKRFDEWKELKQHKEFQDLREVMEKSSREALGHQEKLKAEHRHRAKILNLKLREAEQQRVKQAEQERLRKEEGQIRLRALYALQEEMLQLSQQLDASEQHKALLKVDLAAFQTRGNQLCSLISGIIRASSESSYPTAESQAEAERALREMRDLLMNLGQEITRACEDKRRQDEEEAQVKLQEAQMQQGPEAHKEPPAPSQGPGGKQNEDLQVKVQDITMQWYQQLQDASMQCVLTFEGLTNSKDSQAQN

SEQ ID NO: 69739 - protein, 206 aa, Homo sapiens
MRMSSKFPSPPLPIFLPPEPVDLGSITSSSCSLNELDNISHLLRKISADINEIKGMKAAILTVEANLFDLNVRVSKNEAKISSLEVKMNEYSTTYECNRQFEDQEEDTESQSRTTDVKIIGFLRNVEKDYYDMESMVHADTRSFILKKPKLSEEVVVAPNQESGMKTADSLRVLSGHLMQTRDLVQPDKPASPKFIVTLDGVPSPP

SEQ ID NO: 69740 - protein, 144 aa, Homo sapiens
  MOD_RES (1)..(1): Any amino acid
XTAGELPANSVSGFFKRMVKSEASNAATAYFRPARPLPSLVTVLGLGYFAWVVFWPQSIPYQNLGPLGPFTQYLVDHHHTLLCNGYWLAWLIHVGESLYAIVLCKHKGITSGRAQLLWFLQTFFFGIASLTILIAYKRKRQKQT

SEQ ID NO: 69741 - protein, 153 aa, Homo sapiens
MTTEVGSVSEVKKDSSQLGTDATKEKPKEVAENQQNQSSDPEEEKGSQPPPAAESQSSLRRQKREKETSESRGISRFIPPWLKKQKSYTLVVAKDGGDKKEPTQAVVEEQVLDKEEPLPEEQRQAKGDAEEMAQKKQEIKVEVKEEKPSVSKE

SEQ ID NO: 69742 - protein, 266 aa, Homo sapiens
MPIRALCTICSDFFDHSRDVAAIHCGHTFHLQCLIQWFETAPSRTCPQCRIQEEENVLDAEFLKNELDNVRAQLSQKDKEKRDSQVIIDTLRDTLEERNATVVSLQQALGKAEMLCSTLKKQMKYLEQQQDETKQAQEEARRLRSKMKTMEQIELLLQSQRPEVEEMIRDMGVGQSAVEQLAVYCVSLKKEYENLKEARKASGEVADKLRKDLFSSRSKLQTVYSELDQAKLELKSAQKDLQSADKEIMSLKKKLTMLQETLNLPP

SEQ ID NO: 69743 - protein, 106 aa, Homo sapiens
MEDDIDKIKPSESNVTILGRFDYSQCDIWYMRFSMDFWQKMLALGNQVGKLYVWDLEVEDPHKAKCTTLTHHKCGAAIRQTSFSRDSSILIAVCDDASIWRWDRLR

SEQ ID NO: 69744 - protein, 350 aa, Homo sapiens
MAAVSGLVRRPLREVTVRDAINQGMDEELERDEKVFLLGEEVAQYDGAYKVSRGLWKKYGDKRIIDTPISEMGFAGIAVGAAMAGLRPICEFMTFNFSMQAIDQVINSAAKTYYMSGGLQPVPIVFRGPNGASAGVAAQHSQCFAAWYGHCPGLKVVSPWNSEDAKGLIKSAIRDNNPVVVLENELMYGVPFEFPPEAQSKDFLIPIGKAKIERQGTHITVVSHSRPVGHCLEAAAVLSKEGVECEVINMRTIRPMDMETIEASVMKTNHLVTVEGGWPQFGVGAEICARIMEGISKKLVLEYSQAIVNIMYLNTYRIKRLKARSGQTTSTLNLSCVQFPGCSCCSCHWC

SEQ ID NO: 69745 - protein, 244 aa, Homo sapiens
MKRLAARCFAGLLILSPLTVISDSRPADSGKAIEDGNLEEMEEEVRLKKRKRRRNVDKDPAKEDVEKAKKRRGRPPAEKLSPNPPKLTKQMNAIIDTVINYKDRCNVEKVPSNSQLEIEGNSSGRQLSEVFIQLPSRKELPEYYELIRKPVDFKKIKERIRNHKYRSLGDLEKDVMLLCHNAQTFNLEGSQIYEDSIVLQSVFKSARQKIAKEEESEDESNEEEEEEDEEESESEAKSVKVKIK

SEQ ID NO: 69746 - protein, 93 aa, Homo sapiens
SPVITFPDYPAFSEIPDKEFQNVMTYLTSIPSILFMESAASEHWGQVAEALPFLPPGSARTAVTTSPRGPLPAPSQNVFPRSFSVTAVEFNSY

SEQ ID NO: 69747 - protein, 265 aa, Homo sapiens
MSFLTNDASSESIASFSKQEVMSSFLPEGGCYELLTVIGKGFEDLMTVNLARYKPTGEYVTVRRINLEACSNEMVTFLQGELHVSKLFNHPNIVPYRATFIADNELWVVTSFMAYGSAKDLICTHFMDGMNELAIAYILQGVLKALDYIHHMGYVHRSVKASHILISVDGKVYLSGLRSNLSMISHGQRQRVVHDFPKYSVKVLPWLSPEVLQQGYDAKSDIYSVGITACELANGHVPFKDMPATQMLLEKLNGTVPCLLDTSTI

SEQ ID NO: 69748 - protein, 146 aa, Homo sapiens
MEKKECPEKSSSSEEELPRRDSGSSRNIDASKLIRLQGSRKLLVDNSIRELQYTKTGIFFQAEACVTNDTVYRELPCVSETLCDISHFFQEDDETEAEPLLFRAVPECQLSGGDIPSLDPPSLRELSVMTGVFHSLLHSVIAVSDM

SEQ ID NO: 69749 - protein, 300 aa, Homo sapiens
MQLFEQPCPGEDPRPGGQIGEVELSSYTPPAGVPGKPAAPHFLPVLCSVSPSGSRVPHDLLGGSGGFTLEDALFGLLFGADATLLQSPVVLCGLPDGQLCCVILKALVTSRSAPGDPNALVKILHHLEEPVIFIGALKTEPQAAEAAENFLPDEDVHCDCLVAFGHHGRMLAIKASWDESGKLVPELREYCLPGPVLCAACGGGGRVYHSTPSDLCVVDLSRGSTPLGPEQPEEGPGGLPPMLCPASLNICSVVSLSASPRTHEGGTKLLALSAKGRLMTCSLDLDSEMPGPARMTTESA

SEQ ID NO: 69750 - protein, 121 aa, Homo sapiens
MALSKSMHARNRYKDKPPDFAYLASKYPDFKQHVQINLNGRVSLNFKDPEAVRALTCTLLREDFGLSIDIPLERLIPTVPLRLNYIHWVEDLIGHQDSDKSTLRRGIDIGSKLTKSSKTSA

SEQ ID NO: 69751 - protein, 263 aa, Homo sapiens
  MOD_RES (1)..(1): Any amino acid
XVEAADSAHIVAHAAVASGRHEHHDVAEQYFQESMAHLKDSEGMGRTKFLSIQDEFCHFLQMTGQKERATSILRESLEAKVEAFGDFSPEVAETYRLLGGADLAQGNHSGARKKLKKAITRATFKNRNWSPSSDPSEHPNQRSVTRRHPRSMLIPSQQGLRMRSSFSHSRETLVSCSQRHFHSLMIAAWCSTVSPDPDPLIWTAGQKDSGHPAGHGHAVHGPQGCFEAKAGIKSQSGLLHQHPSGHPAGEGPARHNSRLRPPP

SEQ ID NO: 69752 - protein, 76 aa, Homo sapiens
KPFNPLLGETYELIREDLGFRFISEQVSHHPPISAFHSEGLNHDFLFHGSIYPKLKFWGKSVEAEPRGTITLELLK

SEQ ID NO: 69753 - protein, 257 aa, Homo sapiens
MTPRSAGTSAHGAELKRCGMARACLQAVKYLMFAFNLLFWLGGCGVLGVGIWLAATQGSFATLSSSFPSLSAANLLIITGAFVMAIGFVGCLGAIKENKCLLLTFFLLLLLVFLLEATIAILFFAYTDKIDRYAQQDLKKGLHLYGTQGNVGLTNAWSIIQTDFRCCGVSNYTDWFEVYNATRVPDSCCLEFSESCGLHAPGTWWKAPCYETVKVWLQENLLAVGIFGLCTALVQILGLTFAMTMYCQVVKADTYCA

SEQ ID NO: 69754 - protein, 84 aa, Homo sapiens
MRSRLLLSVAHLPTIRETTEEMLLGGPGQEPPPSPSLDDYVRSISRLAQPTSVLDKATAQGQPRPPHRPAQACRKGRPAVSLRD

SEQ ID NO: 69755 - protein, 177 aa, Homo sapiens
MDLVLRVADYYFFTPYVYPATWPEDDIFRQAISLLIVTNVGAYILYFFCATLSYYFVFDHALMKHPQFLKYWKFHFQNQVRREIKFTVQALPWISILTVALFLLEIRGYSKLHDDLGEFPYGLFELVVSIISFLFFTDMFIYWIHRGLHHRLVYKRLHKPHHIWKIPTPFASHAFHP

SEQ ID NO: 69756 - protein, 462 aa, Homo sapiens
MTAWTMGARGLDKRGSFFKLIDTIASEIGELKQEMVRTDVNLENGLEPAETHSMVRHKDGGYSEEEDVKTCARDSGYDSLSNRLSILDRLLHTHPIWLQLSLSEEEAAEVLQAQPPGIFLVHKSTKMQKKVLSLRLPCEFGAPLKEFAIKESTYNVVLEKAMHKCILKPLKGHVEAMLKDFHMADGSWKQLKENLQLVRQRNPQELGVFAPTPDFVDVEKIKVKFMTMQKMYSPEKKVMLLLRVCKLIYTVMENNSGRMYGADDFLPVLTYVIAQCDMLELDTEIEYMMELLDPSLLHGEGGYYLTSAYGALSLIKNFQEEQAARLLSSETRDTLRQWHKRRTTNRTIPSVDDFQNYLRVAFQEVNSGCTGKTLLVRPYITTEDVCQICAEKFKVGDPEEYSLFLFVDETWQQLAEDTYPQKIKAELHSRPQPHIFHFVYKRIKNDPYGIIFQNGEEDLTTS

SEQ ID NO: 69757 - protein, 82 aa, Homo sapiens
MGSYLSVPAYFTSRDLFRCSECQDSLTNWYYEKDGKLYCPKDYWGKFGEFCHGCSLLMTGPFMVSESLHICPSWSSESIDSA

SEQ ID NO: 69758 - protein, 194 aa, Homo sapiens
  MOD_RES (1)..(1): Any amino acid
XFLFYRQQKWASGVIAIAWLLYCHKTRLKKILKESRQRHLENFRIRAKHLAANWNRIRTSRRTIIHIPSLGYSQPVREHIADFNTQQNMQLGRLCDILDANVNVIYICSHHMNDELVLYYKKILSLHAAVKSGNLEDRSDLQDRFKIITPEAVNIFPMIEQLSQLITDHLQIQRWLFKMDSEFRGNGTAFCDIP

SEQ ID NO: 69759 - protein, 39 aa, Homo sapiens
MQVTEAPVTQEAVNGHGALEVDMALGSPEMDVRKKKKKK

SEQ ID NO: 69760 - protein, 91 aa, Homo sapiens
MASLMSAFTLVQQEIYQWCGSSCNKYERLKANQVATGIRYNERKGRSELIVVEEGSEPSELIKVLGEKPELPDGGDDDDIIADISNRKMAK

SEQ ID NO: 69761 - protein, 85 aa, Homo sapiens
MSKGRAEAAAGAAGILLRYLQEQNRPYSSQDVFGNLQREHGLGKAVVVKTLEQLAQQGKIKEKMYGKQKIYFADQVRRTCADCHP

SEQ ID NO: 69762 - protein, 309 aa, Homo sapiens
  MOD_RES (1)..(1): Any amino acid
XLDGSDEASCPVLTCGPASFQCNSSTCIPQLWACDNDPDCEDGSDEWPQRCRGLYVFQGDSSPCSAFEFHCLSGECIHSSWRCDGGPDCKDKSDEENCAVATCRPDEFQCSDGNCIHGSRQCDREYDCKDMSDEVGCVNVTLCEGPNKFKCHSGECITLDKVCNMARDCRDWSDEPIKECDIDECQDPDTCSQLCVNLEGGYKCQCEEGFQLDPHTKACKAVGSIAYLFFTNRHEVRKMTLDRSEYTSLIPNLRNVVALDTEVASNRIYWSDLSQRMICSTQLDRAHGVSSYDTVISRDIQAPDGLAVD

SEQ ID NO: 69763 - protein, 66 aa, Homo sapiens
MDDKASVGKISVSSDSVSTLNSEDFVLVSRQGDETPSTNNGSDDEKTGLKILKLQVLSHQWPMRTA

SEQ ID NO: 69764 - protein, 78 aa, Homo sapiens
AAAVSGVYRRAGRDVAALASRLAAAQAAGLAAAHSVRLARGDLCALAERLDIVAGCRLLPDIRGVPGTEPEKDPGPRA

SEQ ID NO: 69765 - protein, 395 aa, Homo sapiens
MTINGLETAEGLDCVRTIEELARVLRKHSGLRNILPITTAKVPIVKFFHLRSGLEVDISLYNTLALHNTRLLSAYSAIDPRVKYLCYTMKVFTKIYKGEKKPEIFVDGWNIYFFDQIDELPTYWSECGKNTESVGQLWLGLLRFYTEEFDFKEHVISIRRKSLLTTFKKQWTSKYIVIEDPFDLNHNLGAGLSRKMTNFIMKAFINGRRVFGIPVKGFPKDYPSKMEYFFDPDVLTEGELAPNDRCCRICGKIGHFMKDCPMRRKVRRRRDQEDALNQRYPENKEKRSKEDKEIHNKYTEREVSTKEDKPIQCTPQKAKPMRAAADLGREKILRPPVEKWKRQDDKDLREKRCFICGREGHIKKECPQFKGSSGSLSSKYMTQGKASAKRTQQES

SEQ ID NO: 69766 - protein, 67 aa, Homo sapiens
MTPNSMTENGLTAWDKPKHCPDREHDWKLVGMSEACLHRKSHSERRSTLKNEQSSPHLIQTTWTSSI

SEQ ID NO: 69767 - protein, 100 aa, Homo sapiens
MPPCSGGDGSTPPGPSLRDRDCPAQSAEYPRDRLDPRPGSPSEASSPPFLRRAPVNWYQEKAQVFLWHLMVSGSTTLLCLWKQPFHVSAFPVTASLAFRQ

SEQ ID NO: 69768 - protein, 199 aa, Homo sapiens
MESVRGQLQTMLQTSRDTAYRDPLIPGAGSERREEDSFDSDSTATLLNTRPLQDLSPSSSAQALEELFPRYTSLRPGPPLNPPDFQGLRDALDSEHTRRKHCERHIQSLQTRVLELQQQLAVAVAADRKKDTMIEQLDKTLARVVEGWNRHEAERTEVLRGLQEEHQAAELTRSKQQETVTRLEQSLSEAMEALNREQE

SEQ ID NO: 69769 - protein, 317 aa, Homo sapiens
  MOD_RES (1)..(1): Any amino acid
XDQTLLQKLQMQIGSHEHFNSWNQGFIIHHYAGKVSYDMDGFCERNRDVLFMDLIELMQSSELPFIKSLFPENLQADKKGRPTTAGSKIKKQANDLVSTLMKCTPHYIRCIKPNETKKPRDWEESRYAILTKATWPSWQGEEKQGVLHLLQSVNMDSDQFQLGRSKVFIKAPESLFLLEEMRERKYDGYARVIQKSWRKFVARKKYVQMREEASDLLLNKKERRRNSINRNFIGDYIGMEEHPELQQFVGKREKIDFADTVTKYDRRFKGVKRDLLLTPKCLYLIGREKVKQGPDKGLVKEVLKRKIEIERILSVSL

SEQ ID NO: 69770 - protein, 125 aa, Homo sapiens
MFPVLEPHQVGLIRSYNSKTMTCNWGRPLKFCPTKYMKFQELVTFRDVAIDFSRQEWEYLDPNQRDLYRDVMLENYRNLVSLGGHSISKPVVVDLLERGKEPWMILREETQFTEMGVSLGCSAGL

SEQ ID NO: 69771 - protein, 63 aa, Homo sapiens
AAAWLLLGAATGLTRGPAAAFTAARSDAGIRAMCSEIILRQEVLKDGFHRNSKYMYTRLLDIV

SEQ ID NO: 69772 - protein, 172 aa, Homo sapiens
MRCLAPRPAGSYLSEPQGSSQCATMELGPLEGGYLELLNSDADPLCLYHFYDQMDLAGEEEIELYSEPDTDTINCDQFSRLLCDMEGDEETREAYANIAELDQYVFQDSQLEGLSKDIFKHIGPDEVIGESMEMPAEVGQKSQKRPFPEELPADLKHWKPALRVEALGSCSA

SEQ ID NO: 69773 - protein, 64 aa, Homo sapiens
  MOD_RES (1)..(1): Any amino acid
XRTCTVDFSISFEFRSLLHSQLATMFFDEVVKQNVAAFERRAATKFGPETAIPRELMFHEVHQT

SEQ ID NO: 69774 - protein, 147 aa, Homo sapiens
  MOD_RES (1)..(1): Any amino acid
XVAEQFTLMDAELFKKVVPYHCLGSIWSQRDKKGKEHLAPTIRATVTQFNSVANCVITTCLGNRSTKAPDRARVVEHWIEVARECRILKNFSSLYAILSALQSNSIHRLKKTWEDVSRDSFRIFQKLSEIFSDENNYSLSRELLIKA

SEQ ID NO: 69775 - protein, 180 aa, Homo sapiens
  MOD_RES (1)..(1): Any amino acid
XNQGPHPPGHHGPPPMGKSVPGKYACGLWGLSPASRKRYDAATTYGHDAAAAAASQWAAPTPSLWSSSPMATTAAAASATPSAQQQYGFQYPLAMAAKYDDYHHERWHRVHPAMATAAGGCRSFSRSPSDARQPHYGAPAPRGPAASAAWGPSPSAASTAWFRRHDVCPAPSSSASHGPF

SEQ ID NO: 69776 - protein, 601 aa, Homo sapiens
MGPLQFRDVAIEFSLEEWHCLDMAQRNLYRDVMLENYRNLVFLGIVVSKPDLITHLEQGKKPSTMQRHEMVANPSVLCSHFNQDLWPEQSIKDSFQKLILRRHKKCGHDNLQLKKGCESVDKCKVHKRGYNGLNQCLTTTQSKMFQCDKHGKVFHQFSNTNRHKIRHTGKNPFKFTECGKAFNRSSTLTTHKKIHTGEKPYKCIECGKAFNRSSHLTTHKIIHTGEKRYKCEDCGKAFNRSSNLTTHKKIHTGEKPYKCEECGKAFKRSSILTTHKRIHTGEKPYKCEECGKVFKYLSSLSTHKIIHTGEKPYKCEECGKAFNWSSHLTTHKRIHTGEKPYKCEECGKGFKYSSTLTKHKIIHTGEKPYKCEECGEAFKYSCSLTAHKIIHTGKKPYKCEECGKVFKHSSPLSKHKRIHAGEKPYKCEECGKAFSRSSILTTHKIIHTGEKPYECEDCGKAFNRSSNLTKHKKIHTGEKPYKCEECGKAFKCSSILTTHKRIHTADKPYKCEECGKDFKYSSTLTRHKRIHTGEKPYKCEECGKAFNHPATLFSHKKIHTGGKPHKCNKCGKAFISSSNLSRHEIIHMGGNPYKCENVAKP

SEQ ID NO: 69777 - protein, 205 aa, Homo sapiens
MGQNLILNMNDHGFVVCAFNRTVSKVDDFLANEAKGTKVVGAQSLKEMVSKLKKPRRIILLVKAGQAVDDFIEKLVPLLDTGDIIIDGGNSEYRDTTRRCRDLKAKGILFVGSGVSGGEEGARYGPSLMPGGNKEAWPHIKTIFQGIAAKVGTGEPCCDWVGDEGAGHFVKMVHNGIEYGDMQLICEAYHLMKDVLGMAQDEMAQ

SEQ ID NO: 69778 - protein, 20 aa, Homo sapiens
  MOD_RES (1)..(1): Any amino acid
XKTSYDKVIFGPGTSLSVIP

SEQ ID NO: 69779 - protein, 48 aa, Homo sapiens
MLREEAAQKRKGKEPGMALPQVESHFVTQAGVQWCDPGSLQPLPPRFK

SEQ ID NO: 69780 - protein, 114 aa, Homo sapiens
MSQGLALLPRLDCSGRIIAYCNLHLPGSGNPPSSASRVAETTGTRPHSRDSVTFADVAVNFTKEEWTLLDPAQRNLYRDVMLENSRNLAFIDWATPCKTKDATPQPDILPKRTF

SEQ ID NO: 69781 - protein, 57 aa, Homo sapiens
MSSKRPASPYGEADGEVAMVTSRQKVEEEESDGLPAFHLPLHVSFPNKPHSEEFQPV

SEQ ID NO: 69782 - protein, 132 aa, Homo sapiens
MNKILSSTVCFGLLTLLSVLSFLQSVHGRPYLTQGNEIFPDKKYTNREELLLALLNKNFDFQRPFNTDLALPNKLEELNQLEKLKEQLVEEKDSETSYAVDGLFSSHPSKRALSSRTLIQLNCLQHCQNRRG

SEQ ID NO: 69783 - protein, 269 aa, Homo sapiens
MSLRCGDAARTLGPRVFGRYFCSPVRPLSSLPDKKKELLQNGPDLQDFVSGDLADRSTWDEYKGNLKRQKGERYVRKLDVPILESVGEVENMPPPQPRSWNPKILVECLTPDFRGDLKAIEKVALSGLDVYAHNVETVPELQSKVRDPRANFDQSLRVLKHAKKVQPDVISKTSIMLGLGENDEQVYATMKALREADVDCLTLGQYMQPTRRHLKVEEYITPEKFKYWEKVGNELGFHYTASGPLVRSSYKAGEFFLKNLVAKRKTKDL

SEQ ID NO: 69784 - protein, 156 aa, Homo sapiens
FLDSNQENDLLWEEKFPERTTVTELPQTSHVSFSEPDIPSSKSTELPVDWSIKTRLLFTSSQPFTWADHLKAQEEAQGLVQHCRATEVTLPKSIQDPKLSSELRCTFQQSLIYWLHPALSWLPLFPRIGADRKMAGKTSPWSNDATLQHVLMSDWY

SEQ ID NO: 69785 - protein, 124 aa, Homo sapiens; identical to SEQ ID NO: 58263
  MOD_RES (1)..(1): Any amino acid

SEQ ID NO: 69786 - protein, 131 aa, Homo sapiens
MAQFDTEYQRLEASYSDSPPGEEDLLVHVAEGSKSPWHHIENLDLFFSRVYNLHQKNGFTCMLIGEIFELMQFLFVVAFTTFLVSCVDYDILFANKMVNHSLHPTEPVKVTLPDAFLPAQVCSARIQENGS

SEQ ID NO: 69787 - protein, 733 aa, Homo sapiens
MVYAVRSFPLSSEHAKFLIYAQDKETQEKWQVAVKLSLKPTLTEESVKESAEVEEIVFPRQFSKHSGHLQRQKRDWVIPPINLPENSRGPFPQELVRIRSDRDKNLSLRYSVTGPGADQPPTGIFIINPISGQLSVTKPLDREQIARFHLRAHAVDINGNQVENPIDIVINVIDMNDNRPEFLHQVWNGTVPEGSKPGTYVMTVTAIDADDPNALNGMLRYRIVSQAPSTPSPNMFTINNETGDIITVAAGLDREKVQQYTLIIQATDMEGNPTYGLSNTATAVITVTDVNDNPPEFTAMTFYGEVPENRVDIIVANLTVTDKDQPHTPAWNAVYRISGGDPTGRFAIQTDPNSNDGLVTVVKPIDFETNRMFVLTVAAENQVPLAKGIQHPPQSTATVSVTVIDVNENPYFAPNPKIIRQEEGLHAGTMLTTFTAQDPDRYMQQNIRYTKLSDPANWLKIDPVNGQITTIAVLDRESPNVKNNIYNATFLASDNGIPPMSGTGTLQIYLLDINDNAPQVLPQEAETCETPDPNSINITALDYDIDPNAGPFAFDLPLSPVTIKRNWTITRLNGDFAQLNLKIKFLEAGIYEVPIIITDSGNPPKSNISILRVKVCQCDSNGDCTDVDRIVGAGLGTGAIIAILLCIIILLILVLMFVVWMKRRDKERQAKQLLIDPEDDVRDNILKYDEEGGGEEDQTESFCRPGWSTVMRSCLTATFTSRVQAILLPQPPK

SEQ ID NO: 69788 - protein, 147 aa, Homo sapiens
MDFWLWPLYFLPVSGALRILPEVKVEGELGGSVTIKCPLPEMHVRIYLCREMAGSGTCGTVVSTTNFIKAEYKGRVTLKQYPRKNLFLVEVTQLTESDSGVYACGAGMNTDRGKTQKVTLNVHSEYEPSWEEQPMPETPKWFHLPYL

SEQ ID NO: 69789 - protein, 287 aa, Homo sapiens
GTLYPAYYSYKAVKSKDIKEYVKWMMYWIIFALFTTAETFTDIFLCWFPFYYELKIAFVAWLLSPYTKGSSLLYRKFVHPTLSSKEKEIDDCLVQAKDRSYDALVHFGKRGLNVAATAAVMAASKVARLFHFIFSLDLREGQGQGALSERLRSFSMQDLTTIRGDGAPAPSGPPPPGSGRASGKHGQPKMSRSASESASSSVCTCCSTCRTWKVVEGDVNEGGMKAWEPHQVQNPLAFSDDEEEDLLDFMYKYKAPRRMELPLEAPPRILRSRFRKKSTSSSATETT

SEQ ID NO: 69790 - protein, 71 aa, Homo sapiens
AESEQGWDGEGEGRGEAGRGGAGRGGGPPGEGGGQAQHRSVREGPDLDRPGSDRQERERARGDSEALDEES

SEQ ID NO: 69791 - protein, 69 aa, Homo sapiens
VHFTRRYQNPSSGSLPPRVRLKPQRYRNEENDSSLKTGLEKMRSGKMAPKPQSRCTSTRSAEFIDQEAD

SEQ ID NO: 69792 - protein, 100 aa, Homo sapiens
RELTEDGLEKNFAANTLGVYILTTGLIPVLEKEHDPRVITVSSGGMLVQKLNTNDLQSERTPFDGTMVYAQNKGAHIVCKAASTLRLPCRCCVPSEGGPV

SEQ ID NO: 69793 - protein, 165 aa, Homo sapiens
MAAVDSDVESLPRGGFRCCLCHVTTANRPSLDAHLGGRKHRHLVELRAARKAQGLRSVFVSGFPRDVDSAQLSEYFLAFGPVASVVMDKDKPVPKAPESPSLDSALASPLDPQALACTPASPPDSQPPASPQDSEALDFETPSSSLAPQTPDSALASETLASPQS

SEQ ID NO: 69794 - protein, 88 aa, Homo sapiens
EPGSGPEAGARFFCTAGRGLEPFVMREVRARLAATQVEYISGKVFFTTCSDLNMLKKLKSAERLFLLIKKQFPLIISSEKYLMKCKDL

SEQ ID NO: 69795 - protein, 112 aa, Homo sapiens
LQDRIATFFFPKGMMLTTAALMLFFLHLGIFIRDVHNFCITYHYDHMSFHYTVVLMFSQVISICWAAMGSLYAEMTENNAQRSHVLQPPVLGVSGHRVPGGAPLRPGESEQG

SEQ ID NO: 69796 - protein, 29 aa, Homo sapiens
DSGHPCTAADPDSCFTPVSPQHFIDLFKF

SEQ ID NO: 69797 - protein, 1185 aa, Homo sapiens
KKKVLTEADTPSKFDPINYLGEYLIRNNPNYIKDPGMSGYQRLMKEVTEDLKIYVPDTICNRVSKMKENVKQNRKQRESIDKIIVKVANTRKQALQEQFDEWILDPKGMIPKSVIQNVLQEFFQNPDFKLGSHCKQLDITDSTEPRLNKMEFTEYISSHIKDLKSEMFEELLKHLCHSADEFREVIKADMRRQMFAELFLHCDHGKVGFLDRQRTLALLELFYDHSSQMLRSLLRNPRQWPFIEFEEINLTELWGDMDNQKHIYEGFDKVLLEMNTLLSANHASKTQSKLLESPDQPKLNEQRTSTPSPNPPEQQRGVTAEQGPQRISIEEQQQGKKPTAEQELYIESVIEPGTHTESTLEQGSSRRLLTEQETHRESTTEQGQHKGSIEGQGPRRVSVSEQGSSRESVAEQGSRRESIAEQDRHKGSVAEQGSRRMSAAEQGSLRESVIEEPYQKSEQGPYGEIISEEQEDIGSTSQSRKDSILKSTKYGEPITSEYIEVPLQEKRSWEQTYEEEIFLSSELQEEVPTLSRKDHFPETTKKEVQKDKPCEPKSQKIEGKSWSGEFFTCNWKMKYVTFEDEEQANLIYGNSRFTAKLHIQFPKPHPGHEVRLSSKQFQNYIELVVSELRGNEDQVLESVVEFLMNALERSHIESLRNSARRKWLHQIQCAAETSGVSLEPVYSETFKALMQDAEAHGNKKISAHISLLEENLLLPEKGNVLLRNVACTLDDAQFVLNRVLYRDMKGISFTVVDEGKPIHVPQVQYHGNIFFWNQSRNKHDYNGSFLALPLQDAYMRIFGVLAVDTLRDPHEINIFLPHEIRFYQGVANVFSTAYHYVHSREHILHIVITGIGWLYDVTSSITSITTYFVEPSPAQDSDYVLRNMMVTGQLGLTEIHKNPPTIHRKSCIFRDFLFKCTDSSEVVLASACGETHIVVPLRERTGEALGVLDFNIGQNRMLLCQEYKDLQKMMKVVQVACYEILGEFSGEIKKKYILEIENVREVQRAGILFFRIMLLELQESIQLLNSMEFVSLLLYDHTLVTEPNSPQDSKSMELEANVKLVRDILKAVILFFHPELEFSSDFGSWDKCKFYVNKYLVNNICAFDPTAKHVEVNVQLIDEYIRDHSRTEVWKFGNVVIEHLYHWIHICSALMKITKQLNSGITPPLPSKTDNYMYAKMPGEGLQEK

SEQ ID NO: 69798 - protein, 578 aa, Homo sapiens
MTDSKYFTTTKKGEIFELKAELNSDKKEKKKEAVKKVIASMTVGKDVSALFPDVVNCMQTDNLELKKLVYLYLMNYAKSQPDMAIMAVNTFVKDCEDPNPLIRALAVRTMGCIRVDKITEYLCEPLRKCLKDEDPYVRKTAAVCVAKLHDINAQLVEDQGFLDTLKDLISDSNPMVVANAVAALSEIAESHPSSNLLDLNPQSINKLLTALNECTEWGQIFILDCLANYMPKDDREAQSICERVTPRLSHANSAVVLSAVKVLMKFMEMLSKDLDYYGTLLKKLAPPLVTLLSAEPELQYVALRNINLIVQKRPEILKHEMKVFFVKYNDPIYVKLEKLDIMIRLASQANIAQVLAELKEYATEVDVDFVRKAVRAIGRCAIKVEQSAERCVSTLLDLIQTKVNYVVQEAIVVIKDIFRKYPNKYESVIATLCENLDSLDEPEARAAMIWIVGEYAERIDNADELLESFLEGFHDESTQVQLQLLTAIVKLFLKKPTETQELVQQVLSLATQDSDNPDLRDRGYIYWRLLSTDPVAAKEVVLAEKPLISEETDLIEPTLLDELICYIGTLASVYHKPP

SEQ ID NO: 69799 - protein, 23 aa, Homo sapiens
MLQAKLHSQEEDFRLQNSTLMAE

SEQ ID NO: 69800 - protein, 129 aa, Homo sapiens
MGKWKRSQAYADYIGFILTLNEGVKGKKLTFEYRVSEAIEKLVALLNTLDRWIDETPPVDQPSRFGNKAYRTWYAKLDEEAENLVATVVPTHLAAAVPEVAVYLKESVGNSTRIDYGTGHEAAFAAFLC

SEQ ID NO: 69801 - protein, 44 aa, Homo sapiens
MGDVKALLFVAAARARRLGGAAASEPSAGSEAASPKSVQAPSGA

SEQ ID NO: 69802 - protein, 177 aa, Homo sapiens
MGNYKSFGDTKFVPNLPKEKLERVILGSEAAQQHPEEVRGLWQTCGELMFSLEPRLRHLGLGKEGITTYFSGNCTMEDAKLAQDFLDSQNLSAYNTRLFKEVDGEGKPYYEVRLASVLGSEPSLDSEVTSKLKSYEFRGSPFQVTRGDYAPILQKVVEQLEKAKAYAANSHQGQMLA

SEQ ID NO: 69803 - protein, 913 aa, Homo sapiens
MSEFRIHHDVNELLSLLRVHGGDGAEVYIDLLQKNRTPYVTTTVSAHSAKVSTALGVALCRVKIAEFSRTPEDFLKKYDELKSKNTRNLDPLVYLLSKLTEDKETLQYLQQNAKERAELAAAAVGSSTTSINVPAAASKISMQELEELRKQLGSVATGSTLQQSLELKRKMLRDKQNKKNSGQHLPIFPAWVYERPALIGDFLIGAGISTDTALPIGTLPLASQESAVVEDLLYVLVGVDGRYVSAQPLAGRQSRTFLVDPNLDLSIRELVHRILPVAASYSAVTRFIEEKSSFEYGQVNHALAAAMRTLVKEHLILVSQLEQLHRQGLLSLQKLWFYIQPAMRTMDILASLATSVDKGECLGGSTLSLLHDRSFSYTGDSQAQELCLYLTKAASAPYFEVLEKWIYRGIIHDPYSEFMVEEHELRKERIQEDYNDKYWDQRYTIVQQQIPSFLQKMADKILSTGKYLNVVRECGHDVTCPVAKEIIYTLKERAYVEQIEKAFNYASKVLLDFLMEEKELVAHLRSIKRYFLMDQGDFFVHFMDLAEEELRKPVEDITPPRLEALLELALRMSTANTDPFKDDLKIDLMPHDLITQLLRVLAIETKQEKAMAHADPTELALSGLEAFSFDYIVKWPLSLIINRKALTRYQMLFRHMFYCKHVERQLCSVWISNKTAKQHSLHSAQWFAGAFTLRQRMLNFVQNIQYYMMFEVMEPTWHILEKNLKSASNIDDVLGHHTGFLDTCLKDCMLTNPELLKVFSKLMSVCVMFTNCMQKFTQSMKLDGELGGQTLEHSTVLGLPAGAEERARKELARKHLAEHADTVQLVSGFEATINKFDKNFSAHLLDLLARLSIYSTSDCEHGMASVISRLDFNGFYTERLERLSAERSQKATPQVPVLRGPPAPAPRVAVTAQ

SEQ ID NO: 69804 - protein, 242 aa, Homo sapiens
MSAAHVGKSGGQEGRMEYLVKWKGWSQKYSTWEPEENILDARLLAAFEEREREMELYGPKKRGPKPKTFLLKAQAKAKAKTYEFRSDSARGIRIPYPGRSPQDLASTSRAREGLRNMGLSPPASSTSTSSTCRAEAPRDRDRDRDRDRERDRERERERERERERERERERGTSRVDDKPSSPGDSSKKRGPKPRKELPDPSQRPLGEPSAGLGEYLKGRKLDDTPSGAGKFPAGHSVIQLAR

SEQ ID NO: 69805 - protein, 127 aa, Homo sapiens
MKMASSLAFLLLNFHVSLFLVQLLTPCSDADLPCHLFPTMSAETMELRWVSSSLRQVVNVYADGKEVEDRQSAPYRGRTSILRDGITAGKAALRIHNVTASDSGKYLCYFQDGDFYEKALVELKVAA

SEQ ID NO: 69806 - protein, 268 aa, Homo sapiens
  MOD_RES (1)..(1): Any amino acid
XSAPEPPAEEEVATGTTSASDDLEALGTLSLGTTEEKAAAEAAVPRTIGAELMELVRRNTGLSHELCRVAIGIIVGHIQASVPASSPVMEQVLLSLVEGKDLSMALPSGQVCHDQQRLEVIFADLARRKDDAQQRSWALYEDEGVIRCYLEELLHILTDADPEVCKKMCKRNEFESVLALVAYYQMEHRASLRLLLLKCFGAMCSLDAAIISTLVSSVLPVELARDMQTDTQEHLGTPFAQFLLNIVEDGLPLDTTEQLPDLCVNLLL

SEQ ID NO: 69807 - protein, 40 aa, Homo sapiens
MEESGAQLLLEMLTFNPHKRISAFRALQHSYLHKDEGNPE

SEQ ID NO: 69808 - protein, 219 aa, Homo sapiens
  MOD_RES (1)..(1): Any amino acid
XPLSPSTPTRRPPFTRGRLRLLSFRSMEEARLVPTVKEKYPVLKDVMDFIKDQSLSHRSVVKVLSLRKAQAQSILEVLKITQHCAESLGQPHCFHPPFILFLLELLTCQKDFTNYFGHLEGCGADLHKEIRDTYYQLVLFLVKAVKGFSSLNDRSLLPALSCVQTALLHLLDMGWEPNDLAFFVDIQLPDLLMKMSQENISVHDSVIRCTCSLLATVTC

SEQ ID NO: 69809 - protein, 218 aa, Homo sapiens
MAAEEEDEVEWVVESIAGFLRGPDWSIPILDFVEQKCEVFDDEEESKLTYTEIHQEYKELVEKLLEGYLKEIGINEDQFQEACTSPLAKTHTSQAILQPVLAAEDFTIFKAMMVQKNIEMQLQAIRIIQERNGVLPDCLTDGSDVVSDLEHEEMKILREVLRKSKEEYDQEEERKRKKQLSEAKTEEPTVHSSEAAIMNNSQGDGEHFAHPPSEIQGS

SEQ ID NO: 69810 - protein, 162 aa, Homo sapiens
MKDSVPQGVISLKEKLSTSPDEPVPRSHHVVSLLKSTCLYIFTSGTTGLPKAAVISQLQVLRGSAVLWAFGCTAHDIVYITLPLYHSSAAILGISGCVELGATCVLKKKFSASQFWSDCKKYDVTVFQYIGELCRYLCKQSKREGEKDHKVRLAIGNGIRSD

SEQ ID NO: 69811 - protein, 116 aa, Homo sapiens
AEVVLRPHSYPSKKTGLTLLAAASIAYISRILWLYFETGTWVYPVFAKLSLLGLAAFFSLSYVFIASIYLLGEKLNHWKWVSVQILQRWRLESVGICFQWPDWKSPAKHQLVKNIR

SEQ ID NO: 69812 - protein, 147 aa, Homo sapiens
MASCPDSDNSWVLAGSESLPVETLGPASRMDPESERALQAPHSPSKTDGKELAGTMDGEGTLFQTESPQSGSILTEETEVKGTLEGDVCGVEPPGPGDTVVQGDLQETTVVTGLGPDTQDLEGQSPPQSLPSTPKAVTSLPCPCPFP

SEQ ID NO: 69813 - protein, 41 aa, Homo sapiens
MNGHISNHPSSFGMYPSQMKTKEELCTGQCQQCVRYISIPC

SEQ ID NO: 69814 - protein, 200 aa, Homo sapiens
MNKLSGGGGRRTRVEGGQLGGEEWTRHGSFVNKPTRGWLHPNDKVMGPGVSYLVRYMGCVEVLQSMRALDFNTRTQVTREAISLVCEAVPGAKGATRRRKPCSRPLSSILGRSNLKFAGMPITLTVSTSSLNLMAADCKQDTAEYVAYVAKDPVNQRACHILECPEGLAQDVISTIGQAFELRFKQYLRNPPKLVTPHDR

SEQ ID NO: 69815 - protein, 75 aa, Homo sapiens
GWYDEEHPLVFLFLGSSGIGKTELAKQTAKYMHKDAKKLVLACFHTGLHQAGHVRVPGATRGGQVYWVSTRLRWP

SEQ ID NO: 69816 - protein, 158 aa, Homo sapiens
MTAEEGVQLSQQNAKDFFRVLNLNKKCDTSKHKVLVVSVCPQSLPYFAAKFNLSVTDASRRLCGFLKSLGVHYVFDTTIAADFSILESQKEFVRRYRQHSEEERTLPMLTSACPGWVRYAERVLGRPITAHLCTAKSPQQVMGSLVKDYFARQQNLSP

SEQ ID NO: 69817 - protein, 147 aa, Homo sapiens
TPPTSTLLTMHPASVQDQTTVRTVASATTAIEIRRQSSSYDDPWKITDEQRQYYVNQFKTIQPDLNGFIPGSAAKEFFTKSKLPILELSHIWELSDFDKDGALTLDEFCAAFHLVVARKNGYDLPEKLPESLMPKLIDLEDSAALML

SEQ ID NO: 69818 - protein, 30 aa, Homo sapiens
MEASEDAAFNKITRSLQDLQQKDIGVKPEF

SEQ ID NO: 69819 - protein, 129 aa, Homo sapiens
MLQCLVTGHPRPQVRWTKTAGSASDKFQETSVFNETLRIERIARTQGGRYYCKAENGVGVPAIKSIRVDVQYLDEPMLTVHQTVSDVRGNFYQEKTVFLRCTVNSNPPARFIWKRGSDTLSHSQDNGVD

SEQ ID NO: 69820 - protein, 2059 aa, Homo sapiens
MRILKRFLACIQLLCVCRLDWANGYYRQQRKLVEEIGWSYTGALNQKNWGKKYPTCNSPKQSPINIDEDLTQVNVNLKKLKFQGWDKTSLENTFIHNTGKTVEINLTNDYRVSGGVSEMVFKASKITFHWGKCNMSSDGSEHSLEGQKFPLEMQIYCFDADRFSSFEEAVKGKGKLRALSILFEVGTEENLDFKAIIDGVESVSRFGKQAALDPFILLNLLPNSTDKYYIYNGSLTSPPCTDTVDWIVFKDTVSISESQLAVFCEVLTMQQSGYVMLMDYLQNNFREQQYKFSRQVFSSYTGKEEIHEAVCSSEPENVQADPENYTSLLVTWERPRVVYDTMIEKFAVLYQQLDGEDQTKHEFLTDGYQDLGAILNNLLPNMSYVLQIVAICTNGLYGKYSDQLIVDMPTDNPELDLFPELIGTEEIIKEEEEGKDIEEGAIVNPGRDSATNQIRKKEPQISTTTHYNRIGTKYNEAKTNRSPTRGSEFSGKGDVPNTSLNSTSQPVTKLATEKDISLTSQTVTELPPHTVEGTSASLNDGSKTVLRSPHMNLSGTAESLNTVSITEYEEESLLTSFKLDTGAEDSSGSSPATSAIPFISENISQGYIFSSENPETITYDVLIPESARNASEDSTSSGSEESLKDPSMEGNVWFPSSTDITAQPDVGSGRESFLQTNYTEIRVDESEKTTKSFSAGPVMSQGPSVTDLEMPHYSTFAYFPTEVTPHAFTPSSRQQDLVSTVNVVYSQTTQPVYNDGLTALNISSPVSVAEFTYTTSVFGDDNKALSKSEIIYGNETELQIPSFNEMVYPSESTVMPNMYDNVNKLNASLQETSVSISSTKGMFPGSLAHTTTKVFDHEISQVPENNFSVQPTHTVSQASGDTSLKPVLSANSEPASSDPASSEMLSPSTQLLFYETSASFSTEVLLQPSFQASDVDTLLKTVLPAVPSDPILVETPKVDKISSTMLHLIVSNSASSENMLHSTSVPVFDVSPTSHMHSASLQGLTISYASEKYEPVLLKSESSHQVVPSLYSNDELFQTANLEINQAHPPKGRHVFATPVLSIDEPLNTLINKLIHSDEILTSTKSSVTGKVFAGIPTVASDTFVSTDHSVPIGNGHVAITAVSPHRDGSVTSTKLLFPSKATSELSHSAKSDAGLVGGGEDGDTDDDGDDDDDDRGSDGLSIHKCMSCSSYRESQEKVMNDSDTHENSLMDQNNPISYSLSENSEEDNRVTSVSSDSQTGMDRSPGKSPSANGLSQKHNDGKEENDIQTGSALLPLSPESKAWAVLTSDEESGSGQGTSDSLNENETSTDFSFADTNEKDADGILAAGDSEITPGFPQSPTSSVTSENSEVFHVSEAEASNSSHESRIGLAEGLESEKKAVIPLVIVSALTFICLVVLVGILIYWRKCFQTAHFYLEDSTSPRVISTPPTPIFPISDDVGAIPIKHFPKHVADLHASSGFTEEFETLKEFYQEVQSCTVDLGITADSSNHPDNKHKNRYINIVAYDHSRVKLAQLAEKDGKLTDYINANYVDGYNRPKAYIAAQGPLKSTAEDFWRMIWEHNVEVIVMITNLVEKGRRKCDQYWPADGSEEYGNFLVTQKSVQVLAYYTVRNFTLRNTKIKKGSQKGRPSGRVVTQYHYTQWPDMGVPEYSLPVLTFVRKAAYAKRHAVGPVVVHCSAGVGRTGTYIVLDSMLQQIQHEGTVNIFGFLKHIRSQRNYLVQTEEQYVFIHDTLVEAILSKETEVLDSHIHAYVNALLIPGPAGKTKLEKQFQLLSQSNIQQSDYSAALKQCNREKNRTSSIIPVERSRVGISSLSGEGTDYINASYIMGYYQSNEFIITQHPLLHTIKDFWRMIWDHNAQLVVMIPDGQNMAEDEFVYWPNKDEPINCESFKVTLMAEEHKCLSNEEKLIIQDFILEATQDDYVLEVRHFQCPKWPNPDSPISKTFELISVIKEEAANRDGPMIVHDEHGGVTAGTFCALTTLMHQLEKENSVDVYQVAKMINLMRPGVFADIEQYQFLYKVILSLVSTRQEENPSTSLDSNGAALPDGNIAESLESLV

SEQ ID NO: 69821 - protein, 48 aa, Homo sapiens
MLRRALLCLAVAALVRADAPEEEDHVLVLRKSNFAEALAAHKYLLVEF

SEQ ID NO: 69822 - protein, 289 aa, Homo sapiens
MEGPLTPPPLQGGGAAAVPEPGARQHPGHETAAQRYSARLLQAGYEPESDFLILPGFIDFIADEVDLTSALTRKITLKTPLISSPMDTVTEADMAIAMALMGGIGFIHHNCTPEFQANEVRKVKKFEQGFITDPVVLSPSHTVGDVLEAKMRHGFSGIPITETGTMGSKLVGIVTSRDIDFLAEKDHTTLLSEVMTPRIELVVAPAGVTLKEANEILQRSKKGKLPIVNDCDELVAIIARTDLKKNRDYPLASKDSQKQLLCGAAVGTREDDKYRLDLLTQAGVDVIVL

SEQ ID NO: 69823 - protein, 119 aa, Homo sapiens
MREIVLTQIGQCGNQIGAKFWEVISDEHAIDSAGTYHGDSHLQLERINVYYNEASGGRYVPRAVLVDLEPGTMDSVRSGPFGQVFRPDNFIFVTGCAVLQVSVGPETTGPRDTTPKARS

SEQ ID NO: 69824 - protein, 218 aa, Homo sapiens
MEQDDPVEALTELRERRLGALELLQAAAGSGLAAYAVWALLLQPGFRRVPLRLQVPYVGASARQVEHVLSLLRGRPGKTVDLGSGDGRIVLAAHRCGLRPAVGYELNPWLVALARLHAWRAGCAGSVCYRRKDLWKLPLLEDKLRTELPAGARVVSGRFPLPTWQPVTAVGEGLDRVWAYDVPEGGQAGEAASSRIPIQAAPGPSSAPIPGGLISQAS

SEQ ID NO: 69825 - protein, 263 aa, Homo sapiens
TRLGSLSARSDSEATISRSSASSRTAEAIIRSGARLVPSDKFSPRIRANSISRLSDSKVKSMTSAHGSASALKTTRLQSAGSAMPTSSSFKHRIKEQEDYIRDWTAHREEIARISQDLALIAREINDVAGEIDSVTSSGTAPSTTLVDRVFDESLNFRKIPPLVHSKTPEGNNGRSGDPRPQAAEPPDHLTITRRRTWSRDEVMGDNLLLSSVFQFSKKIRQSIDKTAGKIRILFKDKDRNWDDIESKLRAESEVPIVKTSSM

SEQ ID NO: 69826 - protein, 63 aa, Homo sapiens
  MOD_RES (1)..(1): Any amino acid
XQQSVENIQSPCCSQAIYHRKCIQKYAHTSAKHFFKCPQCNNRKEFPQEMLRMGIHIPDRLHT

SEQ ID NO: 69827 - protein, 19 aa, Homo sapiens
MGRVGYWTLLVLPALLVWR

SEQ ID NO: 69828 - protein, 11 aa, Homo sapiens
MLENLALISSL

SEQ ID NO: 69829 - protein, 79 aa, Homo sapiens
VAPDGFDIIDMTAGGQINSDQRRNLGSVAKVLQHAASNKLFEGENEHLSSMNNYLSETYQEFSSCWNTRMQLPLRKMTY

SEQ ID NO: 69830 - protein, 288 aa, Homo sapiens
MARRGPGWRPLLLLVLLAGAAQGGLYFRRGQTCYRPLRGDGLAPLGRSTYPRPHEYLSPADLPKSWDWRNVDGVNYASITRNQHIPQYCGSCWAHASTSAMADRINIKRKGAWPSTLLSVQNVIDCGNAGSCEGGNDLSVWDYAHQHGIPDETCNNYQAKDQECDKFNQCGTCNEFKECHAIRNYTLWRVGDYGSLSGREKMMAEIYANGPISCGIMATERLANYTGGIYAEYQDTTYINHVVSVAGWGISDGTEYWIVRNSWGEPWVRCFHFLKVIPRKKRPGTPLA

SEQ ID NO: 69831 - protein, 170 aa, Homo sapiens
MEDSHKSTTSETAPQPGSAVQGAHISHIAQQVSSLSESEESQDSSDSIGSSQKAHGILARRPSYRKILKDLSSEDTRGRKGDGENSGVSAAVTSMSVPTPIYQTSSGQYIAIAPNGALQLASPGTDGVQGLQTLTMTNSGSTQQGTTILQYAQTSDGQQILVPSNQVVVQ

SEQ ID NO: 69832 - protein, 26 aa, Homo sapiens
MFIWTSGRTSSSYRHDEKSRDGVSPC

SEQ ID NO: 69833 - protein, 122 aa, Homo sapiens
MHRRRSRSCREDQKPVMDDQRDLISNNEQLPMLGRRPGAPESKCSRGALYTGFSILVTLLLAGQATTAYFLYQQQGRLDKLTVTSQNLQLENLRMKLPKPHAECHQVWQHDRGPCDAPAPEC

SEQ ID NO: 69834 - protein, 212 aa, Homo sapiens
MLAFAARTVVKPLGFLKPFSLMKASSRFKAHQDALPRLPVPPLQQSLDHYLKALQPIVSEEEWAHTKQLVDEFQASGGVGERLQKGLERRARKTENWLSEWWLKTAYLQYRQPVVIYSSPGVMLPKQDFVDLQGQLRFAAKLIEGVLDFKVMIDNETLPVEYLGGKPLCMNQYYQILSSCRVPGPKQDTVSNFSKTKKPPTHITVVHNYQTR

SEQ ID NO: 69835 - protein, 111 aa, Homo sapiens
MKKKLVVLGLLAVVLVLVIVGLCLWLPSASKEPDNHVYTRAAVAADAKQCSKIGRDALRDGGSAVDAAIAALLCVGLMNAHSMGIGGGLFLTIYNSTTRKAEVINAREVAP

SEQ ID NO: 69836 - protein, 408 aa, Homo sapiens
  MOD_RES (1)..(1): Any amino acid
XDCKLQDRCRKCYSPRSGQACPPALAAAWLRRCERRGGRPRGGRRKELTLGLRPARCSAPGPAKDDAWRPQAGRSSSDTNESEIKSNEEPLLRKSSRRFVIFPIQYPDIWKMYKQAQASFWTAEEVDLSKDLPHWNKLKADEKYFISHILAFFAASDGIVNENLVERFSQEVQVPEARCFYGFQILIENVHSEMYSLLIDTYIRDPKKREFLFNAIETMPYVKKKADWALRWIADRKSTFGERVVAFAAVEGVFFSGSFAAIFWLKKRGLMPGLTFSNELISRDEGLHCDFACLMFQYLVNKPSEERVREIIVDAVKIEQEFLTEALPVGLIGMNCILMKQYIEFVADRLLVELGFSKVFQAENPFDFMENISLEGKTNFFEKRVSEYQRFAVMAETTDNVFTLDADF

SEQ ID NO: 69837 - protein, 189 aa, Homo sapiens
MAAALFVLLGFALLGTHGASGAGPPRVKAVKSSEHINEGETAMLVCKSESVPPVTDWAWYKITDSEDKALMNGSESRFFVSSSQGRSELHIENLNMEADPGQYRCNGTSSKGSDQAIITLRVRSHLAALWPFLGIVAEVLVLVTIIFIYEKRRKPEDVLDDDDAGSAPLKSSGQHQNDKGKNVRQRNSS

SEQ ID NO: 69838 - protein, 123 aa, Homo sapiens
MLRRALLCLAVAALVRADAPEEEDHVLVLRKSNFAEALAAHKYLLVEFYAPWCGHCKALAPEYAKAAGKLKAEGSEIRLAKVDATEESDLAQQYGVRGYPTIKFFRNGDTASPKEYTERLMTS

SEQ ID NO: 69839 - protein, 100 aa, Homo sapiens
  MOD_RES (1)..(1): Any amino acid
XFMTPYDFILAVTTDEPKVAKTWKSLSKQELNQMLAETPPVWKGSSKLFRNLKEKGVISYTEYLFLLCILTSKYTYCFYFWMQLYFLNESWKADLRFSYS

SEQ ID NO: 69840 - protein, 282 aa, Homo sapiens
MGASVSRGRAARVPAPEPEPEEALDLSQLPPELLLVVLSHVPPRTLLGRCRQVCRGWRALVDGQALWLLILARDHGATGRALLHLARSCQSPARNARPCPLGRFCARRPIGRNLIRNPCGQGLRKWMVQHGGDGWVVEENRTTVPGAPSQTCFVTSFSWCCKKQVLDLEEEGLWPELLDSGRIEICVSDWWGARHDSGCMYRLLVQLLDANQTVLDKFSAVPDPIPQWNNNACLHVTHVFSNIKMGVRFVSFEHRGQDTQFWAGHYGARVTNSSVIVRVRLS

SEQ ID NO: 69841 - protein, 63 aa, Homo sapiens
MASRYDRAITVFSPDGHLFQVEYAQEAVKKGSTAYHVSLIVHDSCGLAWMSAHLKKSEFEVPI

SEQ ID NO: 69842 - protein, 131 aa, Homo sapiens
ELLEQEHTQGFIITFCSALDDILGGGVPLMKTTEICGAPGVGKTQLCMQLAVDVQIPECFGGVAGEAVFIDTEGSFMVDRVVDLATACIQHLQLIAEKHKGEESGSTARAGVQWRNLGLLRPSPPRFKRFS

SEQ ID NO: 69843 - protein, 256 aa, Homo sapiens
MVSKRIAQETFDAAVRENIEEFAMGPEEAVKEAVEQFESQGVDLSNIVKTAPKVSADGSQEPTHDILQMLSDLQESVASSRPQEVSAYLTRFCDQCKQDKACRFLAAQKGAYPIIFTAWKLATAGDQGLLLQSLNALSVLTDGQPDLLDAQGLQLLVATLTQNADEADLTCSGIRCVRHACLKHEQNRQDLVKAGVLPLLTGAITHHGHHTDVVREACWALRVMTFDDDIRVPFGHAHNHAKMIVQENKGLKVLIE

SEQ ID NO: 69844 - protein, 178 aa, Homo sapiens
MPASAARPRPGPGQPTASPFPLLLLAVLSGPVSGRVPRSVPRTSLPISEADSCLTRFAVPHTYNYSVLLVDPASHTLYVGARDTIFALSLPFSGERPRRIDWMVPEAHRQNCRKKGKKEGDLGGRKTLQQRWTTFLKADLLCPGPEHGRASSVLQDVAVLRPELGAGTPIFYGIFSSQ

SEQ ID NO: 69845 - protein, 188 aa, Homo sapiens
  MOD_RES (1)..(1): Any amino acid
XNPYGQPQVFPGQDPDSPQHGNYQEEGPPSYYDNQDFPATNWDDKSIRQAFIRKSVLTASLSYMVGMIASFYNTEAVIMAVGITTAVCFTVVIFSMQTRYDFTSCMGVLLVSMVVLFIFAILCIFIRNRILEIVYASLGALLFTCFLAVDTQLLLGNKQLSLSPEEYVFAALNLYTDIINIFLYILTI

SEQ ID NO: 69846 - protein, 176 aa, Homo sapiens
MRLAQVIFDKNDSDFEAKVKQLMEVTGKNQDECIVALHDCNGDVNKAINILLEGNSDTTSWETVGCKKKNFAKENSENKENREKKSEKESSRGRGNNNRKGRGGNRGREFRGEENGIDCNQVDKPSDRGKRARGRELASNTHNIAQDLSNKSSYGLKGAWKNSVEEWTTEDWTEDH

SEQ ID NO: 69847 - protein, 146 aa, Homo sapiens
HEKASTPVLKSSTPTPRSDMPTPGTSATPGLRPGLGKPPAIDPLVNQAAAGLRTPLAVPGPYPAPFGMVPHAGMNGELTSPGAAYASLHNMSPQMSAAAAAAAVVAYGRSPMVGFDPPPHMRVPTIPPNLAGIPGGKPSLVPAPAH

SEQ ID NO: 69848 - protein, 368 aa, Homo sapiens
  MOD_RES (1)..(1): Any amino acid
XALEKAKDAGRKERVLVRQREQVTTPENINLDLTYSVLFNLASQYSVNEMYAEALNTYQVIVKNKMFSNAGILKMNMGNIYLKQRNYSKAIKFYRMALDQVPSVNKQMRIKIMQNIGVTFIQADREKMKKAFQKLITVPLEIDEDKYISPSDDPHTNLVTEAIKNDHLRQMERERKAMAEKYIMTSAKLIAPVIETSFAAGYDWCVEVVKASQYVELANDLEINKAVTYLRQKDYNQAVEILKVLEKKDSRVKSAAATNLSALYYMGKDFAQASSYADIAVNSDRYNPAALTNKGNTVFANGDYEKAAEFYKEALRNDSSCTEALYNIGLTYEKLNRLDEALDCFLKLHAILRNSAEVLYQIANMYLI

SEQ ID NO: 69849 - protein, 150 aa, Homo sapiens
MNGRSLIGGAGDARHGPVWKDPFGTKAGDAARRGIARLSLALADGSQEQVINSIWALWLQCHPGGSTHGCLFGQGRLFLVAVTPCMCYVHDLPNFLKCIEFHAQQMGPPRLHPPFQHGVVNVPFSHRTLQSILSSQTGHTYNYSSKYLLV

SEQ ID NO: 69850 - protein, 61 aa, Homo sapiens
MTMRSLLRTPFLCGLLWAFCAPGARAEEPAASFSQPGSMGLDKNTVHDQEHIMEHLEGVIN

SEQ ID NO: 69851 - protein, 177 aa, Homo sapiens
MGNIFEKLFKSLLGKKKMRILILSLDTAGKTTILYKLKLGETVPAVPTVGFCVETVEYKNNTFGVWDVGSHFKIRPLWQHFFQNTKGARSPGSTHQGSLASGVLPIKCSHVEFGMWKGGRSHPFLPHSSRCAGSGGQLDSILPHQSPAWGPWGCKDLSSGFPSFLTSSILWKSAVVK

SEQ ID NO: 69852 - protein, 185 aa, Homo sapiens
MIRRVLPHGMGRGLLTRRPGTRRGGFSLDWDGKVSEIKKKIKSILPGRSCDLLQDTSHLPPEHSDVVIVGGGVLGLSVAYWLKKLESRRGAIRVLVVERDHTYSQASTGLSVGGICQQFSLPENIQLSLFSASFLRNINYLAVVDAPPLDLRFNPSGYLLLASEKDAAAMESNVKVQRDGGRRLV

SEQ ID NO: 69853 - protein, 149 aa, Homo sapiens
MAALTTLFKYIDENQDRYIKKLAKWVAIQSVSAWPEKRGEIRRMMEVAAADVKQLGGSVELVDIGKQKLPDGSEIPLPPILLGRLGSDPQKKTVCIYGHLDVQPAALEDGWDSEPFTLVERDGKLYGRGSTDDKGPVAGWINALEAYQK

SEQ ID NO: 69854 - protein, 420 aa, Homo sapiens
  MOD_RES (1)..(1): Any amino acid
XFAVLQLYSFSTFPFISPFFPLLCSQDFPPLAATDAVKPAIYKVQCVATLQVGSMQATDPSECGQCLSLAWMPTRPHQHLAAGYYNGMVVFWNLPTNSPLQRIRLSDGSLKLYPFQCFLAHDQAVRTLQWCKANSHFLVSAGSDRKIKFWDLRRPYEPINSIKRFLSTELAWLLPYNGVTVAQDNCYASYGLCGIHYIDAGYLGFKAYFTAPRKGTVWSLSGSDWLGTIAAGDISGELIAAILPDMALNPINVKRPVERRFPIYKADLIPYQDSPEGPDHSSASSGVPNPPKARTYTETVNHHYLLFQDTDLGSFHDLLRREPMLRMQEGEGHSQLCLDRLQLEAIHKVRFSPNLDSYGWLVSGGQSGLVRIHFVRGLASPLGHRMQLESRAHFNAMFQPSSPTRRPGFSPTSHRLLPTP

SEQ ID NO: 69855 - protein, 732 aa, Homo sapiens
MDPPSLDTAIQHALAGLYPPFEATAPTVLGQVFRLLDSGFQGDGLSFLLDFLIPAKRLCEQVREAACAPYSHCLFLHEGWPLCLRDEVVVHLAPLNPLLLRQGDFYLQVEPQEEQSVCIMIKCLSLDLCTVDKKPVPEPAYPILFTQEWLEAINSDFEGNPLHNCLVASENGIAPVPWTKITSPEFVDDRPQVVNALCQAWGPLPLEALDLSSPQELHQASSPDNQVLPAQSLAKGKGRTYGSKYPGLIKVEQARCGEVAFRMDEVVSQDFEGDYVALLGFSQESRGESPSREAGTSSGCTSGALEEIAGTKETPLFQKILPLSEANEGPSLGNRACTKPESSEERPYNLGFRRKVNLKAPTHNSERPPQGSYMNVLEDALDCASGLRAGVSQEPAASKMQGPLGNPENMVQLRPGPRQASSPRLSPASPAAAASETKIEVKTKERNGRLPKPMPCPSRNTSSPEPPTPGLKFSFLRGQRQPSVTPEKASLQHNGPWKVLCSLYSPKPNRAKSLGKAGTTQTKTSGPATAPSPLTEEKAALPEASAGSPERGPTLEEEPPGPEPRIGALGVKVFRSRIACLPGGRDRAGRPLLLVSTTEGAWEAPWCTVSEVTKLLSYLCTIPRPEDKAKGLAVLIDARRQPPQPGLVSALQATQAQVPASIRAILFLGEKEAALQLQTLPDVQVEVLTSLKALSHHVDPSQLPAVLEGPFPYCHTEWVHFFQVFTVTAFSP

SEQ ID NO: 69856 - protein, 140 aa, Homo sapiens
MLGVLELLLLGAAWLAGPARGQNETEPIVLEGKCLVVCDSNPTSDPTGTALGISVRSGSAKVAFSAIRSTNHEPSEMSNRTMIIYFDQVSVPSSRGVQIGLVKEGWMEDRCPVLSKGSAEARGRQSGTDSCPLPFVPVSL

SEQ ID NO: 69857 - protein, 63 aa, Homo sapiens
MSFRKVNIIILVLAVALFLLVLHHNFLSLSSLLRNEVTDSGIVGPQPIDFVPNALRHAVDGRQ

SEQ ID NO: 69858 - protein, 158 aa, Homo sapiens
MDTGVIEGGLNVTLTIRLLMHGKEVGSIIGKKGESVKKMREESGARINISEGNCPERIITLAGPTNAIFKAFAMIIDKLEEDISSSMTNSTAASRPPVTLRLVVPASQCGSLIGKGGCKIKEIRESTGAQVQVAGDMLPNSTERAITIAGIPQSIIEC

SEQ ID NO: 69859 - protein, 1553 aa, Homo sapiens
MEPSALRKAGSEQEEGFEGLPRRVTDLGMVSNLRRSNSSLFKSWRLQCPFGNNDKQESLSSWIPENIKKKECVYFVESSKLSDAGKVVCQCGYTHEQHLEEATKPHTFQGTQWDPKKHVQEMPTDAFGDIVFTGLSQKVKKYVRVSQDTPSSVIYHLMTQHWGLDVPNLLISVTGGAKNFNMKPRLKSIFRRGLVKVAQTTGAWIITGGSHTGVMKQVGEAVRDFSLSSSYKEGELITIGVATWGTVHRREGLIHPTGSFPAEYILDEDGQGNLTCLDSNHSHFILVDDGTHGQYGVEIPLRTRLEKFISEQTKERGGVAIKIPIVCVVLEGGPGTLHTIDNATTNGTPCVVVEGSGRVADVIAQVANLPVSDITISLIQQKLSVFFQEMFETFTESRIVEWTKKIQDIVRRRQLLTVFREGKDGQQDVDVAILQALLKASRSQDHFGHENWDHQLKLAVAWNRVDIARSEIFMDEWQWKPSDLHPTMTAALISNKPEFVKLFLENGVQLKEFVTWDTLLYLYENLDPSCLFHSKLQKVLVEDPERPACAPAAPRLQMHHVAQVLRELLGDFTQPLYPRPRHNDRLRLLLPVPHVKLNVQGVSLRSLYKRSSGHVTFTMDPIRDLLIWAIVQNRRELAGIIWAQSQDCIAAALACSKILKELSKEEEDTDSSEEMLALAEEYEHRAIGVFTECYRKDEERAQKLLTRVSEAWGKTTCLQLALEAKDMKFVSHGGIQAFLTKVWWGQLSVDNGLWRVTLCMLAFPLLLTGLISFREKRLQDVGTPAARARAFFTAPVVVFHLNILSYFAFLCLFAYVLMVDFQPVPSWCECAIYLWLFSLVCEEMRQLFYDPDECGLMKKAALYFSDFWNKLDVGAILLFVAGLTCRLIPATLYPGRVILSLDFILFCLRLMHIFTISKTLGPKIIIVKRMMKDVFFFLFLLAVWVVSFGVAKQAILIHNERRVDWLFRGAVYHSYLTIFGQIPGYIDGVNFNPEHCSPNGTDPYKPKCPESDATQQRPAFPEWLTVLLLCLYLLFTNILLLNLLIAMFNYTFQQVQEHTDQIWKFQRHDLIEEYHGRPAAPPPFILLSHLQLFIKRVVLKTPAKRHKQLKNKLEKNEEAALLSWEIYLKENYLQNRQFQQKQRPEQKIEDISNKAGLELWGSRTSSVCKSRQFLHLTVVESRGSEKAPVTTLACLQGCLGKHGRVDAMVDLLDLDPLKRSGSMEQRLASLEEQVAQTAQALHWIVRTLRASGFSSEADVPTLASQKAAEEPDAEPGGRKKTEEPGDSYHVNARHLLYPNCPVTRFPVPNEKVPWETEFLIYDPPFYTAERKDAAAMDPMGDTLEPLSTIQYNVVDGLRDRRSFHGPYTVQAGLPLNPMGRTGLRGRGSLSCFGPNHTLYPMVTRWRRNEDGAICRKSIKKMLEVLVVKLPLSEHWALPGGSREPGEMLPRKLKRILRQEHWPSFENLLKCGMEVYKGYMDDPRNTDNAWIETVAVSVHFQDQNDVELNRLNSNLHACDSGASIRWQVVDRRIPLYANHKTLLQKAAAEFGAHY

SEQ ID NO: 69860 - protein, 111 aa, Homo sapiens
MASILRSPQALQLTLALIKPDAVAHPLILEAVHQQILSNKFLIVRMRELLWRKEDCQRFYREHEGRFFYQRLVEFMASGPIRAYILAHKDAIQLWRTLMGPTRVFRARHVA

SEQ ID NO: 69861 - protein, 76 aa, Homo sapiens
  MOD_RES (1)..(1): Any amino acid
XPGPLPVLLLLLAGAPAARPTPPTCYSRMRALSQEITRDFNLLQVSEPSDLVFLLDDCNALEYPIPVTTVLPDRQR

SEQ ID NO: 69862 - protein, 147 aa, Homo sapiens
IPDQDMPTLSAYMAEACGGCDLQLNVCLFYVGEPKMDTTPPARYASHTDTAAAYKEVTRAAGGRFHWFGDTGIYESDDINSIMSEMEKALNYSQKCAFLMASLKNHSGKVLGSSALPKEKPKTLQLRSQPKKLCPPRPTVPLGARMV

SEQ ID NO: 69863 - protein, 35 aa, Homo sapiens
MTADKDKDKDKEKDRDRDRDREREKRDKARESENS

SEQ ID NO: 69864 - protein, 130 aa, Homo sapiens
MGELFRSEEMTLAQLFLQSEAAYCCVSELGELGKVQFRDLNPDVNVFQRKFVNEVRRCEEMDRKLRFVEKEIRKANIPIMDTGENPEVPFPRDMIDLEANFEKIENELKEINTNQEALKRNFLELTELKF

SEQ ID NO: 69865 - protein, 517 aa, Homo sapiens [sequence omitted]

SEQ ID NO: 69866 - protein, 153 aa, Homo sapiens
MVLGPEQKMSDDSVSGDHGESASLGNINPAYSNPSLSQSPGDSEEYFATYFNEKISIPEEEVPRVILWLMVELAIIGSDMQEVIGSAIAINLLSVGRIPLWGGVLITIADTFVFLFLDKYGLRKLEAFFGFLITIMALTFGYEYVTVKPSQSQ

SEQ ID NO: 69867 - protein, 60 aa, Homo sapiens
MTLEELVACDNAAQKMQTVTAAVEELLVAAQRQDRLTVGVYESAKLMNGPRQRGPLPLGH

SEQ ID NO: 69868 - protein, 60 aa, Homo sapiens
MTFGQSKLYRSEDYGKNFKDITDLINNTFIRTEFGMAIGPENSGKVVLTAEVSGGSRGGR

SEQ ID NO: 69869 - protein, 50 aa, Homo sapiens
MQLAARIRPRDLEDFFSAVGKVRDVRIISDRNSRRSKGIAYVEFCEIQSV

SEQ ID NO: 69870 - protein, 16 aa, Homo sapiens
SVRCLVTREALDTSDW

SEQ ID NO: 69871 - protein, 184 aa, Homo sapiens
  MOD_RES (1)..(1): Any amino acid
XREGLGPHGPSFARVPVAPSSSSGGRGGAEPRPLPLSYRLLDGEAALPAVVFLHGLFGSKTNFNSIAKILAQQTGRRVLTVDARNHGDSPHSPDMSYEIMSQDLQDLLPQLGLVPCVVVGHSMGGKTAMLLALQRVIHPRCPGWYCRPGPVKGRVAPPDRTRNLPQLLHPHRTWPCGSTCSLTW

SEQ ID NO: 69872 - protein, 34 aa, Homo sapiens
MRHDVGEFPVLFFGSNDYLWTHQARVFPYMEGDV

SEQ ID NO: 69873 - protein, 42 aa, Homo sapiens
  MOD_RES (1)..(1): Any amino acid
XERMVGSGLLWLALVSCILTQASAVQRGKYSAHLASQMSRKT

SEQ ID NO: 69874 - protein, 66 aa, Homo sapiens
MAILLSYSERDPVPGGCNLEFDLDIDPNIYLEYNFFETTIKFAPANLGYARGVDPPPCDAGTDQDS

SEQ ID NO: 69875 - protein, 57 aa, Homo sapiens
MGGDLVLGLGALRRRKRLLEQEKSLAGWALVLAGTGIGLMVLHAEMLWFGGCSTHFG

SEQ ID NO: 69876 - protein, 163 aa, Homo sapiens
AALLKVAQMVTLLIAFICVRSSLWTNYSAYSYFEVVTICDLIMILAFYLVHLFRFYRVLTCISWPLSMQPSDEATTPRPLRSFAERRTCTPGEASGPVFLCQSPVRLVGTRKGLHPLPALPGSQLPELLSQPETLPPAFRGEHPSHSGKGKQPPGKCFLPSCF

SEQ ID NO: 69877 - protein, 40 aa, Homo sapiens
MKAIKKSLTEEEYLYLDFSHQTEGCIFPLHTSVTLFLLSY

SEQ ID NO: 69878 - protein, 553 aa, Homo sapiens
MPCVQAQYGSSPQGASPASQSYSYHSSGEYSSDFLTPEFVKFSMDLTNTEITATTSLPSFSTFMDNYSTGYDVKPPCLYQMPLSGQQSSIKVEDIQMHNYQQHSHLPPQSEEMMPHSGSVYYKPSSPPTPTTPGFQVQHSPMWDDPGSLHNFHQNYVATTHMIEQRKTPVSRLSLFSFKQSPPGTPVSSCQMRFDGPLHVPMNPEPAGSHHVVDGQTFAVPNPIRKPASMGFPGLQIGHASQLLDTQVPSPPSRGSPSNEGLCAVCGDNAACQHYGVRTCEGCKGFFKRTVQKNAKYVCLANKNCPVDKRRRNRCQYCRFQKCLAVGMVKEVVRTDSLKGRRGRLPSKPKSPQEPSPPSPPVSLISALVRAHVDSNPAMTSLDYSRFQANPDYQMSGDDTQHIQQFYDLLTGSMEIIRGWAEKIPGFADLPKADQDLLFESAFLELFVLRLAYRSNPVEEYEHRHFCLLLHCCPGYGHRETRAQGTQESGRTAKQDCKLSQRPRDFQQWGVEPPQLFVQTVGEAPRTSYPLHTGATAHFLPEIGRLGATASNN

SEQ ID NO: 69879 - protein, 122 aa, Homo sapiens
MDSPSLRELQQPLLEGTECETPAQKPGRHELGSPLREIAFAESLRGLQFLSPPLPSVSAGLGEPRPPDVEDMSSSDSDSDWDGGSRLSPFLPHDHLGLAVFSMLCCFWPVGIAAFCLAQKTN

SEQ ID NO: 69880 - protein, 118 aa, Homo sapiens
MSARGEGAGQPSTSAQGQPAAPAPQKRGRGRPRKQQQEPTGEPSPKRPRGRPKGSKNKSPSKAAQKKAEATGEKRPRGRPRKWPQQVVQKKPAQVNVALPGKDHPGNLIYLLFSKNAT

SEQ ID NO: 69881 - protein, 188 aa, Homo sapiens
LCYCFAAGSPVPFGPEGRLEDKLHKPKATQTEVKPSVRFNLRTSKDPEHEGCYLSVGHSQPLEDCSFNMTAKTFFIIHGWTMSGIFENWLHKLVSALHTREKDANVVVVDWLPLAHQLYTDAVNNTRVVGHSIARMLDWLQVLGDERESPVTSRISNPIFLRNAGHASVAMNFWSLIKIFEIKSFIEL

SEQ ID NO: 69882 - protein, 504 aa, Homo sapiens
MPGVCDRAPDFLSPSEDQVLRPALGSSVALNCTAWVVSGPHCSLPSVQWLKDGLPLGIGGHYSLHEYSWVKANLSEVLVSSVLGVNVTSTEVYGAFTCSIQNISFSSFTLQRAGPTSHVAAVLASLLVLLALLLAALLYVKCRLNVLLWYQDAYGEVEINDGKLYDAYVSYSDCPEDRKFVNFILKPQLERRRGYKLFLDDRDLLPRAEPSADLLVNLSRCRRLIVVLSDAFLSRAWCSHSFREGLCRLLELTRRPIFITFEGQRRDPAHPALRLLRQHRHLVTLLLWRPGSVTPSSDFWKEVQLALPRKVQYRPVEGDPQTQLQDDKDPMLILRGRVPEGRALDSEVDPDPEGDLGMPAQPHSPTGEAQHRAEWGQAQGTGPGGAPGVEDSSRHREPLHGLCPGGARPSVCLGTSWASQAITAGGEQGQPLAVGLGQGCGWPPQASRSPHPRCPGACLWRAISSTAHQWGLAGREPEQRSGRLGSRLAKLQCPHRLLLPGVQG

SEQ ID NO: 69883 - protein, 110 aa, Homo sapiens
MKRAVDCPENIKKEICINKMLNHENVVKFYGHRREGNIQYLFLEYCSGGELFDRIEPDIGMPEPDAQRFFHQLMAGVVYLHGIGITHRDIKPENLLLDERDNLKISDFGL

SEQ ID NO: 69884 - protein, 163 aa, Homo sapiens
MRVRIGLTLLLCAVLLSLASASSDEEGSQDESLDSKTTLTSDESVKDHTTAGRVVAGQIFLDSEESELESSIQEEEDSLKSQEGESVTEDISFLESPNPENKDYEEPKKVRKPDKEYDECTSDGREDGRLWCATTYDYKADEKWGFCETEEEAAKRRQMQEAE

SEQ ID NO: 69885 - protein, 759 aa, Homo sapiens
MSSTRSQNPHGLKQIGLDQIWDDLRAGIQQVYTRQSMAKSRYMELYTHVYNYCTSVHQSNQARGAGVPPSKSKKGQTPGGAQFVGLELYKRLKEFLKNYLTNLLKDGEDLMDESVLKFYTQQWEDYRFSSKVLNGICAYLNRHWVRRECDEGRKGIYEIYSVTNAVLKLIEKERNGETINTRLISGVVQSYVELGLNEDDAFAKGPTLTVYKESFESQFLADTERFYTRESTEFLQQNPVTEYMKKAEARLLEEQRRVQVYLHESTQDELARKCEQVLIEKHLEIFHTEFQNLLDADKNEDLGRMYNLVSRIQDGLGELKKLLETHIHNQGLAAIEKCGEAALNDPKMYVQTVLDVHKKYNALVMSAFNNDAGFVAALDKACGRFINNNAVTKMAQSSSKSPELLARYCDSLLKKSSKNPEEAELEDTLNQVMVVFKYIEDKDVFQKFYAKMLAKRLVHQNSASDDAEASMISKLKQACGFEYTSKLQRMFQDIGVSKDLNEQFKKHLTNSEPLDLDFSIQVLSSGSWPFQQSCTFALPSELERSYQRFTAFYASRHSGRKLTWLYQLSKGELVTNCFKNRYTLQASTFQMAILLQYNTEDAYTVQQLTDSTQIKMDILAQVLQILLKSKLLVLEDENANVDEVELKPDTLIKLYLGYKNKKLRVNINVPMKTEQKQEQETTHKNIEEDRKLLIQAAIVRIMKMRKVLKHQQLLGEVLTQLSSRFKPRVPVIKKCIDILIEKEYLERVDGEKDTYSYLA

SEQ ID NO: 69886 - protein, 128 aa, Homo sapiens
MGSRASTLLRDEELEEIKKETGFSHSQITRLYSRFTSLDKGENGTLSREDFQRIPELAINPLGDRIINAFFPEGEDQVNFRGFMRTLAHFRPIEDNEKSKDVNGPEPLNSRSNKLHCATHDGRSKYLR

SEQ ID NO: 69887 - protein, 175 aa, Homo sapiens
MEGTAGTITSNEWSSPTSPEGSTASGGSQALDKPIDNDAEGVWSPDIEQSFQEALAIYPPCGRRKIILSDEGKMYGRNELIARYIKLRTGKTRTRKQVSSHIQVLARRKAREIQAKLKDQAAKDKALQSMAAMSSAQIISATAFHSSMALARGPGRPAVSGFWQGALPGQAGTSH

SEQ ID NO: 69888 - protein, 1450 aa, Homo sapiens
MALVTVQRSPTPSTTSSPCASSSHLEDSESAALLCCECEESEIFTDSNEADSGEEECRSQPRSISESFLTVKGAALFLPRGNGSSTPRISHRRNKHAGDLQQHLQAMFILLRPEDNIRLAVRLESTYQNRTRYMVVVSTNGRQDTEESIVLGMDFSSNDSSTCTMGLVLPLWSDTLIHLDGDGGFSVSTDNRVHIFKPVSVQAMWSALQSLHKACEVARAHNYYPGSLFLTWVSYYESHINSDQSSVNEWNAMQDVQSHRPDSPALFTDIPTERERTERLIKTKLREIMMQKDLENITSKEIRTELEMQMVCNLREFKEFIDNEMIVILGQMDSPTQIFEHVFLGSEWNASNLEDLQNRGVRYILNVTREIDNFFPGVFEYHNIRVYDEEATDLLAYWNDTYKFISKAKKHGSKCLVHCKMGVSRSASTVIAYAMKEYGWNLDRAYDYVKERRTVTKPNPSFMRQLEEYQGILLASKQRHNKLWRSHSDSDLSDHHEPICKPGLELNKKDITTSADQIAEVKTMESHPPIPPVFVEHMVPQDANQKGLCTKERMICLEFTSREFHAGQIEDELNLNDINGCSSGCCLNESKFPLDNCHASKALIQPGHVPEMANKFPDLTVEDLETDALKADMNVHLLPMEELTSPLKDPPMSPDPESPSPQPSCQTEISDFSTDRIDFFSALEKFVELSQETRSRSFSHSRMEELGGGRNESCRLSVVEVAPSKVTADDQRSSSLSNTPHASEESSMDEEQSKAISELVSPDIFMQSHSENAISVKEIVTEIESISQGVGQIQLKGDILPNPCHTPKKNSIHELLLERAQTPENKPGHMEQDEDSCTAQPELAKDSGMCNPEGCLTTHSSIADLEEGEPAEGEQELQGSGMHPGAKWYPGSVRRATLEFEERLRQEQEHHGAAPTCTSLSTRKNSKNDSSVADLAPKGKSDEAPPEHSFVLKEPEMSKGKGKYSGSEAGSLSHSEQNATVPAPRVLEFDHLPDPQEGPGSDTGTQQEGVLKDLRTVIPYQESETQAVPLPLPKRVEIIEYTHIVTSPNHTGPGSEIATSEKSGEQGLRKVNMEKSVTVLCTLDENLNRTLDPNQVSLHPQVLPLPHSSSPEHNRPTDHPTSILSSPEDRGSSLSTALETAAPFVSHTTHLLSASLDYLHPQTMVHLEGFTEQSSTTDEPSAEQVSWEESQESPLSSGSEVPYKDSQLSSADLSLISKLGDNTGELQEKMDPLPVACRLPHSSSSENIKSLSHSPGVVKERAKEIESRVVFQAGLTKPSQMRRSASLAKLGYLDLCKDCLPEREPASCESPHLKLLQPFLRTDSGMHAMEDQESLENPGAPHNPEPTKSFVEQLTTTECIVQSKPVERPLVQYAKEFGSSQQYLLPRAGLELTSSEGGLPVLQTQGLQCACPAPGLAVAPRQQHGRTHPLRRLKKANDKKRTTNPFYNTM

SEQ ID NO: 69889 - protein, 321 aa, Homo sapiens
MLVCASPPPLPALTGLRDDKLTLLSSSPGLGGTPGETVRHCSAPEDPIFRFSSLHSYPFPGTIKSRDMSWKRHHLIPETFGVKRRRKRGPVESDPLRGEPGSARAAVSELMQLFPRGLFEDALPPIVLRSQVYSLVPDRTVADRQLKELQEQGEIRIVQLGFDLDAHGIIFTEDYRTRVLKACDGRPYAGAVQKFLASVLPACGDLSFQQDQMTQTFGFRDSEITHLVNAGVLTVRDAGSWWLAVPGAGRFIKYFVKGRQAVLGMVRKAKYRELLLSELLGRRAPVVVRLGLTYHVHDLIGAQLVDCISTTSGTLLRLPET

SEQ ID NO: 69890 - protein, 1237 aa, Homo sapiens
MEDFRGIAEESFPSFLTNSLFGNSGILENVTLSSNLGLPVAVSTLARDRSSTDNRYPDIQASYLVEGRFSVPSGSSPGSQSDAEPRERLQLSFQDDDSISRKKSYVESQRLSNALSKQSALQMETAGPEEEPAGATESLQGQDLFNRASPLEQAQDSPIDFHLQSWMNNKEPKIVVLDAGKHFEDKTLKSDLSHTSLLENEKLILPTSLEDSSDDDIDDEMFYDDHLEAYFEQLAIPGMIYEDLEGPEPPEKGFKLPTNGLRQANENGSLNCKFQSENNSSLISLDSHSSETTHKESEESQVICLPGTSNSIGTGDSRRYTDGEFFAQRSEALGCLGGGNNVKRPSFGYFIRSPEKREPIALIRKSDVSRGNLEKEMAHLNHDLYSGDLNEQSQAQLSEGSITLQVEAVESTSQVDENDVTLTADKGKTEDTFFMSNKPQRYKDKLPDSGDSMLRISTIASAIAEASVNTDPSQLAAMIKALSNKTRDKTFQEDEKQKDYSHVRHFLPNDLEKSNGSNALDMEKYLKKTEVSRYESALENFSRASMSDTWDLSLPKEQTTQDIHPVDLSATSVSVRAPEENTAAIVYVENGESENQESFRTINSSNSVTNRENNSAVVDVKTCSIDNKLQDVGNDEKATSISTPSDSYSSVRNPRITSLCLLKDCEEIRDNRENQRQNECVSEISNSEKHVTFENHRIVSPKNSDLKNTSPEHGGRGSEDEQESFRPSTSPLSHSSPSEISGTSSSGCALESFGSAAQQQQPPCEQELSPLVCSPAGVSRLTYVSEPESSYPTTATDDALEDRKSDITSELSTTIIQGSPAALEERAMEKLREKVPFQNRGKGTLSSIIQNNSDTRKATETTSLSSKPEYVKPDFRWSKDPSSKSGNLLETSEVGWTSNPEELDPIRLALLGKSGLSCQVGSATSHPVSCQEPIDEDQRISPKDKSTAGREFSGQVSHQTTSENQCTPIPSSTVHSSVADMQNMPAAVHALLTQPSLSAAPFAQRYLGTLPSTGSTTLPQCHAGNATVCGFSGGLPYPAVAGEPVQNSVAVGICLGSNIGSGWMGTSSLCNPYSNTLNQNLLSTTKPFPVPSVGTNCGIEPWDSGVTSGLGSVRVPEELKLPHACCVGIASQTLLSVLNPTDRWLQVSIGVLSISVNGEKVDLSTYRCLVFKNKAIIRPHATEEIKVLFIPSSPGVFRCTFSVASWPCSTDAETIVQAEALASTVTLTAIAESPVIE

SEQ ID NO: 69891 - protein, 272 aa, Homo sapiens
MARAAGSTDPPRPRHLADLAGPSQPSTKPPDEDDVHRCGRCQAEFTALEDFVQHKIQKACQRAPPEALPATPATTALLGQEVVPAAPGPEEPITVAHIVVEAASLAADISHASDLVGGGHIKEVIVAAEAELGDGEMAEAPGSPRQQGLGLAGEGEQAQVKLLVNKDGRYVCALCHKTFKTGSILKAHMVTHSSRKDHECKLCGASFRTKGSLIRHHRRHTDERPYKCSKCGKSFRESGALTRHLKSLTPCTEKIRFSVSKDVVVSKEDARA

SEQ ID NO: 69892 - protein, 267 aa, Homo sapiens
MGPEALSSLLLLLLVASGDADMKGHFDPAKCRYALGMQDRTIPDSDISASSSWSDSTAARHSRLESSDGDGAWCPAGSVFPKEEEYLQVDLQRLHLVALVGTQGRHAGGLGKEFSRSYRLRYSRDGRRWMGWKDRWGQEVISGNEDPEGVVLKDLGPPMVARLVRFYPRADRVMSVCLRVELYGCLWRDGLLSYTAPVGQTMYLSEAVYLNDSTYDGHTVGGLQYGGLGQLADGVVGLDDFRKSQELRVWPGYDYVGWSNHSFSSGY

SEQ ID NO: 69893 - protein, 505 aa, Homo sapiens
  MOD_RES (1)..(1): Any amino acid
XSSGKVTSEYTDGSQQRLVGEKETQALTPVSDGMEVPNDSALQEFFCLSHDESNSEPHSQSSYRHKEMGQNLRETVSYCLIDDECPLMVPAFDKSEAQVLNPEHKVTETEDTQMVSKGKDLGTQNHTSELILSSPPGQKVGSSFGLTWDANDMVISTDKTMCMSTPVLEPTKVTFSVSPIEATEKCKKVEKGNRGLKNIPDSKEAPVNLCKPSLGKSTIKTNTPIGCKVRKTEIISYPRPNFKNVKAKVMSRAVLQPKDAALSKVTPRPQQTSASSPSSVNSRQQTVLSRTPRSDLNADKKAEILINKTHKQQFNKLITSQAVHVTTHSKNASHRVPRTTSAVKSNQEDVDKASSSNSACETGSVSALFQKIKGILPVKMESAECLEMTYVPNIDRISPEKKGEKENGTSMEKQELKQEIMNETFEYGSLFLGSASKTTTTSGRNISKPDSCGLRQIAAPKAKVGPPVSCLRRNSDNRNPSADRAVSPQRIRRVSSSVLPKAAFS

SEQ ID NO: 69894 - protein, 78 aa, Homo sapiens
MAHAMENSWTISKEYHIDEEVGFALPNPQENLPDFYNDWMFIAKHLPDLIESGQLRERVEKLNMLSIDHLTDHKSQRL

SEQ ID NO: 69895 - protein, 353 aa, Homo sapiens
MMDLRNTPAKSLDKFIEDYLLPDTCFRMQINHAIDIICGFLKERCFRGSSYPVCVSKVVKGGSSGKGTTLRGRSDADLVVFLSPLTTFQDQLNRRGEFIQEIRRQLEACQRERAFSVKFEVQAPRWGNPRALSFVLSSLQLGEGVEFDVLPAFDALGQLTGGYKPNPQIYVKLIEECTDLQKEGEFSTCFTELQRDFLKQRPTKLKSLIRLVKHWYQNCKKKLGKLPPQYALELLTVYAWERGSMKTHFNTAQGFRTVLELVINYQQLCIYWTKYYDFKNPIIEKYLRRQLTKPRPVILDPADPTGNLGGGDPKGWRQLAQEAEAWLNYPCFKNWDGSPVSSWILLLQCRKTP

SEQ ID NO: 69896 - protein, 121 aa, Homo sapiens
  MOD_RES (1)..(1): Any amino acid
XWEVLAVVVPVPPFTCLLRDLVPATNYSLRVRCANALGPSPYADWVPFQTKGLAPASAPQNLHAIRTDSGLILEWEEVIPEAPLEGPLGPYKLSWVQDNGTQASRALLTAAHPGYLWSLVC

SEQ ID NO: 69897 - protein, 673 aa, Homo sapiens
MASGSGDSVTRRSVASQFFTQEEGPGIDGMTTSERVVDLLNQAALITNDSKITVLKQVQELIINKDPTLLDNFLDEIIAFQADKSIEVRKFVIGFIEEACKRDIELLLKLIANLNMLLRDENVNVVKKAILTMTQLYKVALQWMVKSRVISELQEACWDMVSAMAGDIILLLDSDNDGIRTHAIKFVEGLIVTLSPRMADSEIPRRQEHDISLDRIPRDHPYIQYNVLWEEGKAALEQLLKFMVHPAISSINLTTALGSLANIARQRPMFMSEVIQAYETLHANLPPTLAKSQVSSVRKNLKLHLLSVLKHPASLEFQAQITTLLVDLGTPQAEIARNMPSSKDTRKRPRDDSDSTLKKMKLEPNLGEDDEDKDLEPGPSGTSKASAQISGQSDTDITAEFLQPLLTPDNVANLVLISMVYLPEAMPASFQAIYTPVESAGTEAQIKHLARLMATQMTAAGLGPGVEQTKQCKEEPKEEKVVKTESVLIKRRLSAQGQAISVVGSLSSMSPLEEEAPQAKRRPEPIIPVTQPRLAGAGGRKKIFRLSDVLKPLTDAQVEAMKLGAVKRILRAEKAVACSGAAQVRIKILASLVTQFNSGLKAEVLSFILEDVRARLDLAFAWLYQEYNAYLAAGSSPRLCWRRHSSQRVPWRWSASTARMRVAPIWACPHFET

SEQ ID NO: 69898 - protein, 161 aa, Homo sapiens
MIRGRNSATSADEQPHIGNYRLLKTIGKGNFAKVKLARHILTGKEVAVKIIDKTQLNSSSLQKLFREVRIMKVLNHPNIVKLFEVIETEKTLYLVMEYASGGEVFDYLVAHGRMKEKEARAKFRQIVSAVQYCHQKFIVHRDLKAENLLLDADMNIKIADF

SEQ ID NO: 69899 - protein, 87 aa, Homo sapiens
YISETVLAIDAIHQLGFIHRDIKPDNLLLDAKGHVKLSDFGLCTGLKKAHRTEFYRNLTHNPPSDFYVYVFSFCGEHFSLVITIPYC

SEQ ID NO: 69900 - protein, 110 aa, Homo sapiens
MIPGNRMLMVVLLCQVLLGGASHASLIPETGKKKVAEIQGHAGGRRSGQSHELLRDFEATLLQMFGLRRRPQPSKSAVIPDYMRDLYRLQSGEEEEEQIHSTGLEYPERP

SEQ ID NO: 69901 - protein, 193 aa, Homo sapiens
VFTVTKAHFQTPTPVVTDTLRVPMAGLAFSHQLMVPGKEGGVPLAPNQPVHGTQADQERLATCTPSDRTHCAATPSSSEDTETVSNSSEGRASPHDVLETIFVRKVGAFVNKPINQVTLTSLDIPFAMFAPKNLELEDTDPMVNPPDSPETESPLQGSLHSDGSSGGSSGNTHDDFVMIDFKPAFSKDDILPM

SEQ ID NO: 69902 - protein, 690 aa, Homo sapiens
MESVVKNCGQTVHDEVANKQTMEELKDLLKRQVEVNVRNKILYLIQAWAHAFRNEPKYKVVQDTYQIMKVEGHVFPEFKESDAMFAAERAPDWVDAEECHRCRVQFGVMTRKHHCRACGQIFCGKCSSKYSTIPKFGIEKEVRVCEPCYEQLNRKAEGKATSTTELPPEYLTSPLSQQSQLPPKRDETALQEEEELQLALALSQSEAEEKERLRQKSTYTSYPKAEPMPSASSAPPASSLYSSPVNSSAPLAEDIDPELARYLNRNYWEKKQEEARKSPTPSAPVPLTEPAAQPGEGHAAPTNVVEPQFHNGESEESHEQFLKALQNAVTTFVNRMKSNHMRGRSITNDSAVLSLFQSINGMHPQLLELLNQLDERRLYYEGLQDKLAQIRDARGALSALREEHREKLRRAAEEAERQRQIQLAQKLEIMRQKKQEYLEVQRQLAIQRLQEQEKERQMRLEQQKQTVQMRAQMPAFPLPYAQLQAMPAAGGVLYQPSGPASFPSTFSPAGSVEGSPMHGVYMSQPAPAAGPYPSMPSTAADPSMVSAYMYPAGATGAQAAPQAQAGPTASPAYSSYQPTPTAGYQNVASQAPQSLPAISQPPQSSTMGYMGSQSVSMGYQPYNMQNLMTTLPSQDASLPPQQPYIAGQQPMYQQMAPSGGPPQQQPPVAQQPQAQGPPAQGSEAQLISFD

SEQ ID NO: 69903 - protein, 67 aa, Homo sapiens
MIPGKYRSVSGRAANNVNCGLHLVIQTSSLPEKNKVEFKLNKDTSSFPGRLLQHDLERNYSSRQDKS

SEQ ID NO: 69904 - protein, 78 aa, Homo sapiens
  MOD_RES (1)..(1): Any amino acid
XGLQDARARPPPYTGVWLDDRKICAIGERRGAGRYLRAEESAVEGTSHPTAWLSTALPTSRGLSTSCPVDWLGQASLP

SEQ ID NO: 69905 - protein, 173 aa, Homo sapiens
MPVAVMAESAFSFKKLLDQCENQELEAPGGIATPPVYGQLLALYLLHNDMNNARYLWKRIPPAIKSANSELGGIWSVGQRIWQRDFPGIYTTINAHQWSETVQPIMEALRGILEQGWQADSTTRMVLPRKPVAGALDVSFNKFIPLSEPAPVPPIPNEQQLARLTDYVAFLEN

SEQ ID NO: 69906 - protein, 46 aa, Homo sapiens
MADAGIRRVVPSDLYPLVLGFLRDNQLSEVANKFAKATGALEQHLK

SEQ ID NO: 69907 - protein, 61 aa, Homo sapiens
MNSTLFSQVENHSVHSNFSEKNAQLLAFENDDCHLPLAMIFTLALAYGAVIILGVSGNLAL

SEQ ID NO: 69908 - protein, 24 aa, Homo sapiens
MAAVGSLLGRLRQSTVKATGPALR

SEQ ID NO: 69909 - protein, 105 aa, Homo sapiens
MPPRKKRRQPSQKAPLLFHQQPLEGPKHSCASTQLPITHTRQVPSKPIDHSTITSWVSPDFDTAAGSLFPAYQKHQNRARHSSRKPTTSKFPHLTFESPQSSSSE

SEQ ID NO: 69910 - protein, 83 aa, Homo sapiens
MVVALRYVWPLLLCSPCLLIQIPEEYEGHHVMEPPVITEQSPRRLVVFPTDDISLKCEASGKPEVQFRWTRDGVHFKPKEELG

SEQ ID NO: 69911 - protein, 254 aa, Homo sapiens
MKGTCVIAWLFSSLGLWRLAHPEAQGTTQCQRTEHPVISYKEIGPWLREFRAKNAVDFSQLTFDPGQKELVVGARNYLFRLQLEDLSLIQAVEWECDEATKKACYSKGKSKEECQNYIRVLLVGGDRLFTCGTNAFTPVCTNRSLSNLTEIHDQISGMARCPYSPQHNSTALLTAGGELYAATAMDFPGRDPAIYRSLGILPPLRTAQYNSKWLNEPNFVSSYDIGNFTYFFFRENAVEHDCGKTVFSRAARVC

SEQ ID NO: 69912 - protein, 100 aa, Homo sapiens
  MOD_RES (1)..(1): Any amino acid
XAATGHTVVLVDQTEDILAKSKKGIEESLRKVAKKKFAENLKAGDEFVEKTLSTIATSTDAASVVHSTDLVVEAIVENLKVKNELFKRLDKFAAESLKHQ

SEQ ID NO: 69913 - protein, 405 aa, Homo sapiens
MMDLRNTPAKSLDKFIEDYLLPDTCFRMQINHAIDIICGFLKERCFRGSSYPVCVSKVVKGGSSGKGTTLRGRSDADLVVFLSPLTTFQDQLNRRGEFIQEIRRQLEACQRERAFSVKFEVQAPRWGNPRALSFVLSSLQLGEGVEFDVLPAFDALDFARTGQLTGGYKPNPQIYVKLIEECTDLQKEGEFSTCFTELQRDFLKQRPTKLKSLIRLVKHWYQNCKKKLGKLPPQYALELLTVYAWERGSMKTHFNTAQGFRTVLELVINYQQLCIYWTKYYDFKNPIIEKYLRRQLTKPRPVILDPADPTGNLGGGDPKGWRQLAQEAEAWLNYPCFKNWDGSPVSSWILLAESNSADDETDDPRRYQKYGYIGTHEYPHFSHRPSTLQAASTPQAEEDWTCTIL

SEQ ID NO: 69914 - protein, 16 aa, Homo sapiens
MPVTQSVKKPSKPVKK

SEQ ID NO: 69915 - protein, 100 aa, Homo sapiens
MASDDFDIVIEAMLEAPYKKEEDEQQRKEVKKDYPSNTTSSTSNSGNETSGSSTIGETSNRSRDRDRYRRRNSRSRSPGRQCRHRSRSWDRRHGSESRSR

SEQ ID NO: 69916 - protein, 35 aa, Homo sapiens
QDITAMLITFLLYLQMAFLQCVYISDVSVYPNFFL

SEQ ID NO: 69917 - protein, 362 aa, Homo sapiens
MDSDDEMVEEAVEGHLDDDGLPHGFCTVTYSSTDRFEGNFVHGEKNGRGKFFFFDGSTLEGYYVDDALQGQGVYTYEDGGVLQGTYVDGELNGPAQEYDTDGRLIFKGQYKDNIRHGVCWIYYPDGGSLVGEVNEDGEMTGEKIAYVYPDERTALYGKFIDGEMIEGKLATLMSTEEGRPHFELMPGNSVYHFDKSTSSCISTNALLPDPYESERVYVAESLISSAGEGLFSKVAVGPNTVMSFYNGVRITHQEVDSRDWALNGNTLSLDEETVIDVPEPYNHVSKYCASLGHKANHSFTPNCIYDIGQKNHLGTCKRSRFGAPLPKIPHLDQAPWVEHRKAGIPLYSAAQGLMLIMMFVSN

SEQ ID NO: 69918 - protein, 278 aa, Homo sapiens
MESIFHEKQEGSLCAQHCLNNLLQGEYFSPVELSSIAHQLDEEERMRMAEGGVTSEDYRTFLQQPSGNMDDSGFFSIQWFNLNSLLTGPELISDTYLALFLAQLQQEGYSIFVVKGDLPDCEADQLLQMIRVQQMHRPKLIGEELAQLKEQRVHKTDLERVLEANDGSGMLDEDEEDLQRALALSRQEIDMEDEEADLRRAIQLSMQGSSRNISQDMTQTSGTNLTSEELRKRREAYFEKQQQKQQQQQQQQQQGDLSGQSSHPCERPATSSGALGSD

SEQ ID NO: 69919 - protein, 328 aa, Homo sapiens
MYPESTTGSPARLSLRQTGSPGMIYRNLGKSGLRVSCLGLGTWVTFGGQITDEMAEQLMTLAYDNGINLFDTAEVYAAGKAEVVLGNIIKKKGWRRSSLVITTKIFWGGKAETERGLSRKHIIEGLKASLERLQLEYVDVVFANRPDPNTPMEETVRAMTHVINQGMAMYWGTSRWSSMEIMEAYSVARQFNLTPPICEQAEYHMFQREKVEVQLPELFHKIGVGAMTWSPLACGIVSGKYDSGIPPYSRASLKGYQWLKDKILSEEGRRQQAKLKELQAIAERLGCTLPQLAIAWCLRNEGVSSVLLGASNADQLMENIGAIQQEQT

SEQ ID NO: 69920 - protein, 163 aa, Homo sapiens
MMLGTEGGEGFVVKVRGLPWSCSADEVQRFFSDCKIQNGAQGIRFIYTREGRPSGEAFVELESEDEVKLALKKDRETMGHRYVEVFKSNNVEMDWVLKHTGPNSPDTANDGFVRLRGLPFGCSKEEIVQFFSGLEIVPNGITLPVDFQGRSTGEAFVQFASQE

SEQ ID NO: 69921 - protein, 129 aa, Homo sapiens
MRARDSTGHPLMLREQTLGQHLHGEDTGEWEHTCEVCMTNCPTLIVMVGLPARGKTYISKKLTRYLNWIGVPTREFNVGQYRRDVVKTYKSFEFFLPDNEEGLKIRKQCALAALRDVRRFLSEEGGHVA

SEQ ID NO: 69922 - protein, 65 aa, Homo sapiens
MWQAPRERQQPAGAAAPQVSEPGAPLRSSLLGLGGSLLPAGFAAGLHCPAFASEEAAQPWVLDNF

SEQ ID NO: 69923 - protein, 386 aa, Homo sapiens
MYGKDGKGTNWMDQGDMECRMQEIDDHSRVKLQNAENDYINASLVDIEEAQRSYILTQGPLPNTCCHFWLMVWQQKTKAVVMLNRIVEKESVKCAQYWPTDDQEMLFKETGFSVKLLSEDVKSYYTVHLLQLENINSGETRTISHFHYTTWPDFGVPESPASFLNFLFKVRESGSLNPDHGPAVIHCSAGIGRSGTFSLVDTCLVLMEKGDDINIKQVLLNMRKYRMGLIQTPDQLRFSYMAIIEGAKCIKGDSSIQKRWKELSKEDLSPAFDHSPNKIMTEKYNGNRIGLEEEKLTGDRCTGLSSKMQDTMEENSESALRKRIREDRKATTAQKVQQMKQRLNENERKRKRWLYWQPILTKMGFMSVILVGAFVGWTLFFQQNAL

SEQ ID NO: 69924 - protein, 246 aa, Homo sapiens
MARGSVSDEEMMELREAFAKVDTDGNGYISFNELNDLFKAACLPLPGYRVREITENLMATGDLDQDGRISFDEFIKIFHGLKSTDVAKTFRKAINKKEGICAIGGTSEQSSVGTQHSYSEEEKYAFVNWINKALENDPDCRHVIPMNPNTNDLFNAVGDGIVLCKMINLSVPDTIDERTINKKKLTPFTIQENLNLALNSASAIGCHVVNIGAEDLKEGKPYLVLGLLWQVIKIGLFADIELSRNE

SEQ ID NO: 69925 - protein, 67 aa, Homo sapiens
MNGTANPLLDREEHCLRLGESFEKRPRASFHTIRYDFKPASIDTSCEGELQVGKGDEVTITLPHIPS

SEQ ID NO: 69926 - protein, 55 aa, Homo sapiens
MAADQRPKADTLALRQRLIRHAALWSPHGTGQPPFLRIRETDADTCRNEQGGHRG

SEQ ID NO: 69927 - protein, 152 aa, Homo sapiens
MSEEIITPVYCTGVSAQVQKQRARELGLGRHENAIKYLGQDYEQLRVRCLQSGTLFRDEAFPPVPQSLGYKDLGPNSSKTYGIKWKRPTELLSNPQFIVDGATRTDICQGALGDCWLLAAIASLTLNDTLLHRVVPHGQSFQNGYAGIFHFQ

SEQ ID NO: 69928 - protein, 8 aa, Homo sapiens
GFDSTQWK

SEQ ID NO: 69929 - protein, 753 aa, Homo sapiens
MTMYLWLKLLAFGFAFLDTEVFVTGQSPTPSPTGLTTAKMPSVPLSSDPLPTHTTAFSPASTFERENDFSETTTSLSPDNTSTQVSPDSLDNASAFNTTGVSSVQTPHLPTHADSQTPSAGTDTQTFSGSAANAKLNPTPGSNAISDAYLNASETTTLSPSGSAVISTTTIATTPSKPTCDEKYANITVDYLYNKETKLFTAKLNVNENVECGNNTCTNNEVHNLTECKNASVSISHNSCTAPDKTLILDVPPGVEKFQLHDCTQVEKADTTICLKWKNIETFTCDTQNITYRFQCGNMIFDNKEIKLENLEPEHEYKCDSEILYNNHKFTNASKIIKTDFGSPGEPQIIFCRSEAAHQGVITWNPPQRSFHNFTLCYIKETEKDCLNLDKNLIKYDLQNLKPYTKYVLSLHAYIIAKVQRNGSAAMCHFTTKSAPPSQVWNMTVSMTSDNSMHVKCRPPRDRNGPHERYHLEVEAGNTLVRNESHKNCDFRVKDLQYSTDYTFKAYFHNGDYPGEPFILHHSTSYNSKALIAFLAFLIIVTSIALLVVLYKIYDLHKKRSCNLDEQQELVERDDEKQLMNVEPIHADILLETYKRKIADEGRLFLAEFQSIPRVFSKFPIKEARKPFNQNKNRYVDILPYDYNRVELSEINGDAGSNYINASYIDGFKEPRKYIAAQGPRDETVDDFWRMIWEQKATVIVMVTRCEEGNRNKCAEYWPSMEEGTRAFGDVVVKINQHKRCPDYIIQKLNIVN

SEQ ID NO: 69930 - protein, 31 aa, Homo sapiens
MAANLSRNGPALQEAYVRVVTEKSPTDWGPM

SEQ ID NO: 69931 - protein, 77 aa, Homo sapiens
  MOD_RES (1)..(1): Any amino acid
XRKVPALRGDDGRWRPEDLGRLLGEAERDLVAGGGDTSAEPRSAAPGHWQADPVSLWATSGGAEQCRRQEKAVPDAG

SEQ ID NO: 69932 - protein, 72 aa, Homo sapiens
MGSWVQLITSVGVQQNHPGWTVAGQFQEKKRFTEEVIEYFQKKVSPVHLKILLTSDEAWKRFVRVAELPREE

SEQ ID NO: 69933 - protein, 164 aa, Homo sapiens
MRLARLLRGAALAGPGPGLRAAGFSRSFSSDSGSSPASERGVPGQVDFYARFSPSPLSMKQFLDFGSVNACEKTSFMFLRQELPVRLANIMKEISLLPDNLLRTPSVQLVQSWYIQSLQELLDFKDKSAEDAKAIYDFIVWWKRQRKSISSKTHWKHKSKLQCT

SEQ ID NO: 69934 - protein, 83 aa, Homo sapiens
MEPAFGEVNQLGGVFVNGRPLPNAIRLRIVELAQLGIRPCDISRQLRVSHGCVSKILARYNETGSILPGAIGGSKPRVTTPTV

SEQ ID NO: 69935 - protein, 173 aa, Homo sapiens
MLENYSNLVSVGYHVSKPDVIFKLEQGEEPWIVEEFSNQNYPDIDDALEKNKEIQDKHLTQTVFFSNKTLITERENVFGKTLNLGMNSVPSRKMPYKCNPGGNSLKTNSEVIVAKKSKENRKIPDGYSGFGKHEKSHLGMKKYRYNPMRKASNQNENLILHQNIQILKQPFDY

SEQ ID NO: 69936 - protein, 751 aa, Homo sapiens [sequence omitted]

SEQ ID NO: 69937 - protein, 538 aa, Homo sapiens
  MOD_RES (1)..(1): Any amino acid
XQYSGQLHEVREMMNQVEGQQKNLVHAIESLPGSGPLTALDQDLLLLKATSAATLSCLGECLNLLQQSVHQAGQPSQKPGASENILGWHGSKSHSTEQLKNGTLGSLPSASANITWAILPNSAEDEQTSQPEPEPNSGSELVLSEDEKSDNEDKEETELGVMEDQRSIILHLISQLKLGMDLTKVVLPTFILEKRSLLEMYADFMAHPDLLLAITAGATPEERVICFVEYYLTAFHEGRKGALAKKPYNPIIGETFHCSWEVPKDRVKPKRTASRSPASCHEHPMADDPSKSYKLRFVAEQVSHHPPISCFYCECEEKRLCVNTHVWTKSKFMGMSVGVSMIGEGVLRLLEHGEEYVFTLPSAYARSILTIPWVELGGKVSINCAKTGYSATVIFHTKPFYGGKVHRVTAEVKHNPTNTIVCKAHGEWNGTLEFTYNNGETKVIDTTTLPVYPKKIRPLEKQGPMESRNLWREVTRYLRLGDIDAATEQKRHLEEKQRVEERKRENLRTPWKPKYFIQEVTLPPVIGPLPRRELVLRG

SEQ ID NO: 69938 - protein, 109 aa, Homo sapiens
MQEITKHFVVCHVDAPGQQVGASQFPQGYQFPSMEQLAAMLPSVVQHFGFKYVIGIGVGAGAYVLAKFALIFPDLVEGLVLVNIDPNGKGWIDWAATKLSGLTSTLPDT

SEQ ID NO: 69939 - protein, 20 aa, Homo sapiens
  MOD_RES (1)..(1): Any amino acid
XMDSSYKLIFGSGTRLLVRP

SEQ ID NO: 69940 - protein, 68 aa, Homo sapiens
MCRPSPSPVSPASNPRTSLVQVKTKACLSGHHSASSTSKPFKTPKDNLLTSSSKQHTVFPAKGSRDKP

SEQ ID NO: 69941 - protein, 477 aa, Homo sapiens
MSSQPAGNQTSPGATEDYSYGSWYIDEPQGGEELQPEGEVPSCHTSIPPGLYHACLASLSILVLLLLAMLVRRRQLWPDCVRGRPGLPSPVDFLAGDRPRAVPAAVFMVLLSSLCLLLPDEDALPFLTLASAPSQDGKTEAPRGAWKILGLFYYAALYYPLAACATAGHTAAHLLGSTLSWAHLGVQVWQRAECPQVPKIYKYYSLLASLPLLLGLGFLSLWYPVQLVRSFSRRTGAGSKGLQSSYSEEYLRNLLCRKKLGSRMAAVEDWLLLPRILVIKRDNYQLGTAGRPWPGLGHLGSCWPFSWAPWEGGGLPGLSGAVHHTPSFEDYRIPSPAEAGAFSYTDRDGHLPGGPAAAGGRGTHYPEGEGRGHHGCLLPAGRLWNRALRGQAGGGGAGEAPSVGSGSVLHLSLGLVLLTHLPGPDALTGDTQDQPSSSAPRSCPGLESLASESPSLPPSHILLDELQCLPDSLYLPW

SEQ ID NO: 69942 - protein, 106 aa, Homo sapiens
MVAMAEAEAGVAVEVRGLPPAVPDELLTLYFENRRRSGGGPVLSWQRLGCGGVLTFREPADAERVLAQADHELHGAQLSLRPAPPRAPARLLLQGLPPGTTPQRLE

SEQ ID NO: 69943 - protein, 1283 aa, Homo sapiens
MSKSLKKKSHWTSKVHESVIGRNPEGQLGFELKGGAENGQFPYLGEVKPGKVAYESGSKLVSEELLLEVNETPVAGLTIRDVLAVIKHCKDPLRLKCVKQGGIVDKDLRHYLNLRFQKGSVDHELQQIIRDNLYLRTVPCTTRPHKEGEVPGVDYIFITVEDFMELEKSGALLESGTYEDNYYGTPKPPAEPAPLLLNVTDQILPGATPSAEGKRKRNKSVSNMEKASIEPPEEEEEERPVVNGNGVVVTPESSEHEDKSAGASGEMPSQPYPAPVYSQPEELKEQMDDTKPTKPEDNEEPDPLPDNWEMAYTEKGEVYFIDHNTKTTSWLDPRLAKKAKPPEECKENELPYGWEKIDDPIYGTYYVDHINRRTQFENPVLEAKRKLQQHNMPHTELGTKPLQAPGFREKPLFTRDASQLKGTFLSTTLKKSNMGFGFTIIGGDEPDEFLQVKSVIPDGPAAQDGKMETGDVIVYINEVCVLGHTHADVVKLFQSVPIGQSVNLVLCRGYPLPFDPEDPANSMVPPLAIMERPPPVMVNGRHNYETYLEYISRTSQSVPDITDRPPHSLHSMPTDGQLDGTYPPPVHDDNVSMASSGATQAELMTLTIVKGAQGFGFTIADSPTGQRVKQILDIQGCPGLCEGDLIVEINQQNVQNLSHTEVVDILKDCPIGSETSLIIHRGGFFSPWKTPKPIMDRWENQGSPQTSLSAPAIPQNLPFPPALHRSSFPDSTEAFDPRKPDPYELYEKSRAIYESRQQVPPRTSFRMDSSGPDYKELDVHLRRMESGFGFRILGGDEPGQPILIGAVIAMGSADRDGRLHPGDELVYVDGIPVAGKTHRYVIDLMHHAARNGQVNLTVRRKVLCGGEPCPENGRSPGSVSTHHSSPRSDYATYTNSNHAAPSSNASPPEGFASHSLQTSDVVIHRKENEGFGFVIISSLNRPESGSTITVPHKIGRIIDGSPADRCAKLKVGDRILAVNGQSIINMPHADIVKLIKDAGLSVTLRIIPQEELNSPTSAPSSEKQSPMAQQSPLAQQSPLAQPSPATPNSPIAQPAPPQPLQLQGHENSYRSEVKARQDVKPDIRQPPFTDYRQPPLDYRQPPGGDYQQPPPLDYRQPPLLDYRQHSPDTRQYPLSDYRQPQDFDYFTVDMEKGAKGFGFSIRGGREYKMDLYVLRLAEDGPAIRNGRMRVGDQIIEINGESTRDMTHARAIELIKSGGRRVRLLLKRGTGQVPEYGMVPSSLSMCMKSDKHGSPYFYLLGHPKDTTNPPPGVLPLPPPQVCRK

SEQ ID NO: 69944 - protein, 62 aa, Homo sapiens
MEPKASCPAAAPLMERKFHVLVGVTGSVAALKLPLLVSKLLDIPGLEVAVVTTERAKHFYSP

SEQ ID NO: 69945 - protein, 393 aa, Homo sapiens
MDGRRVPAQPAAEFSLTPGGYRSVGRSRRCSRGSIPRNIPKRSWKKPHPQLCSLQAEEEPMLERRCRGPLAMGLAQPRLLSGPSQESPQTLGKESRGLRQQGTSVAQSGAQAPGRAHRCAHCRRHFPGWVALWLHTRRCQARLPLPCPECGRRFRHAPFLALHRQVHAAATPDLGFACHLCGQSFRGWVALVLHLRAHSAAKRPIACPKCERRFWRRKQLRAHLRRCHPPAPEARPFICGNCGRSFAQWDQLVAHKRVHVAEALEEAAAKALGPRPRGRPAVTAPRPGGDAVDRPFQCACCGKRFRHKPNLIAHRRVHTGERPHQCPECGKRFTNKPYLTSHRRIHTGEKPYPCKECGRRFRHKPNLLSHSKIHKRSEGSAQAAPGPGSPQLP

SEQ ID NO: 69946 - protein, 30 aa, Homo sapiens
  MOD_RES (1)..(1): Any amino acid
XKPSSGGRRRGGQRHKVKSQGACVTPASGC

SEQ ID NO: 69947 - protein, 240 aa, Homo sapiens
  MOD_RES (1)..(1): Any amino acid
XLSAAALHFAIQQVREENIRKQLKKLDCEREELLVFLFFFSLMGLLSSHLTSNSTTDLPKAFHVCAAILECLEKRKISWLALFQLTESDLRLGRLLLRVAPDQHTRLLPFAFYSLLSYFHEDAAIREEAFLHVAVDMYLKLVQLFVAGDTSTVSPPAGRSLELKGQAGQPRGTDNKSSSFSAAVNTSVPEKELLTRGRGNVKMPTLGHVGDMRIDSCLGHVPAWLAIQLDYFCQSPSPVV

SEQ ID NO: 69948 - protein, 772 aa, Homo sapiens
MAQFGGQKNPPWATQFTATAVSQPAALGVQQPSLLGASPTIYTQQTALAAAGLTTQTPANYQLTQTAALQQQAAAAAAALQQPAVALPTSLSLSTPQPTAQITVSYPTPRSSQQQTQPQKQRVFTGVVTKLHDTFGFVDEDVFFQLSAVKGKTPQVGDRVLVEATYNPNMPFKWNAQRIQTLPNQNQSQTQPLLKTPPAVLQPIAPQTTFGVQTQPQPQSLLQAQISAASITPLLQTQPQPLLQQPQQKAGLLQPPVRIVSQPQPARRLDPPSRFSGRNDRGDQVPNRKDDRSRERERERRRSRERSPQRKRSRERSPRRERERSPRRVRRVVPRYTVQFSKFSLDCPSCDMMELRRRYQNLYIPSDFFDAQFTWVDAFPLSRPFQLGNYCNFYVMHREVESLEKNMAILDPPDADHLYSAKVMLMASPSMEDLYHKSCALAEDPQELRDGFQHPARLVKFLVGMKGKDEAMAIGGHWSPSLDGPDPEKDPSVLIKTAIRCCKALTGIDLSVCTQWYRFAEIRYHRPEETHKGRTVPAHVETVVLFFPDVWHCLPTRSEWETLSRGYKQQLVEKLQGERKEADGEQDEEEKDDGEAKEISTPTHWSKLDPKTMKVNDLRKELESRALSSKGLKSQLIARLTKQLKVEEQKEEQKELEKSEKEEDEDDDRKSEDDKEEEERKRQEEIERQRRERRYILPDEPAIIVHPNWAAKSGKFDCSIMSLSVLLDYRLEDNKEHSFEVSLFAELFNEMLQRDFGVRIYKSLLSLPEKED

SEQ ID NO: 69949 - protein, 113 aa, Homo sapiens; identical to SEQ ID NO: 2058

SEQ ID NO: 69950 - protein, 265 aa, Homo sapiens
MLQLVAPRPRGCAPLGGTQKPDLLNFKKGWMSILDEPGEPPSPSLTTTSTSQWKKHWFVLTDSSLKYYRDSTAEEADELDGEIDLRSCTDVTEYAVQRNYGFQIHTKDAVYTLSAMTSGIRRNWIEALRKTVRPTSAPDVTKLSDSNKENALHSYSTQKGPLKAGEQRAGSEVISRGGPRKADGQRQALDYVELSPLTQASPQRARTPARTPDRLAKQEELERDLAQRSEERRKWFEATDSRTPEVPAGEGPRRGLGAPLTEDQQ

SEQ ID NO: 69951 - protein, 44 aa, Homo sapiens
MLAPEGALNIHEKAWNAYPYCRTVITNEYMKEDFLIKIETWHKP

SEQ ID NO: 69952 - protein, 217 aa, Homo sapiens
  MOD_RES (1)..(1): Any amino acid
XDFARNQVSSQTPQQPPTSTFQNSPSALVSTPVRTKTSNRYSPESQAQSVHHQRPGSRVSPENLVDKSRGSRPGKSPERSHVSSEPYEPISPPQVPVVHEKQDSLLLLSQRGAEPAEQRNDARSPGSISYLPSFFTKLENTSPMVKSKKQEIFPAAQPGTEIFNLPAVTTSGSVSSRGHSFADPASNLGLEDIIRKALMGSFDDKVEDHGVVMSQPM

SEQ ID NO: 69953 - protein, 320 aa, Homo sapiens
MAAVRMLRTWSRNAGKLICVRYFQTCGNVHVLKPNYVCFFGYPSFKYSHPHHFLKTTAALRGQVVQFKLSDIGEGIREVTVKEWYVKEGDTVSQFDSICEVQSDKASVTITSRYDGVIKKLYYNLDDIAYVGKPLVDIETEALKDSEEDVVETPAVSHDEHTHQEIKGRKTLATPAVRRLAMENNIKLSEVVGSGKDGRILKEDILNYLEKQTGAILPPSPKVEIMPPPPKPKDMTVPILVSKPPVFTGKDKTEPIKGFQKAMVKTMSAALKIPHFGYCDEIDLTELVKLREELKPIAFARGIKLSFMPFFLKYYFSWKS

SEQ ID NO: 69954 - protein, 87 aa, Homo sapiens
MRGEHNSTSYDSAVSILFSLVVMLYVIWVQAVADMESYRNMKMKDCLDFTPSVLYGWSFFLAPAGIFFSLLAGLLFLVVGWHIQIHH

SEQ ID NO: 69955 - protein, 90 aa, Homo sapiens
MSPAPDAAPAPASISLFDLSADAPVFQGLSLVSHAPGEALARAPRTSCSGSGERESPERKLLQGPMDISEKLFCSTCDQTFQNHQEQREH

SEQ ID NO: 69956 - protein, 161 aa, Homo sapiens
MDELFPLIFPAEPAQASGPYVEIIEQPKQRGMRFRYKCEGRSAGSIPGERSTDTTKTHPTIKINGYTGPGTVRISLVTKDPPHRPHPHELVGKDCRDGFYEAELCPDRCIHSFQNLGIQCVKKRDLEQAISQRIQTNNNPFQGDSAGPIRQAPPPAACPFS

SEQ ID NO: 69957 - protein, 115 aa, Homo sapiens
MTSIKEQAAISRLLSFLQEWDNAGKVARSHILDKFIETNQGKTAPELEQEFSQGASLFLVRLTTSLRITYMTDSCLEKLLRSIGIFLSAVSSNRYLIEFLEVGGVLTLLEILGLE

SEQ ID NO: 69958 - protein, 87 aa, Homo sapiens
MQMGQPVPETGPAILLDGYSGPAYSDTYSSAGDSVYTYFSAVAGQDGEVDAEELQRCLTQSGINGTYSPFSLETCRIMIAMLDRKET

SEQ ID NO: 69959 - protein, 209 aa, Homo sapiens
MEELSQALASSFSVSQDLNSTAAPHPRLSQYKSKYSSLEQSERRRRLLELQKSKRLDYVNHARRLAEDDWTGMESEEENKKDDEEMDIDTVKKLPKHYANQLMLSEWLIDVPSDLGQEWIVVVCPVGKRALIVASRGSTSAYTKSGYCVNRFSSLLPGGNRRNSTAKDYTILDCIYNEVNQTYYVLDVMCWRGHPFYDCQTDFRFYWMH

SEQ ID NO: 69960 - protein, 778 aa, Homo sapiens
MPPPPPLSCLRGLQAPHQPGQPGFKFTVAESCDRIKDEFQFLQAQYHSLKVEYDKLANEKTEMQRHYVMYYEMSYGLNIEMHKQTEIAKRLNTILAQIMPFLSQEHQQQVAQAVERAKQVTMTELNAIIGQQQLQAQHLSHATHGPPVQLPPHPSGLQPPGIPPVTGSSSGLLALGALGSQAHLTVKDEKNHHELDHRERESSANNSVSPSESLRASEKHRGSADYSMEAKKRKAEEKDSLSRYDSDGDKSDDLVVDVSNEDPATPRVSPAHSPPENGLDKARSLKKDAPTSPASVASSSSTPSSKTKDLGHNDKSSTPGLKSNTPTPRNDAPTPGTSTTPGLRSMPGKPPGMDPIGIMASALRTPISITSSYAAPFAMMSHHEMNGSLTSPGAYAGLHNIPPQMSAAAAAAAAAYGRSPMVSFGAVGFDPHPPMRATGLPSSLASIPGGKPAYSFHVSADGQMQPVPFPHDALAGPGIPRHARQINTLSHGEVVCAVTISNPTRHVYTGGKGCVKIWDISQPGSKSPISQLDCLNRDNYIRSCKLLPDGRTLIVGGEASTLTIWDLASPTPRIKAELTSSAPACYALAISPDAKVCFSCCSDGNIAVWDLHNQTLVRQFQGHTDGASCIDISHDGTKLWTGGLDNTVRSWDLREGRQLQQHDFTSQIFSLGYCPTGEWLAVGMESSNVEVLHHTKPDKYQLHLHESCVLSLKFAYCGKWFVSTGKDNLLNAWRTPYGASIFQSKESSSVLSCDISADDKYIVTGSGDKKATVYEVIY

SEQ ID NO: 69961 - protein, 81 aa, Homo sapiens
MSEGESQTVLSSGSDPKVESSSSAPGLTSVSPPVTSTTSAASPEEEEESEDESEILEESPCGRWQKRREEVNQRNVPGIDS

SEQ ID NO: 69962 - protein, 197 aa, Homo sapiens
MSRPRFNPRGDFPLQRPRAPNPSGMRPPGPFMRPGSMGLPRFYPAGRARGIPHRFAGHESYQNMGPQRMNVQVTQHRTDPRLTKEKLDFHEAQQKKGKPHGSRWDDEPHISASVAVKQSSVTQVTEQSPKVQSRYTKESASSILASFGLSNEDLEELSRYPDEQLTPENMPLILRDIRMRKMGRRLPNLPSQSRNKE

SEQ ID NO: 69963 - protein, 858 aa, Homo sapiens
MNEFEKWQEGLKDDEKLEVSELATVKRPQERSYMLQRWQEDGGVMIIGYEMYRNLAQGRNVKSRKLKEIFNKALVDPGPDFVVCDEGHILKNEASAVSKAMNSIRSRRRIILTGTPLQNNLIEYHCMVNFIKENLLGSIKEFRNRFINPIQNGQCADSTMVDVRVMKKRAHILYEMLAGCVQRKDYTALTKFLPPKHEYVLAVRMTSIQCKLYQYYLDHLTGVGNNSEGGRGKAGAKLFQDFQMLSRIWTHPWCLQLDYISKENKGYFDEDSMDEFIASDSDETSMSLSSDDYTKKKKKGKKGKKDSSSSGSGSDNDVEVIKVWNSRSRGGGEGNVDETGNNPSVSLKLEESKATSSSNPSSPAPDWYKDFVTDADAEVLEHSGKMVLLFEILRMAEEIGDKVLVFSQSLISLDLIEDFLELASREKTEDKDKPLIYKGEGKWLRNIDYYRLDGSTTAQSRKKWAEEFNDETNVRGRLFIISTKAGSLGINLVAANRVIIFDASWNPSYDIQSIFRVYRFGQTKPVYVYRFLAQGTMEDKIYDRQVTKQSLSFRVVDQQQVERHFTMNELTELYTFEPDLLDDPNSEKKKKRDTPMLPKDTILAELLQIHKEHIVGYHEHDSLLDHKEEEELTEEERKAAWAEYEAEKKGLTMRFNIPTGTNLPPVSFNSQTPYIPFNLGALSAMSNQQLEDLINQGREKVVEATNSVTAVRIQPLEDIISAVWKENMNLSEAQVQALALSRQASQELDVKRREAIYNDVLTKQQMLISCVQRILMNRRLQQQYNQQQQQQMTYQQATLGHLMMPKPPNLIMNPSNYQQIDMRGMYQPVAGGMQPPPLQRAPPPMRSKNPGPSQGKSM

SEQ ID NO: 69964 - protein, 35 aa, Homo sapiens
MEEGVQAPDWDSDETVIEGSVTESDLEEKELPWRR

SEQ ID NO: 69965 - protein, 775 aa, Homo sapiens
MRTSLQAVALWGQKAPPHSITAIMITDDQRTIVTGSQEGQLCLWNLSHELKISAKELLFGHSASVTCLARARDFSKQPYIVSAAENGEMCVWNVTNGQCMEKATLPYRHTAICYYHCSFRMTGEGWLLCCGEYQDVLIIDAKTLAVVHSFRSSQFPDWINCMCIVHSMRIQEDSLLVVSVAGELKVWDLSSSINSIQEKQDVYEKESKFLESLNCQTIRFCTYTERLLLVVFSKCWKVYDYCDFSLLLTEVSRNGQFFAGGEVIAAHRILIWTEDGHSYIYQLLNSGLSKSIYPADGRVLKETIYPHLLCSTSVQENKEQSRPFVMGYMNERKEPFYKVLFSGEVSGRITLWHIPDVPVSKFDGSPREIPVTATWTLQDNFDKHDTMSQSIIDYFSGLKDGAGTAVVTSSEYIPSLDKLICGCEDGTIIITQALNAAKARLLEGGSLVKDSPPHKVLKGHHQSVTSLLYPHGLSSKLDQSWMLSGDLDSCVILWDIFTEEILHKFFLEAGPVTSLLMSPEKFKLRGEQIICCVCGDHSVALLHLEGKSCLLHARKHLFPVRMIKWHPVENFLIVGCADDSVYIWEIETGTLERHETGERARIILNCCDDSQLVKSVLPIASETLKHKSIEQRSSSPYQLGPLPCPGLQVESSCKVTDAKFCPRPFNVLPVKTKWSNVGFHILLFDLENLVELLLPTPLSDVDSSSSFYGGEVLRRAKSTVEKKTLTLRKSKTACGPLSAEALAKPITESLAQGDNTIKFSEENDGIKRQKKMKIS

SEQ ID NO: 69966 - protein, 475 aa, Homo sapiens
  MOD_RES (1)..(1): Any amino acid
XGSSRLSPGTDSSSNLGGVKLEGKKSPLSSILFSALDSDTRITALLRRQADIESRARRLQKRLQVVQAKQVERHIQHQLGGFLEKTLSKLPNLESLRPRSQLMLTRKAEAALRKAASETTTSEGLSNFLKSNSISEELERFTASGIANLRCSEQAFDSDVTDSSSGGESDIEEEELTRADPEQRHVPLRRRSEWKWAADRAAIVSRWNWLQAHVSDLEYRIRQQTDIYKQIRANKIESVSQPLENHGAPIIGHISESLSTKSCGALRPVNGVINTLQPVLADHIPGDSSDAEEQLHKKQRLNLVSSSSDGTCVAARTRPVLSCKKRRLVRPNSIVPLSKKVHRNSTIRPGCDVNPSCALCGSGSINTMPPEIHYEAPLLERLSQLDSCVHPVLAFPDDVPTSLHFQSMLKSQWQNKPFDKIKPPKKLSLKHRAPMPGSLPDSARKDRHKLVSSFLTTAMLKHHTDMSSSSYLAAT

SEQ ID NO: 69967 - protein, 203 aa, Homo sapiens
MGGEAGEPTGHPYRAAATLAVRPWQRRQQRMPQALERADGSWAWVVLLATMVTQGLTLGFPTCIGIFFTELQWEFQASNSETSWFPSILTAVLHMAGPLCSILVGRFGCRVTVMLGGVLASLGMVASSFSHNLSQLYFTAGFITGLGMCFSFQSSITVLGFYFVRRRVLANALASMGVSLGITLWPLLSRYLLENLGWRGTFL

SEQ ID NO: 69968 - protein, 30 aa, Homo sapiens
MATNWGSLLQDKQQLEELARQAVDRALAEG

SEQ ID NO: 69969 - protein, 58 aa, Homo sapiens
  MOD_RES (1)..(1): Any amino acid
XLDTDDDLNSDDYEYEDEAKLVIFPDHYEIALPNIEELPALVSECARLLARCAWLCVR

SEQ ID NO: 69970 - protein, 131 aa, Homo sapiens
MPVPPPPAPPPPPTFALANTEKPTLNKTEQAGRNALLSDISKGKKLKKTVTNDRSAPILDKPKGAGAGGGGGGFGGGGGFGGGGGGGGGGSFGGGGPPGLGGLFQAGMPKLRSTANRDNGLAGVGRKGRSK

SEQ ID NO: 69971 - protein, 246 aa, Homo sapiens
MPHTLWMVWVLGVIISLSKEESSNQASLSCDRNGICKGSSGSLNSIPSGLTEAVKSLDLSNNRITYISNSDLQRCVNLQALVLTSNGINTIEEDSFSSLGSLEHLDLSYNYLSNLSSSWFKPLSSLTFLNLLGNPYKTLGETSLFSHLTKLQILRVGNMDTFTKIQRKDFAGLTFLEELEIDASDLQSYEPKSLKSIQNVSHLILHMKQHILLLEIFVDVTSSVECLELRDTDLDTFHFSELSTGE

SEQ ID NO: 69972 - protein, 289 aa, Homo sapiens
MEEGARHRNNTEKKHPGGGESDASPEAGSGGGGVALKKEIGLVSACGIIVGNIIGSGIFVSPKGVLENAGSVGLALIVWIVTGFITVVGALCYAELGVTIPKSGGDYSYVKDIFGGLAGFLRLWIAVLVIYPTNQAVIALTFSNYVLQPLFPTCFPPESGLRLLAAICLLLLTWVNCSSVRWATRVQDIFTAGKLLALALIIIMGIVQICKGEYFWLEPKNAFENFQEPDIGLVALAFLQGSFAYGGWNFLNYVTEELVDPYKAANPGEPEDVCGRVPRGGAGLRDRGG

SEQ ID NO: 69973 - protein, 469 aa, Homo sapiens
MASYPSGSGKPKAKYPFKKRASLQASTAAPEARGGLGAPPLQSARSLPGPAPCLKHFPLDLRTSMDGKCKEIAEELFTRSLAESELRSAPYEFPEESPIEQLEERRQRLERQISQDVKLEPDILLRAKQDFLKTDSDSDLQLYKEQGEGQGDRSLRERDVLEREFQRVTISGEEKCGVPFTDLLDAAKSVVRALFIREKYMALSLQSFCPTTRRYLQQLAEKPLETRTYEQGPDTPVSADAPVHPPALEQHPYEHCEPSTMPGDLGLGLRMVRGVVHVYTRREPDEHCSEVELPYPDLQEFVADVNVLMALIINGPIKSFCYRRLQYLSSKFQMHVLLNEMKELAAQKKVPHRDFYNIRKVDTHIHASSCMNQKHLLRFIKRAMKRHLEEIVHVEQGREQTLREVFESMNLTAYDLSVDTLDVHADRNTFHRFDKFNAKYNPIGESVLREIFIKTDNRVSGKYFAHIIK

SEQ ID NO: 69974 - protein, 49 aa, Homo sapiens
  MOD_RES (1)..(1): Any amino acid
XGPKDQPPALRRSAVPHSEESVGFAALVQLPAKQPPPGTLEQGRSIQQG

SEQ ID NO: 69975 - protein, 1323 aa, Homo sapiens
INDILLAPPTVQGGIAENLAEKLIGVLFEVWLLACTRCFPTPPYWKTAKEMVANWRHHPAVVEQWSKVICALTSRLLRFTYGPSFPAFKVPDEDASLIPPEMDNECVAQTWFRFLHMLSNPVDLSNPAIISSTPKFQEQFLNVSGMPQELNQYPCLKHLPQIFFRAMRGISCLVDAFLGISRPRSDSAPPTPVNRLSMPQSAAVSTTPPHNRRHRAVTVNKATMKTSTVSTAHASKVQHQTSSTSPLSSPNQTSSEPRPLPAPRRPKVNSILNLFGSWLFDAAFVHCKLHNGINRDSSMTAITTQASMEFRRKGSQMSTDTMVSNPMFDASEFPDNYEAGRAEACGTLCRIFCSKKTGEEILPAYLSRFYMLLIQGLQINDYVCHPVLASVILNSPPLFCCDLKGIDVVVPYFISALETILPDRELSKFKSYVNPTELRRSSINILLSLLPLPHHFGTVKSEVVLEGKFSNDDSSSYDKPITFLSLKLRLVNILIGALQTETDPNNTQMILGAMLNIVQDSALLEAIGCQMEMGGGENNLKSHSRTNSGISSASGGSTEPTTPDSERPAQALLRDYALNTDSAAGLLIRSIHLVTQRLNSQWRQDMSISLAALELLSGLAKVKVMVDSGDRKRAISSVCTYIVYQCSRPAPLHSRDLHSMIVAAFQCLCVWLTEHPDMLDEKDCLKEVLEIVELGISGSKSKNNEQEVKYKGDKEPNPASMRVKDAAEATLTCIMQLLGAFPSPSGPASPCSLVNETTLIKYSRLPTINKHSFRYFVLDNSVILAMLEQPLGNEQNDFFPSVTVLVRGMSGRLAWAQQLCLLPRGAKANQKLFVPEPRPVPKNDVGFKYSVKHRPFPEEVDKIPFVKADLSIPDLHEIVTEELEERHEKLRSGMAQQIAYEIHLEQQSEEELQKRSFPDPVTDCKPPPPAQEFQTARLFLSHFGFLSLEALKEPANSRLPPHLIALDSTIPGFFDDIGYLDLLPCRPFDTVFIFYMKPGQKTNQEILKNVESSRTVQPHFLEFLLSLGWSVDVGRHPGWTGHVSTSWSINCCDDGEGSQQEEVISSEDIGASIFNGQKKVLYYADALTEIAFVVPSPVESLTDSLESNISDQDSDSNMDLMPGILKQPSLTLELFPNHTDNLNSSQRLSPSSRMRKLPQGRPVPPLGPETRVSVVWVERYDDIENFPLSELMTEISTGVETTANSSTSLRSTTLEKEVPVIFIHPLNTGLFRIKIQGATGKFNMVIPLVDGMIVSRRALGFLVRQTVINICRRKRLESDSYSPPHVRRKQKITDIVNKYRNKQLEPEFYTSLFQEVGLKNCSS

SEQ ID NO: 69976 - protein, 146 aa, Homo sapiens
MADFDEIYEEEEDEERALEEQLLKYSPDPVVVRGSGHVTVFGLSNKFESEFPSSLTGKVAPEEFKASINRVNSCLKKNLPVNVRWLLCGCLCCCCTLGCSMWPVICLSKRLCLHWRLSKRKCETNNMMEYVILIEFLPKTPIFRPD

SEQ ID NO: 69977 - protein, 355 aa, Homo sapiens
  MOD_RES (1)..(1): Any amino acid
XDLDLVWPPRLNSSAEAPQSLHPSSRGVWNELPPQSGQFSGQYGTRSRTFQSQPHPTTSSNGMVVNKHSEGSHGGELPVVNSSAGSNCCTCNCQSTLQAILQELKTMRKLMQIQAVGTQNRQQPPISLICSQRTAVSRKRNKKKKVPPKTVEPLTVKQKPSGSEMEKKSVVASELSALQAAEHTSPEESRVLGFGIVLESPSSDPEVQLAEGFDVFMPKSQLDSILSNYTRSGSLLFRKLVCAFFDDKTLANSLPNGKRKRGLNDNRKGLDQNIVGAIKVFTEKYCTANHVDKLPGPRDWVQILQDQIKLARRRLKRGSAEIADSDERLDGIALPPTGKLSFRPFSMTGQYVDIL

SEQ ID NO: 69978 - protein, 800 aa, Homo sapiens
MGRGSGTFERLLDKATSQLLLETDWESILQICDLIRQGDTQAKYAVNSIKKKVNDKNPHVALYALEVMESVVKNCGQTVHDEVANKQTMEELKDLLKRQVEVNVRNKILYLIQAWAHAFRNEPKYKVVQDTYQIMKVEGHVFPEFKESDAMFAAERAPDWVDAEECHRCRVQFGVMTRKHHCRACGQIFCGKCSSKYSTIPKFGIEKEVRVCEPCYEQLNRKAEGKATSTTELPPEYLTSPLSQQSQLPPKRDETALQEEEELQLALALSQSEAEEKERLRQKSTYTSYPKAEPMPSASSAPPASSLYSSPVNSSAPLAEDIDPELARYLNRNYWEKKQEEARKSPTPSAPVPLTEPAAQPGEGHAAPTNVVENPLPETDSQPIPPSGGPFSEPQFHNGESEESHEQFLKALQNAVTTFVNRMKSNHMRGRSITNDSAVLSLFQSINGMHPQLLELLNQLDERRLYYEGLQDKLAQIRDARGALSALREEHREKLRRAAEEAERQRQIQLAQKLEIMRQKKQEYLEVQRQLAIQRLQEQEKERQMRLEQQKQTVQMRAQMPAFPLPYAQLQAMPAAGGVLYQPSGPASFPSTFSPAGSVEGSPMHGVYMSQPAPAAGPYPSMPSTAADPSMVSAYMYPAGATGAQAAPQAQAGPTASPAYSSYQPTPTAGYQNVASQAPQSLPAISQPPQSSTMGYMGSQSVSMGYQPYNMQNLMTTLPSQDASLPPQQPYIAGQQPMYQQAMLTSGVTLHTVHLKRLVSNCRRPASLSSTAGSVPSLRVRGGLHPKPTSLVLSLLQSLS

SEQ ID NO: 69979 - protein, 74 aa, Homo sapiens
MIKRKIWCNLCIDLVAFTSEIFKGAVFQSLDGIVVSANCKLRKIFTLKSKPQDTADKDGMFRLLSRFFNSLMYF

SEQ ID NO: 69980 - protein, 53 aa, Homo sapiens
MESTLTLATEQPVKKNTLKKYKIACITGSLSFGISPHHNLCFPGSSDPPASAS

SEQ ID NO: 69981 - protein, 71 aa, Homo sapiens
MSTQRLRNEDYHDYSSTDVSPEESPSEGLNNLSSPGSYQRFGQSNSTTWFQTLIHLLKGNIGTGLLGLPLA

SEQ ID NO: 69982 - protein, 185 aa, Homo sapiens
  MOD_RES (1)..(1): Any amino acid
XGQFVSLDGAGKTPTLGGGFHVNLGKESRAQTLQNDPCLYIPRFAHLLEFGEKNHEVSMTALRLLQRMKRDWMHTGRRPSGLCGAALLVAARMHDFRRTVKEVISVVKVCESTLRKRLTEFEDTPTSQLTIDEFMKIDLEEECDPPSYTAGQRKLRMKQLEQVLSKKLEEVEGEISSYQDAIEIE

SEQ ID NO: 69983 - protein, 205 aa, Homo sapiens
  MOD_RES (1)..(1): Any amino acid
XSTVLGNGSSLSLPEGQSLRLVCAVDAVDSNPPARLSLSWRGLTLCPSQPSNPGVLELPWVHLRDAAEFTCRAQNPLGSQQVYLNVSLQSKATSGVTQGVVGGAGATALVFLSFCVIFVVVRSCRKKSARPAAGVGDTGIEDANAVRGSASQKTSSSSSSAFEQLFPHPSIPFRAEASKYYLSGTDRNYFRLHGPHSLIAAPQIC

SEQ ID NO: 69984 - protein, 469 aa, Homo sapiens
  MOD_RES (1)..(1): Any amino acid
XFELFKLEIRTLAQALSTVEEKKQEEAKMKKKTFKGLIRIFRKGVIAVLAANRLKILGQSCASLFTWMESFKEGIGMLVCTGEPQDKHKFPKHQKEQLRCLQALSWLTSSDLLAAIISSMAELQDVIGKADPNSRICGHLLIGAAKNSFAKLMDKISLVMECIPLHSSRSITYVEKDSLVQRLAHGLHKVNTLALKYGLRGHVPITKSTASLQKQILGFTQRLHAAEVERRSLRLEVTEFKRSVNEMKKELDKAQGLQMQLNEFKQSKLITHEKFESACEELNNALLREEQAQMLLNEQAQQLQELNYKLELHSSEEADKNQTLGEAVKSLSEAKMELRRKDQSLRQLNRHLTQLEQDKRRLEENIHDAESALRMAAKDKECVANHMRAVENTLHKVRDQISLSWSAASRNDFTLQLPKLHLETFAMEGLKGGPEVVACQVRVQWCDHSSLQSQMPGLKQSSCLSLLST

SEQ ID NO: 69985 - protein, 68 aa, Homo sapiens
MCDGALLPPLVLPVLLLLVWGLDPGTGWPHSAWAGAGANPAPQQLPGPIQWTRTSDQAQMVLDPQPFC

SEQ ID NO: 69986 - protein, 679 aa, Homo sapiens
MGKTANSPGSGARPDPVRSFNRWKKKHSHRQNKKKQLRKQLKKPEWQVERESISRLMQNYEKINVNEITRFSDFPLSKKTLKGLQEAQYRLVTEIQKQTIGLALQGKDVLGAAKTGSGKTLAFLVPVLEALYRLQWTSTDGLGVLIISPTRELAYQTFEVLRKVGKNHDFSAGLIIGGKDLKHEAERINNINILVCTPGRLLQHMDETVSFHATDLQMLVLDEADRILDMGFADTMNAVIENLPKKRQTLLFSATQTKSVKDLARLSLKNPEYVWVHEKAKYSTPATLEQNYIVCELQQKISVLYSFLRSHLKKKSIVFFSSCKEVQYLYRVFCRLRPGVSILALHGRQQQMRRMEVYNEFVRKRAAVLFATDIAARGLDFPAVNWVLQFDCPEDANTYIHRAGRTARYKEDGEALLILLPSEKAMVQQLLQKKVPVKEIKINPEKLIDVQKKLESILAQDQDLKERAQRCFVSYVRSVYLMKDKEVFDVSKLPIPEYALSLGLAVAPRVRFLQKMQKQPTKELVRSQADKVIEPRAPSLTNDEVEEFRAYFNEKMSILQKGGKRLEGTEHRQDNDTGNEEQEEEEDDEEEMEEKLAKAKGSQAPSLPNTSEAQKIKEVPTQFLDRDEEEEDADFLKVKRHNVFGLDLKDEKTLQSLSLSPRLECNGVIMARCSLDLMG

SEQ ID NO: 69987 - protein, 253 aa, Homo sapiens
MNPAAEAEFNILLATDSYKVTHYKQYPPNTSKVYSYFECREKKTENSKLRKVKYEETVFYGLQYILNKYLKGKVVTKEKIQEAKDVYKEHFQDDVFNEKGWNYILEKYDGHLPIEIKAVPEGFVIPRGNVLFTVENTDPECYWLTNWIETILVQSWYPITVATNSREQKKILAKYLLETSGNLDGLEYKLHDFGYRGVSSQETAGIGASAHLVNFKGTDTVAGLALIKKYYGTKDPVPGYSVPAAEHSLGERP

SEQ ID NO: 69988 - protein, 62 aa, Homo sapiens
MAALYRPGLRYLPRTSNGLSASAPGYFERQQGPGDKAFVPESEVTHICRTARSTWAALVGGL

SEQ ID NO: 69989 - protein, 37 aa, Homo sapiens
  MOD_RES (1)..(1): Any amino acid
XGWTEGPGGKFAWKLHHQHQSASLPGITSIRETKGAG

SEQ ID NO: 69990 - protein, 88 aa, Homo sapiens
MSAKRAELKKTHLSKNYKAVCLELKPEPTKTFDYKAVKQEGRFTKAGVTQDLKNELREVREELKEKMEEIKQPCLSSLLDKGSNGQGF

SEQ ID NO: 69991 - protein, 414 aa, Homo sapiens
  MOD_RES (1)..(1): Any amino acid
XHGVKGQKGERGLPGLQGVIGFPGMQGPEGPQGPPGQKGDTGEPGLPGTKGTRGPPGASGYPGNPGLPGIPGQDGPPGPPGIPGCNGTKGERGPLGPPGLPGFAGNPGPPGLPGMKGDPGEILGHVPGMLLKGERGFPGIPGTPGPPGLPGLQGPVGPPGFTGPPGPPGPPGPPGEKGQMGLSFQGPKGDKGDQGVSGPPGVPGQAQVQEKGDFATKGEKGQKGEPGFQGMPGVGEKGEPGKPGPRGKPGKDGDKGEKGSPGFPGEPGYPGLIGRQGPQGEKGEAGPPGPPGIVIGTGPLGEKGERGYPGTPGPRGEPGPKGFPGLPGQPGPPGLPVPGQAGAPGFPGERGEKGDRGFPGTSLPGPSGRDGLPGPPGSPGPPGQPGYTSEFPQKWFNVGCKQTPGCRADPGWGL

SEQ ID NO: 69992 - protein, 878 aa, Homo sapiens
MNFKRVKPNIFLLNQSRLIISICEIMSTDQGSSTCPKIALVPPCSTSSTTTLVGENVSEEEAQGINGNRPAKHSAASPKPQVPPKPLHLQNSPSSNIHQTPRHKALPSAKPRMEEIKPASASCVSKEKPSKVSDLISRFEGGSSLSNYSDLKKESAVNLNAPRTPGRHGLTTTPQQKLLSQHLPQRQGNDTDKTQGAQTCVANGVMAAQNQMECEEEKAATLSSDTSIQASEPLLDTHIVNGERDETATAPASPTTDSCDGNASDSSYRTPGIGPVLPLEERGAETETKVQERENGESPLELEQLDQHHEMKETNEQKLHKIANELLLTERAYVNRLDLLDQVFYCKLLEEANRGSFPAEMVNKIFSNISSINAFHSKFLLPELEKRMQEWETTPRIGDILQKLAPFLKMYGEYVKGFDNAMELVKNMTERIPQFKSVVEEIQKQKICGSLTLQHHMLEPVQRIPRYEMLLKDYLRKLPPDSLDWNDAKKSLEIISTAASHSNSAIRKMENLKKLLEIYEMLGEEEDIVNPSNELIKEGQILKLAARNTSAQERYLFLFNNMLLYCVPKFSLVGSKFTVRTRVGIDGMKIVETQNEEYPHTFQVSGKERTLELQASSAQDKEEWIKALQETIDAFHQRHETFRNAIAKDNDIHSEVSTAELGKRAPRWIRDNEVTMCMKCKEPFNALTRRRHHCRACGYVVCWKCSDYKAQLEYDGGKLSKVCKDCYQIISGFTDSEEKKRKGILEIESAEVSGNSVVCSFLQYMEKSKPWQKAWCVIPKQDPLVLYMYGAPQDVRAQATIPLLGYVVDEMPRSADLPHSFKLTQSKSVHSFAADSEELKQKWLKVILLAVTGETPGGPNEHPATLDDHPEPKKKSEC

SEQ ID NO: 69993 - protein, 203 aa, Homo sapiens
  MOD_RES (1)..(1): Any amino acid
XLFENYQTQSEEVRKKQEDSKQLLQVNKLEKEQKLKQHVENLNQVAEKLEEKHSQITELENLVQRMEKEKRTLLERKLSLENKLLQLKSSATYGKSCQDLQREISILQEQISHLQFVIHSQHQNLRSVIQEMEGLKNNLKEQDKRIENLREKVNILEAQNKELKTQVALSSETPRTKVSKAVSTSELKTEGVSPYLMLIRLRK

SEQ ID NO: 69994 - protein, 251 aa, Homo sapiens
MKSALFTRFFILLPWILIVIIMLDVDTRRPVPPLTPRPYFSPYAVGRGGARLPLRRGGPAHGTQKRNQSRPQPQPEPQLPTIYAITPTYSRPVQKAELTRLANTFRQVAQLHWILVEDAAARSELMRTTRKVSVWPVGLVGGRRYERPLVENGKVVGWYTGWRADRPFAIDMAGFAVSLQVILSNPKAVFKRRGSQPGMQESDFLKQITTVEELEPKANNCTKVLVWHTRTEKVNLANEPKYHLDTVKIEV

SEQ ID NO: 69995 - protein, 197 aa, Homo sapiens
MWDQGGQPWQQWPLNQQQWMQSFQHQQDPSQIDWAALAQAWIAQREASGQQSMVEQPPGMMPNGQDMSTMESGPNNHGNFQGDSNFNRMWQPEWGMHQQPPHPPPDQPWMPPTPGPMDIVPPSEDSNSQDSGEFAPDNRHIFNQNNHNFGGPPDNFAVGPVNQFDYQDLQDLQHLPRIEEKGHHHSGIVSVHLLHFL

SEQ ID NO: 69996 - protein, 754 aa, Homo sapiens
MALSPGANLVFHEDPKMTPSPPSCGAPGLGSGTIPQPHPDMAQVPMLNLLPSPGLALVPDLNDSLSPVSGEASGLVSENTPRPDDSRAIAPASLQITSSCSGEALDLDSKDVSRPDSQGRLCPASNPILSPSSTEAPRLSSGNHPQSNSEDAFKCLSSKIFKLGQRNSNPSRHELNPFIRHHSREGLVLGHCISRPSSKALLIPTSNSSLDLDSNPLLNMGSRNTSKLNLNVAPDSHGTLIPDTNETITLASHNISESVSKGAFSTTWSTSSKETMNVASSGHSRSDLSVTITQASYVTLIPGSSYGISLHSSTHEPNSTISPPSCMTLILGSNETLSLDSSLLFSDTSTLTLSSQQDDAKDNSIHTVPLEENLESWSEMASIKVGQFPLGFPISNPAGKDAVTLQGIPEGAFDEVTSCLVKVPEKTEGGNNMALVENVTTLQKSQDLLEAEGEKKTMIKKIMRQIQEEPLDSLSSSVRKQAMEILTQLSHTQPTLGMRERSELVNVCVHSVFSLPSVQAMQEKDEAKAETIQALYHQTLEALQTLLKALFIEDPTPAGLKSILEALGPWMNSGKAHERARAVNTNVSVLNHMLLTLPFFMPLGFPALGLLLGRLILHIGDPDEEIGCEALDGIIILYTILELQKRARDKEETNKKELYESNKHFLGPYNPVSPCQNILRVIEEFGDFLGPQQIKDLLLAALEGLKGSSEAPGKDSREMMQLASEVMLSSVLEWYRHRALEVQWSRDVEAADTV

SEQ ID NO: 69997 - protein, 639 aa, Homo sapiens
MLHPTDKKMDGGSGRELASAPEVPHKPAVEAHQAPEAALQYKETVPPGNGAPDVFQTLQHTLSSLEAAAAAWRHQPPSHSGPMEFEGTSEGGAGSLGKQEGAGSCQREAARLAERNAWLRLALSSREDELVRTQASLEAIRAEKETLQKEVQELQDSLLRLEPCPHLSHNQAGGSGSGSSSSEADREPWETQDSFSLAHPLLRRLRSHSSTQILGSLPNQPLSPEMHIMEAQMEQLRGSIEKLKCFNRLLSAVLQGYKGRCEGLSMQLGQREAEATALHLALQYSEHCEEAYRVLLALREADSGAGDEAPMSDLQAAEKEAWRLLAQEEAAMDAGAQQNPQPSPEGSSVDKPTPQEVAFQLRSYVQRLQERRSLMKILSEPGPTLAPMPTVPRAEAMVQAILGTQAGPALPRLEKTQIQQDLVAAREALADLMLRLQLVRREKRGLELREAALRALGPAHVLLLEQLRWERAELQAGGANSSGGHSSGGGSSGDEEEWYQGLPAVPGGTSGIDGGQVGRAWDPEKLAQELAASLTRTLDLQEQLQSLRRELEQVAQKGRARRSQSAELNRDLCKAHSALVLAFRGAHRKQEEQRRKLEQQMALMEAQQAEEVAVLEATARALGKPRPPLPPPQLGDTFL

SEQ ID NO: 69998 - protein, 14 aa, Homo sapiens
MEAPEYLDLDEIDF

SEQ ID NO: 69999 - protein, 789 aa, Homo sapiens
ANCQIAILYQRFQRVVFGISQLLCFSALISELTNQKEVAAWTYHYSTKAYSWNISRKYCQNRYTDLVAIQNKNEIDYLNKVLPYYSSYYWIGIRKNNKTWTWVGTKKALTNEAENWADNEPNNKRNNEDCVEIYIKSPSAPGKWNDEHCLKKKHALCYTASCQDMSCSKQGECLETIGNYTCSCYPGFYGPECEYVRECGELELPQHVLMNCSHPLGNFSFNSQCSFHCTDGYQVNGPSKLECLASGIWTNKPPQCLAAQCPPLKIPERGNMTCLHSAKAFQHQSSCSFSCEEGFALVGPEVVQCTASGVWTAPAPVCKAVQCQHLEAPSEGTMDCVHPLTAFAYGSSCKFECQPGYRVRGLDMLRCIDSGHWSAPLPTCEAISCEPLESPVHGSMDCSPSLRAFQYDTNCSFRCAEGFMLRGADIVRCDNLGQWTAPAPVCQALQCQDLPVPNEARVNCSHPFGAFRYQSVCSFTCNEGLLLVGASVLQCLATGNWNSVPPECQAIPCTPLLSPQNGTMTCVQPLGSSSYKSTCQFICDEGYSLSGPERLDCTRSGRWTDSPPMCEAIKCPELFAPEQGSLDCSDTRGEFNVGSTCHFSCDNGFKLEGPNNVECTTSGRWSATPPTCKGIASLPTPGVQCPALTTPGQGTMYCRHHPGTFGFNTTCYFGCNAGFTLIGDSTLSCRPSGQWTAVTPACRAVKCSELHVNKPIAMNCSNLWGNFSYGSICSFHCLEGQLLNGSAQTACQENGHWSTTVPTCQDDGKCPLNPHSHLGTYGVFTNAAFDPSP

SEQ ID NO: 70000 - protein, 606 aa, Homo sapiens
MFSCFCFSLQDNSFSSTTVTECDEDPVSLHEDQTDCSSLRDENNKENYPDAGALVEEHAPPSWEPQQQNVEATVLVDSVLRPSMGNFKSRKPKSIFKAESGRSHGESQETEHVVSSQSECQVRAGTPAHESPQNNAFKCQETVRLQPRIDQRTAISPKDAFETRQDLNENSLLKLQALESDLCSAFLTNQEEAAQVHGVKDPAPASTQSVLADGTDSADPSPVHKDGQNEADSAPEDLHSVGTSRLLYHITDGDNPLLSPRCSIFSQSQRFNLDPESAPSPPSTQQFMMPRSSSRCSCGDGKEPQTITQLTKHIQSLKRKIRKFEEKFEQEKKYRPSHGDKTSNPEVLKWMNDLAKGRKQLKELKLKLSEEQGSAPKGPPRNLLCEQPTVPRENGKPEAAGPEPSSSGEETPDAALTCLKERREQLPPQEDSKVTKQDKNLIKPLYDRYRIIKQILSTPSLIPTIQEEEDSDEDRPQGSQQPSLADPASHLPVGDHLTYSNETEPVRALLPDEKKEVKPPALSMSNLHEATMPVLLDHLRETRADKKRLRKALREFEEQFFKQTGRSPQKEDRIPMADEYYEYKHIKAKLRLLEVLISKQDVAKTI

SEQ ID NO: 70001 - protein, 34 aa, Homo sapiens
  MOD_RES (1)..(1): Any amino acid
XIEKRFAYSFLQQLIRYVDEAHQYILEFGRSSFN

SEQ ID NO: 70002 - protein, 59 aa, Homo sapiens
MTTETGPDSEVKKAQEEAPQQPEAAAAVTTPVTPAGHGHPEANSNEKHPSQQDTRPAEQ

SEQ ID NO: 70003 - protein, 134 aa, Homo sapiens
MASAELDYTIEIPDQPCWSQKNSPSPGGKEAETRQPVVILLGWGGCKDKNLAKYSAIYHKRLLELLFDYEIEKEPLLFHVFSNGGVMLYRYVLELLQTRRFCRLRVVGTIFDSAPGDSNLVGALRALAAILERR

SEQ ID NO: 70004 - protein, 94 aa, Homo sapiens
MRHDVGEFPVLFFGSNDYLWTHQARVFPYMEGDVSSKDKMGKGVDGTYKKALQEAAARFEELKAQKELRQLQEDRKNDKKPPPYKHIKVNRPIG

SEQ ID NO: 70005 - protein, 68 aa, Homo sapiens
LNRRIQLVEEELDRAQERLATALQKLEEAEKAADESERGMKVIESRAQKDEEKMEIQEIQLKEQMCRA

SEQ ID NO: 70006 - protein, 187 aa, Homo sapiens
  MOD_RES (1)..(1): Any amino acid
XVVKGEKILPVFDEPPNPTNVEESLKRTKENDAHLVEVNLNNIKNIPIPTLKDFAKALETNTHVKCFSLAATRSNDPVATAFAEMLKVNKTLKSLNVESNFITGVGILALIDALRDNETLAELKIDNQRQQLGTAVELEMAKMLEENTNILKFGYQFTQQGPRTRAANAITKNNDLVRKRRVEGDHQ

SEQ ID NO: 70007 - protein, 58 aa, Homo sapiens
MKGRIELGDVTPHNIKQLKRLNQVIFPVSYNDKFYKDVLEKNLKVPSGQNADVQKTDN

SEQ ID NO: 70008 - protein, 143 aa, Homo sapiens
MAVVIRLQGLPIVAGTMDIRHFFSGLTIPDGGVHIVGGELGEAFIVFATDEDARLGMMRTGGTIKGSKVTLLLSSKTEMQNMIELSRRRFETANLDIPPANASRSGPPPSSGMSSRVNLPTTVSNFNNPSPSVVTATTSVHES

SEQ ID NO: 70009 - protein, 167 aa, Homo sapiens
ITASFRRFGPLVVDWPHKAESKSYFPPKGYAFLLFQEESSVQALIDACIEEDGKLYLCVSSPTIKDKPVQIRPWNLSDSDFVMDGSQPLDPRKTIFVGGVPRPLRAVELAMIMDRLYGGVCYAGIDTDPELKYPKGAGRVAFSNQQSYIAAISARFVQLQHGDIDKR

SEQ ID NO: 70010 - protein, 911 aa, Homo sapiens
MASHVQVFSPHTLQSSAFCSVKKLKIEPSSNWDMTGYGSHSKVYSQSKNIPLSQPATTTVSTSLPVPNPSLPYEQTIVFPGSTGHIVVTSASSTSVTGQVLGGPHNLMRRSTVSLLDTYQKCGLKRKSEEIENTSSVQIIEEHPPMIQNNASGATVATATTSTATSKNSGSNSEGDYQLVQHEVLCSMTNTYEVLEFLGRGTFGQVVKCWKRGTNEIVAIKILKNHPSYARQGQIEVSILARLSTESADDYNFVRAYECFQHKNHTCLVFEMLEQNLYDFLKQNKFSPLPLKYIRPVLQQVATALMKLKSLGLIHADLKPENIMLVDPSRQPYRVKVIDFGSASHVSKAVCSTYLQSRYYRAPEIILGLPFCEAIDMWSLGCVIAELFLGWPLYPGASEYDQIRYISQTQGLPAEYLLSAGTKTTRFFNRDTDSPYPLWRLKTPDDHEAETGIKSKEARKYIFNCLDDMAQVNMTTDLEGSDMLVEKADRREFIDLLKKMLTIDADKRITPIETLNHPFVTMTHLLDFPHSTHVKSCFQNMEICKRRVNMYDTVNQSKTPFITHVAPSTSTNLTMTFNNQLTTVHNQAPSSTSATISLANPEVSILNYPSTLYQPSAASMAAVAQRSMPLQTGTAQICARPDPFQQALIVCPPGFQGLQASPSKHAGYSVRMENAVPIVTQAPGAQPLQIQPGLLAQQAWPSGTQQILLPPAWQQLTGVATHTSVQHATVIPETMAGTQQLADWRNTHAHGSHYNPIMQQPALLTGHVTLPAAQPLNVGVAHVMRQQPTSTTSSRKSKHTVSKQRKNVISCVTVHDSPYSDSSSNTSPYSVQQRAGHNNANAFDTKGSLENHCTGNPRTIIVPPLKTQASEVLVECDSLVPGNLGPGQGRNLSLESGFPAFLLLEMLLYGS

SEQ ID NO: 70011 - protein, 789 aa, Homo sapiens
MRALWVLGLCCVLLTFGSVRADDEVDVDGTVEEDLGKSREGSRTDDEVVQREEEAIQLDGLNASQIRELREKSEKFAFQAEVNRMMKLIINSLYKNKEIFLRELISNASDALDKIRLISLTDENALSGNEELTVKIKCDKEKNLLHVTDTGVGMTREELVKNLGTIAKSGTSEFLNKMTEAQEDGQSTSELIGQFGVGFYSAFLVADKVIVTSKHNNDTQHIWESDSNEFSVIADPRGNTLGRGTTITLVLKEEASDYLELDTIKNLVKKYSQFINFPIYVWSSKTETVEEPMEEEEAAKEEKEESDDEAAVEEEEEEKKPKTKKVEKTVWDWELMNDIKPIWQRPSKEVEEDEYKAFYKSFSKESDDPMAYIHFTAEGEVTFKSILFVPTSAPRGLFDEYGSKKSDYIKLYVRRVFITDDFHDMMPKYLNFVKGVVDSDDLPLNVSRETLQQHKLLKVIRKKLVRKTLDMIKKIADDKYNDTFWKEFGTNIKLGVIEDHSNRTRLAKLLRFQSSHHPTDITSLDQYVERMKEKQDKIYFMAGSSRKEAESSPFVERLLKKGYEVIYLTEPVDEYCIQALPEFDGKRFQNVAKEGVKFDESEKTKESREAVEKEFEPLLNWMKDKALKDKIEKAVVSQRLTESPCALVASQYGWSGNMERIMKAQAYQTGKDISTNYYASQKKTFEINPRHPLIRDMLRRIKEDEDDKTVLDLAVVLFETATLRSGYLLPDTKAYGDRIERMLRLSLNIDPDAKVCIPNLPAKAGWLSLFLFFQNRPLMIEGCSFATFA

SEQ ID NO: 70012 - protein, 122 aa, Homo sapiens
VRNVLNDAVDLLEFRDRVIKASLNYAHLVVSTSLQCYVFSTKNWNTPIIFDLKEGTVSLILQAERHFLLVDGSSIYLYSYEGRFISSPKFPGMRTDILNAQTVSLSNDTIAIRDKADEKSLL

SEQ ID NO: 70013 - protein, 56 aa, Homo sapiens
MPALVSMLKSANLGLSVEFGTILVYTCEKSCWPPNHQTPMEEFCIIQEDPDELLFK

SEQ ID NO: 70014 - protein, 65 aa, Homo sapiens
MKISILLMFLWGLSCALPVTRYQNNESEDSEEWKGHLAQAPTPPLESSESSEGSKVSSEEQGSPL

SEQ ID NO: 70015 - protein, 180 aa, Homo sapiens
MASSSPDSPCSCDCFVSVPPASAIPAVIFAKNSDRPRDEVQEVVFVPAGTHTPGSRLQCTYIEVEQVSKTHAVILSRPSWLWGAEMGANEHGVCIGNEAVWTKEPVGEGEALLGMDLLRLALERSSSAQEALHVITGLLEHYGQGGNCLEDAAPFSYHSTFLLADRTEAWVLETAGRLWA

SEQ ID NO: 70016 - protein, 3211 aa, Homo sapiens
QMRQKSKQQAKIEATQKLEQVKNEQQQQQQQQFGSQHLLVQSGSDTPSSGIQSPLTPQPGNGNMSPAQSFHKELFTKQPPSTPTSTSSDDVFVKPQAPPPPPAPSRIPIQDSLSQAQTSQPPSPQVFSPGSSNSRPPSPMDPYAKMVGTPRPPPVGHSFSRRNSAAPVENCTPLSSVSRPLQMNETTANRPSPVRDLCSSSTTNNDPYAKPPDTPRPVMTDQFPKSLGLSRSPVVSEQTAKGPIAAGTSDHFTKPSPRADVFQRQRIPDSYARPLLTPAPLDSGPGPFKTPMQPPPSSQDPYGSVSQASRRLSVDPYERPALTPRPIDNFSHNQSNDPYSQPPLTPHPAVNESFAHPSRAFSQPGTISRPTSQDPYSQPPGTPRPVVDSYSQSSGTARSNTDPYSQPPGTPRPTTVDPYSQQPQTPRPSTQTDLFVTPVTNQRHSDPYAHPPGTPRPGISVPYSQPPATPRPRISEGFTRSSMTRPVLMPNQDPFLQAAQNRGPALPGPLVRPPDTCSQTPRPPGPGLSDTFSRVSPSAARDPYDQSPMTPRSQSDSFGTSQTAHDVADQPRPGSEGSFCASSNSPMHSQGQQFSGVSQLPGPVPTSGVTDTQNTVNMAQADTEKLRQRQKLREIILQQQQQKKIAGRQEKGSQDSPAVPHPGPLQHWQPENVNQAFTRPPPPYPGNIRSPVAPPLGPRYAVFPKDQRGPYPPDVASMGMRPHGFRFGFPGGSHGTMPSQERFLVPPQQIQGSGVSPQLRRSVSVDMPRPLNNSQMNNPVGLPQHFSPQSLPVQQHNILGQAYIELRHRAPDGRQRLPFSAPPGSVVEASSNLRHGNFIPRPDFPGPRHTDPMRRPPQGLPNQLPVHPDLEQVPPSQQEQGHSVHSSSMVMRTLNHPLGGEFSEAPLSTSVPSETTSDNLQITTQPSDGLEEKLDSDDPSVKELDVKDLEGVEVKDLDDEDLENLNLDTEDGKVVELDTLDNLETNDPNLDDLLRSGEFDIIAYTDPELDMGDKKSMFNEELDLPIDDKLDNQCVSVEPKKKEQENKTLVLSDKHSPQKKSTVTNEVKTEVLSPNSKVESKCETEKNDENKDNVDTPCSQASAHSDLNDGEKTSLHPCDPDLFEKRTNRETAGPSANVIQASTQLPAQDVINSCGITGSTPVLSSLLANEKSDNSDIRPSGSPPPPTLPASPSNHVSSLPPFIAPPGRVLDNAMNSNVTVVSRVNHVFSQGVQVNPGLIPGQSTVNHSLGTGKPATQTGPQTSQSGTSSMSGPQQLMIPQTLAQQNRERPLLLEEQPLLLQDLLDQERQEQQQQRQMQAMIRQRSEPFFPNIDFDAITDPIMKAKMVALKGINKVMAQNNLGMPPMVMSRFPFMGQVVTGTQNSEGQNLGPQAIPQDGSITHQISRPNPPNFGPGFVNDSQRKQYEEWLQETQQLLQMQQKYLEEQIGAHRKSKKALSAKQRTAKKAGREFPEEDAEQLKHVTEQQSMVQKQLEQIRKQQKEHAELIEDYRIKQQQQCAMAPPTMMPSVQPQPPLIPGATPPTMSQPTFPMVPQQLQHQQHTTVISGHTSPVRMPSLPGWQPNSAPAHLPLNPPRIQPPIAQLPIKTCTPAPGTVSNANPQSGPPPRVEFDDNNPFSESFQERERKERLREQQERQRIQLMQEVDRQRALQQRMEMEQHGMVGSEISSSRTSVSQIPFYSSDLPCDFMQPLGPLQQSPQHQQQMGQVLQQQNIQQGSINSPSTQTFMQTNERRQVGPPSFVPDSPSIPVGSPNFSSVKQGHGNLSGTSFQQSPVRPSFTPALPAAPPVANSSLPCGQDSTITHGHSYPGSTQSLIQLYSDIIPEEKGKKKRTRKKKRDDDAESTKAPSTPHSDITAPPTPGISETTSTPAVSTPSELPQQADQESVEPVGPSTPNMAAGQLCTELENKLPNSDFSQATPNQQTYANSEVDKLSMETPAKTEEIKLEKAETESCPGQEEPKLEEQNGSKVEGNAVACPVSSAQSPPHSAGAPAAKGDSGNELLKHLLKNKKSSSLLNQKPEGSICSEDDCTKDNKLVEKQNPAEGLQTLGAQMQGGFGCGNQLPKTDGGSETKKQRSKRTQRTGEKAAPRSKKRKKDEEEKQAMYSSTDTFTHLKQQLSLLPLMEPIIGVNFAHFLPYGSGQFNSGNRLLGTFGSATLEGVSDYYSQLIYKQNNLSNPPTPPASLPPTPPPMACQKMANGFATTEELAGKAGVLVSHEVTKTLGPKPFQLPFRPQDDLLARALAQGPKTVDVPASLPTPPHNNQEELRIQDHCGDRDTPDSFVPSSSPESVVGVEVSRYPDLSLVKEEPPEPVPSPIIPILPSTAGKSSESRRNDIKTEPGTLYFASPFGPSPNGPRSGLISVAITLHPTAAENISSVVAAFSDLLHVRIPNSYEVSSAPDVPSMGLVSSHRINPGLEYRQHLLLRGPPPGSANPPRLVSSYRLKQPNVPFPPTSNGLSGYKDSSHGIAESAALRPQWCCHCKVVILGSGVRKSFKDLTLLNKDSRESTKRVEKDIVFCSNNCFILYSSTAQAKNSENKESIPSLPQSPMRETPSKAFHQYSNNISTLDVHCLPQLPEKASPPASPPIAFPPAFEAAQVEAKPDELKVTVKLKPRLRAVHGGFEDCRPLNKKWRGMKWKKWSIHIVIPKGTFKPPCEDEIDEFLKKLGTSLKPDPVPKDYRKCCFCHEEGDGLTDGPARLLNLDLDLWVHLNCALWSTEVYETQAGALINVELALRRGLQMKCVFCHKTGATSGCHRFRCTNIYHFTCAIKAQCMFFKDKTMLCPMHKPKGIHEQELSYFAVFRRVYVQRDEVRQIASIVQRGERDHTFRVGSLIFHTIGQLLPQQMQAFHSPKALFPVGYEASRLYWSTRYANRRCRYLCSIEEKDGRPVFVIRIVEQGHEDLVLSDISPKGVWDKILEPVACVRKKSEMLQLFPAYLKGEDLFGLTVSAVARIAESLPGVEACENYTFRYGRNPLMELPLAVNPTGCARSEPKMSAHVKRFVLRPHTLNSTSTSKSFQSTVTGELNAPYSKQFVHSKSSQYRKMKTEWKSNVYLARSRIQGLGLYAARDIEKHTMVIEYIGTIIRNEVANRKEKLYESQNRGVYMFRMDNDHVIDATLTGGPARYINHSCAPNCVAEVVTFERGHKIIISSSRRIQKGEELCYDYKFDFEDDQHKIPCHCGAVNCRKWMN

SEQ ID NO: 70017 - protein, 53 aa, Homo sapiens
MSPRRQGLMGARSSAAVFTSKETFPDLPTARRSNQPPAARPRRPPRPSPPPAC

SEQ ID NO: 70018 - protein, 147 aa, Homo sapiens
MPAATVDHSQRICEVWACNLDEEMKKIRQVIRKYNYVAMDTEFPGVVARPIGEFRSNADYQYQLLRCNVDLLKIIQLGLTFMNEQGEYPPGTSTWQFNFKFNLTEDMYAQDSIELLTTSGIQFKKHEEEGIETQYFAELLMTSGVVL

SEQ ID NO: 70019 - protein, 66 aa, Homo sapiens
QCQVENGSAVCVCQAGYTGAACEMDVDDCSPDPCLNGGSCVDLVGNYTCLCAEPFKGLRCETVVTC

SEQ ID NO: 70020 - protein, 119 aa, Homo sapiens
MLITQGLISKGILSSHPKYGSIPKLILACIMGYFAGKLSYVKTCQEKFKKLENSPLGEALRSGQARRSSPPGHYYQKSKYDSSVSGQSSFVTSPAADNIEMLPHYEPIPFSSSMNESAP

SEQ ID NO: 70021 - protein, 132 aa, Homo sapiens
MKCVFVTVGTTSFDDLIACVSAPDSLQKIESLGYNRLILQIGRGTVVPEPFSTESFTLDVYRYKDSLKEDIQKADLVISHAGAGSCLETLEKGKPLVVVINEKLMNNHQLELAKQLHKEGHLFYCTCRYARD

SEQ ID NO: 70022 - protein, 738 aa, Homo sapiens
MDLRRRDYHMERPLLNQEHLEELGRWGSAPRTHQWRTWLQCSRARAYALLLQHLPVLVWLPRYPVRDWLLGDLLSGLSVAIMQLPQGLAYALLAGLPPVFGLYSSFYPVFIYFLFGTSRHISVGTFAVMSVMVGSVTESLAPQALNDSMINETARDAARVQVASTLSVLVGLFQVGLGLIHFGFVVTYLSEPLVRGYTTAAAVQVFVSQLKYVFGLHLSSHSGPLSLIYTVLEVCWKLPQSKVGTVVTAAVAGVVLVVVKLLNDKLQQQLPMPIPGELLTLIGATGISYGMGLKHRFEVDVVGNIPAGLVPPVAPNTQLFSKLVGSAFTIAVVGFAIAISLGKIFALRHGYRVDSNQELVALGLSNLIGGIFQCFPVSCSMSRSLVQESTGGNSQVAGAISSLFILLIIVKLGELFHDLPKAVLAAIIIVNLKGMLRQLSDMRSLWKANRADLLIWLVTFTATILLNLDLGLVVAVIFSLLLVVVRTQMPHYSVLGQVPDTDIYRDVAEYSEAKEVRGVKVFRSSATVYFANAEFYSDALKQRCGVDVDFLISQKKKLLKKQEQLKLKQLQKEEKLRKQAASPKGASVSINVNTSLEDMRSNNVEDCKMMQVSSGDKMEDATANGQEDSKAPDGSTLKALGLPQPDFHSLILDLGALSFVDTVCLKSLKNIFHDFREIEVEVYMAACHSPVVSQLEAGHFFDASITKKHLFASVHDAVTFALQHPRPVPDSPVSVTRL

SEQ ID NO: 70023 - protein, 7 aa, Homo sapiens
MIKFFLM

SEQ ID NO: 70024 - protein, 1012 aa, Homo sapiens
MPVKKTDTDRALSLLEEYCKKLRKPEEQLLKNAVKKVMGIFKSSLFQALLDIQEFYEVTLLNSQKSCEQKIEEANQVLQKWEKTSLLAPCHDRLQKSSELTDCSGSKENASCIEQNKENQSFENETDETTTQNQGRCPAQNCSVEAPAWMPVHHCTKYRYQDEDAPHDHSLPRLTHEVRGPELVHVSEKNLSQIENVHGYVLQSHISPLKASPAPIIVNTDTLDTIPYVNGTEIEYEFEEITLERGNSGLGFSIAGGTDNPHIGDDPGIFITKIIPGGAAAEDGRLRVNDCILRVNEVDVSEVSHSKAVEALKEAGSIVRLYVRRRRPILETVVEIKLFKGPKGLGFSIAGGVGNQHIPGDNSIYVTKIIDGGAAQKDGRLQVGDRLLMVNNYSLEEVTHEEAVAILKNTSEVVYLKVGKPTTIYMTDPYGPPDITHSYSPPMENHLLSGNNGTLEYKTSLPPISPGRYSPIPKHMLVDDDYTRPPEPVYSTVNKLCDKPASPRHYSPVECDKSFLLSAPYSHYHLGLLPDSEMTSHSQHSTATRQPSMTLQRAVSLEGEPRKVVLHKGSTGLGFNIVGGEDGEGIFVSFILAGGPADLSGELQRGDQILSVNGIDLRGASHEQAAAALKGAGQTVTIIAQYQPEDYARFEAKIHDLREQMMNHSMSSGSGSLRTNQKRSLYVRAMFDYDKSKDSGLPSQGLSFKYGDILHVINASDDEWWQARRVMLEGDSEEMGVIPSKRRVERKERARLKTVKFNAKPGVIDSKGSFNDKRKKSFIFSRKFPFYKNKEQSEQETSDPERGQEDLILSYEPVTRQEINYTRPVIILGPMKDRINDDLISEFPDKFGSCVPHTTRPKRDYEVDGRDYHFVISREQMEKDIQEHKFIEAGQYNDNLYGTSVQSVRFVAERGKHCILDVSGNAIKRLQVAQLYPIAIFIKPRSLEPLMEMNKRLTEEQAKKTYDRAIKLEQEFGEYFTAIVQGDTLEDIYNQCKLVIEEQSGPFIWIPSKEKL

SEQ ID NO: 70025 - protein, 223 aa, Homo sapiens
MFHLLLAARSGPARLLGPPASLPGLEVLWSPRALLLWLAWLGLQAALYLLPARKVAEGQELKDKSRLRYPINGFQALVLTALLVGLGMSAGLPLGALPEMLLPLAFVATLTAFIFSLFLYMKAQVAPVSALAPGGNSGNPIYDFFLGRELNPRICFFDFKYFCELRPGLIGWVLINLALLMKEAELRGSPSLAMWLVNGFQLLYVGDALWHEEAVLTTMDITH

SEQ ID NO: 70026 - protein, 780 aa, Homo sapiens
MGKSESQMDITDINTPKPKKKQRWTPLEISLSVLVLLLTIIAVTMIALYATYDDGICKSSDCIKSAARLIQNMDATTEPCTDFFKYACGGWLKRNVIPETSSRYGNFDILRDELEVVLKDVLQEPKTEDIVAVQKAKALYRSCINESAIDSRGGEPLLKLLPDIYGWPVATENWEQKYGASWTAEKAIAQLNSKYGKKVLINLFVGTDDKNSVNHVIHIDQPRLGLPSRDYYECTGIYKEACTAYVDFMISVARLIRQEERLPIDENQLALEMNKVMELEKEIANATAKPEDRNDPMLLYNKMTLAQIQNNFSLEINGKPFSWLNFTNEIMSTVNISITNEEDVVVYAPEYLTKLKPILTKYSARDLQNLMSWRFIMDLVSSLSRTYKESRNAFRKALYGTTSETATWRRCANYVNGNMENAVGRLYVEAAFAGESKHVVEDLIAQIREVFIQTLDDLTWMDAETKKRAEEKALAIKERIGYPDDIVSNDNKLNNEYLELNYKEDEYFENIIQNLKFSQSKQLKKLREKVDKDDYKNYFCTLSSALSFFRAIRDRRETPGSSVRWISGAAVVNAFYSSGRNQIVFPAGILQPPFFSAQQSNSLNYGGIGMVIGHEITHGFDDNGRNFNKDGDLVDWWTQQSASNFKEQSQCMVYQYGNFSWDLAGGQHLNGINTLGENIADNGGLGQAYRAYQNYIKKNGEEKLLPGLDLNHKQLFFLNFAQVWCGTYRPEYAVNSIKTDVHSPGNFRIIGTLQNSAEFSEAFHCRKNSYMNPEKKCRVW

SEQ ID NO: 70027 - protein, 70 aa, Homo sapiens
MKNHLLFWGVLAVFIKAVHVKAQEDERIVLVDNKCKCARITSRIIRSSEDPNEDIVERNIRIIVPLNNRE

SEQ ID NO: 70028 - protein, 1370 aa, Homo sapiens
MGGKNKKHKAPAAAVVRAAVSASRAKSAEAGIAGEAQSKKPVSRPATAAAAAAGSREPRVKQGPKIYSFNSTNDSSGPANLDKSILKVVINNKLEQRIIGVINEHKKQNNDKGMISGRLTAKKLQDLYMALQAFSFKTKDIEDAMTNTLLYGGDLHSALDWLCLNLSDDALPEGFSQEFEEQQPKSRPKFQSPQIQATISPPLQPKTKTYEEDPKSKPKKEEKNMEVNMKEWILRYAEQQNEEEKNENSKSLEEEEKFDPNERYLHLAAKLLDAKEQAATFKLEKNKQGQKEAQEKIRKFQREMETLEDHPVFNPAMKISHQQNERKKPPVATEGESALNFNLFEKSAAATEEEKGKKKEPHDVRNFDYTARSWTGKSPKQFLIDWVRKNLPKSPNPSFEKVPVGRYWKCRVRVIKSEDDVLVVCPTILTEDGMQAQHLGATLALYRLVKGQSVHQLLPPTYRDVWLEWSDAEKKREELNKMETNKPRDLFIAKLLNKLKQQQQQQQQHSENKRENSEDPEESWENLVSDEDFSALSLESANVEDLEPVRNLFRKLQSTPKYQKLLKERQQLPVFKHRDSIVETLKRHRVVVVAGETGSGKSTQVPHFLLEDLLLNEWEASKCNIVCTQPRRISAVSLANRVCDELGCENGPGGRNSLCGYQIRMESRACESTRLLYCTTGVLLRKLQEDGLLSNVSHVIVDEVHERSVQSDFLLIILKEILQKRSDLHLILMSATVDSEKFSTYFTHCPILRISGRSYPVEVFHLEDIIEETGFVLEKDSEYCQKFLEEEEEVTINVTSKAGGIKKYQEYIPVQTGAHADLNPFYQKYSSRTQHAILYMNPHKINLDLILELLAYLDKSPQFRNIEGAVLIFLPGLAHIQQLYDLLSNDRRFYSERYKVIALHSILSTQDQAAAFTLPPPGVRKIVLATNIAETGITIPDVVFVIDTGRTKENKYHESSQMSSLVETFVSKASALQRQGRAGRVRDGFCFRMYTRERFEGFMDYSVPEILRVPLEELCLHIMKCNLGSPEDFLSKALDPPQLQVISNAMNLLRKIGACELNEPKLTPLGQHLAALPVNVKIGKMLIFGAIFGCLDPVATLAAVMTEKSPFTTPIGRKDEADLAKSALAMADSDHLTIYNAYLGWKKARQEGGYRSEITYCRRNFLNRTSLLTLEDVKQELIKLVKAAGFSSSTTSTSWEGNRASQTLSFQEIALLKAVLVAGLYDNVGKIIYTKSVDVTEKLACIVETAQGKAQVHPSSVNRDLQTHGWLLYQEKIRYARVYLRETTLITPFPVLLFGGDIEVQHRERLLSIDGWIYFQAPVKIAVIFKQLRVLIDSVLRKKLENPKMSLENDKILQIITELIKTENNN

SEQ ID NO: 70029 - protein, 1512 aa, Homo sapiens
MWPSQLLIFMMLLAPIIHAFSRAPIPMAVVRRELSCESYPIELRCPGTDVIMIESANYGRTDDKICDSDPAQMENIRCYLPDAYKIMSQRCNNRTQCAVVAGPDVFPDPCPGTYKYLEVQYECVPYKVEQKVFLCPGLLKGVYQSEHLFESDHQSGAWCKDPLQASDKIYYMPWTPYRTDTLTEYSSKDDFIAGRPTTTYKLPHRVDGTGFVVYDGALFFNKERTRNIVKFDLRTRIKSGEAIIANANYHDTSPYRWGGKSDIDLAVDENGLWVIYATEQNNGKIVISQLNPYTLRIEGTWDTAYDKRSASNAFMICGILYVVKSVYEDDDNEATGNKIDYIYNTDQSKDSLVDVPFPNSYQYIAAVDYNPRDNLLYVWNNYHVVKYSLDFGPLDSRSGQAHHGQVSYISPPIHLDSELERPSVKDISTTGPLGMGSTTTSTTLRTTTLSPGRSTTPSVSGRRNRSTSTPSPAVEVLDDMTTHLPSASSQIPALEESCEAVEAREIMWFKTRQGQIAKQPCPAGTIGVSTYLCLAPDGIWDPQGPDLSNCSSPWVNHITQKLKSGETAANIARELAEQTRNHLNAGDITYSVRAMDQLVGLLDVQLRNLTPGGKDSAARSLNKLQKRERSCRAYVQAMVETVNNLLQPQALNAWRDLTTSDQLRAATMLLHTVEESAFVLADNLLKTDIVRENTDNIKLEVARLSTEGNLEDLKFPENMGHGSTIQLSANTLKQNGRNGEIRVAFVLYNNLGPYLSTENASMKLGTEALSTNHSVIVNSPVITAAINKEFSNKVYLADPVVFTVKHIKQSEENFNPNCSFWSYSKRTMTGYWSTQGCRLLTTNKTHTTCSCNHLTNFAVLMAHVEVKHSDAVHDLLLDVITWVGILLSLVCLLICIFTFCFFRGLQSDRNTIHKNLCISLFVAELLFLIGINRTDQPIACAVFAALLHFFFLAAFTWMFLEGVQLYIMLVEVFESEHSRRKYFYLVGYGMPALIVAVSAAVDYRSYGTDKVCWLRLDTYFIWSFIGPATLIIMLNVIFLGIALYKMFHHTAILKPESGCLDNINYEDNRPFIKSWVIGAIALLCLLGLTWAFGLMYINESTVIMAYLFTIFNSLQGMFIFIFHCVLQKKVRKEYGKCLRTHCCSGKSTESSIGSGKTSGSRTPGRYSTGSQSRIRRMWNDTVRKQSESSFITGDINSSASLNRGAMANHLISNALLRPHGTNNPYNTLLGEPAVCNNPSVSMYNAQEGLLNNARDTSVMDTLPLNGNHGNSYSIASGEYLSNCVQIIDRGYNHNETALEKKILKELTSNYIPSYLNNHERSSEQNRNLMNKLVNNLGSGREDDAIVLDDATSFNHEESLGLELIHEESDAPLLPPRVYSTENHQPHHYTRRRIPQDHSESFFPLLTNEHTEDLQSPHRDSLYTSMPTLAGVAATESVTTSTQTEPPPAKCGDAEDVYYKSMPNLGSRNHVHQLHTYYQLGRGSSDGFIVPPNKDGTPPEGSSKGPAHLVTSL

SEQ ID NO: 70030 - protein, 149 aa, Homo sapiens
MILTVFLSNNEQILTEVPITPETTCRDVVEFCKEPGEGSCHLAEVWRGNERPIPFDHMMYEHLQKWGPRREEVKFFLRHEDSPTENSEQGGRQTQEQRTQRNVINVPGEKRTENGVGNPRVELTLSELQDMAARQQQQIENQQQMLVAK

SEQ ID NO: 70031 - protein, 163 aa, Homo sapiens
MLETLVGKLKCCIGEESDSQKRKPKAKAPLPPAETKYTDVSSAADSVESTAFIMEQKENMIDKDVELSVVLPGDIIKSTTVHGSKPMMDLLIFLCAQYHLNPSSYTIDLLSAEQNHIKFKPNTPIGMLEVEKVILKPKMLDKKKPTPIIPEKTVRVVINFKKT

SEQ ID NO: 70032 - protein, 242 aa, Homo sapiens
MSELEQLRQEAEQLRNQIQDARKACNDATLVQITSNMDSVGRIQMRTRRTLRGHLAKIYAMHWGYDSRLLVSASQDGKLIIWDSYTTNKMHAIPLRSSWVMTCAYAPSGNYVACGGLDNICSIYNLKTREGNVRVSRELPGHTGYLSCCRFLDDSQIVTSSGDTTCALWDIETAQQTTTFTGHSGDVMSLSLSPDMRTFVSGACDASSKLWDIRDGMCRQSFTGHVSDINAVSVSLLVMTTV

SEQ ID NO: 70033 - protein, 45 aa, Homo sapiens
LDNMGRKENEKVGIFNCHGMGGNQTQWTCNHVKMPPYERKSVMGI

SEQ ID NO: 70034 - protein, 92 aa, Homo sapiens
MLALLGLSQALNILLGLKGLAPAEISAVCEKGNFNVAHGLAWSYYIGYLRLILPAWSTVVTRSQLTATSASQSSRPGFELTISITTTCYGVQ

SEQ ID NO: 70035 - protein, 64 aa, Homo sapiens
MGCVQCKDKEATKLTEERDGSLNQSSGYRYGTDPTPQHYPSFGVTSIPNYNNFHAAGGQGLTVF

SEQ ID NO: 70036 - protein, 66 aa, Homo sapiens
MDPLGPAKPQWSWRCCLTTLLFQLLMAVCFFSYLRVSQDDPTVYPNGSRFPDSTGTPAHSIPLILL

SEQ ID NO: 70037 - protein, 119 aa, Homo sapiens
MADGLFRRRPWGLEQIRPDPESEGLFDKPPPEDPPAARGPRSASAAGKKAGRRAGGRAQGGRAGQPPKAASRPPPKKEAPPLDEGCYLDHFPHLSIFIYAAIAFSITSCIFTYIHLQLA

SEQ ID NO: 70038 - protein, 108 aa, Homo sapiens
MAAESGSDFQQRRRRRRDPEEPEKTELSERELAVAVAVSQENDEENEERWVGPLPVEATLAKKRKVLEFERVYLDNLPSASMYERSYMHRDVITHVVCTKQWKVIQRI

SEQ ID NO: 70039 - protein, 264 aa, Homo sapiens
  MOD_RES (1)..(1): Any amino acid
XRQLRRDPCSGGDCWASCLAAQGWPRSWDACPTASAGTGTASAGAVPQVTSPPCCLCPEGVHRFQWIRNLVPEFGVSSSHVRVLSSPAEFFELMKGQIRVAKRRVVMASLYLGTGPLEQELVDCLESTLEKSLQAKFPSNLKVSILLDFTRGSRGRKNSRTMLLPLLRRFPEQVRVSLFHTPHLRGLLRLLIPERFNETIGLQHIKVYLFDNSVILSGTATCSCRTVRRLPTSSRSWWTRWGMCPCSCRGTTRCRWWMGWCILT

SEQ ID NO: 70040 - protein, 68 aa, Homo sapiens
MEKVQLEFENQEMEKKLQEFRSTRNKEKEDREMTKFIMCLAAFNDPVANSFTFTDLDLVWTSKWIMIL

SEQ ID NO: 70041 - protein, 172 aa, Homo sapiens
  MOD_RES (1)..(1): Any amino acid
XREALGGMDSRLFGFVRLHEDGARTKTLLGKAVRCYESLILKAEGKVESDFFCQLGHFNLLLEDYSKALSAYQRYYSLQADYWKNAAFLYGLGLVYFYYNAFHWAIKAFQDVLYVDPSFCRAKEIHLRLGLMFKVNTDYKSSLKHFQLALIDCNPCTLSNAEKEVSFCKGGI

SEQ ID NO: 70042 - protein, 2218 aa, Homo sapiens
MKQRKGQGSGGSRGRKKRGLSDISPSTSLPPLVEGQLRCFLKLTVNRVIWKIAKPPTCVLVRVRWWGETSDGTLFCPRDALQTEPKAVRTTTRYAIRCGPKQFTSYLTDMAVLVLEVITKLDGLPIGRVQINGLAQLSPTHQINGFFTIVSSTSKKLGELQVSLALEPLSETYDSYHPLPTTDMTENVLLSKQGFRENTEPSSTQFQVPSRPRDIHTIKIDGKELAANSSRSTTPRGKDHVCFAENPDTIKDSSFGLQHSLNSGQSLESVTLKGRAPRKQMSLLNSSEFQPQIRTVAKSHSDSCILSSNNLPTKDLLSALLEQGNKLRNAMVISAMKSSPETSMLLDQVHPPINEDSLRASTQIRAFSRNRFKDHIEDHLLPSTENTFWRHDTKADTRAIQLLLGSAELSQGNFWDGLGSPPDSPSPGSDVYCISELNDPQYDQSLLENLFYTAPKSDTSISDFLSEEDDIVPSKKISQSTALARSSKVLESSDHKLKKRSAGKRNRNLVEQQMLSETPEDAQTMTLSVDRLALLGRTHSVRIIIETMGVPPDSPQMTPGKKSYAGPPPKVTTAKKRTFFVEYHFPVGFSESGLGKTALITEVVRLASSKITDGKVKFQQRFVFPVQFGGPMIEHWWNSNLTFQIYVKKTPQKKPEVIGSVSLSLRAVIQSELLSFSDQLPVQQENGQSPFGPLKVTMELITDNKDFTGINTKLSGNTHYTPLCAPTSPNKALPELNQDMTCTKNPQNLNQIHEETAKKAQNLVLPNRKSPSPVAPHPSTFVATPASHNLVNQTNGTTKESALLLHVLLMVPDGKDFISGESEKQSPCNVYLNCKLFSTEEVTRSVIAWGTTQPVFNFSQVIPVSLSSKYLERLKNNVMVIETWNKVRSPGQDKLLGLVKLPLHQFYMSFKDAKISRLLLDAQYPVVAVDSYMPVIDVFSGHQNGSLRVFLAMGSSNQIMALQRLKNEEGTLPPFSPRPAHFLDQPTAASVAMAEDRGNGLMEHCFEIHIEMVKGLAPLQATVWGEADCYVQYYFPVQHSQSSVLKGPEFLENGITLKPFRTATTLCVPDPIFNSEHHHSLLLPAEVPVQRLLLSAFSAQGLVPGGGVQFEIWCRYYYPNVRDQKVAKGTLPLSRICAMVTTQHREDVGIQTFNLPLTPRIENRKELRNQSSGLLDVGLRYRRSPRTAEGVLAARTVSISVQIIRACGLQAAAKALAEREPALQFSATVGVNASVTTHLSFLPQGEQRRTHPVACSFCPEFSHHVEFTCNLVTQHCSGEACFLAELLEFAEVIFAVYHENTKSASDIISIESCKEYLLGVVKVPTKELLIKRSGITGWYPIILPEDGGLPHGLELMQKIVGGLELSISFTHRGDRERVLEAAEHLGWSFENSLKDFVRMDEGEPATVTISTPRLWLPIHCVLLAGHNHIHKNTYCYLRYKFYDHEAFWTPLKKPKESVNKKQIMVTFKASKRAEVTRGPSLLWYFREERLEIQVWRAYGNDSVERPHQTDSWIGSAYVDLARLGERSARTLTVSGVYPLFGRNASNLSGAALRVHVVLSSLSSHLEPTHELDSMDCSSHSESEQLPRRNDEVQLSPPEVISCHQKSPASTQVPCSSTTAEVRLTQEGPADLDGTFAVSILVERAMHLSLKGSPLTERKVSIPSCCVSFATADESSPVYTQVVENTDSPIWNFQQQSRSDTTRSQASRHEEHVQNIRRFHESLHLQGEAPLPCDDKLTTSPLSSQTSILTSLRKNLSELDQIQRYFRQKLTKPFLPLSPQTQTAISQHQESCRDHLGPGASSLDPGSQCILEKSSNLVLQVSSLITDLQTITRDSQAALSSHRARSRSNKATTLPDAQDTEALQERCTMPDEPLVRAPDKGTDSPSPPPLEETSNGGRMLHESLRHAVPITRMQSSEDTEAGPAYSDEDYEEDIIEPRTLNEITTVTDKTSPWSSVISDTSEVISPQPDEVQREGPSCPSPGPFCREELMVKSSFLSSPERAVNPHLPRQGSPSQSLVACECEASKARVGGESASANPQPIPCPTLSGAQQSSTFVGWSSPQTDQNKEPKSEAPAENEAATSELGDSADSFKKLPLNLASQSRRENHKGPPIDSSDIRQRQVTTGSETSTKQSLLLPGPIVVPNFFLPPQQLEASLRMLSLSATLPPAATTDQDKSEATRGALSQRPCRPRPNSLPLNLPEEETLRIARIFSSQYSQKD

SEQ ID NO: 70043 - protein, 78 aa, Homo sapiens
MESNLSGLVPAAGLVPALPPAVTLGLTAAYTTLYALLFFSVYAQLWLVLLYGHKRLSYQTVFLALCLLWAALRTTLFS

SEQ ID NO: 70044 - protein, 99 aa, Homo sapiens
MSILIIEAFYGGSHKQLVDLLQEELGDCVVYTLPAKKWHWRARTSALYFSQTIPISEHYRTLFASSVLNLTELAALRPDLGKLKKILYFHENQLIYPVK

SEQ ID NO: 70045 - protein, 489 aa, Homo sapiens
MTPALTALLCLGLSLGPRTRVQAGPFPKPTLWAEPGSVISWGSPVTIWCQGSLEAQEYRLDKEGSPEPLDRNNPLEPKNKARFSIPSMTEHHAGRYRCHYYSSAGWSEPSDPLELVMTGFYNKPTLSALPSPVVASGGNMTLRCGSQKGYHHFVLMKEGEHQLPRTLDSQQLHSGGFQALFPVGPVNPSHRWRFTCYYYYMNTPQVWSHPSDPLEILPSGVSRKPSLLTLQGPVLAPGQSLTLQCGSDVGYDRFVLYKEGERDFLQRPGQQPQAGLSQANFTLGPVSPSHGGQYRCYGAHNLSSEWSAPSDPLNILMAGQIYDTVSLSAQPGPTVASGENVTLLCQSWWQFDTFLLTKEGAAHPPLRLRSMYGAHKYQAEFPMSPVTSAHAGTYRCYGSYSSNPHLLSFPSEPLELMVSGHSGGSSLPPTGPPSTPGLGRYLEVLIGVSVAFVLLLFLLLFLLLRRQRHSKHRTSGLRLCPSSPRPEKD

SEQ ID NO: 70046 - protein, 198 aa, Homo sapiens
MAIVQTLPVPLEPAPEAATAPQAPVMGSVSSLISGRPCPGGPAPPRHHGPPGPTFFRQQDGLLRGGYEAQEPLCPAVPPRKAVPVTSFTYINEDFRTESPPSPSSDVEDAREQRAHNAHLRGPPPKLIPVSGKLEKNMEKILIRPTAFKPVLPKPRGAPSLPSFMGPRATGLSGSQGSLTQLFGGPASSSSSSSSSSA

SEQ ID NO: 70047 - protein, 178 aa, Homo sapiens
MLWKLLLRSQSCRLCSFRKMRSPPKYRPFLACFTYTTDKQSSKENTRTVEKLYKCSVDIRKIRRLKGWVLLEDETYVEEIANILQELGADETAVASILERCPEAIVCSPTAVNTQRKLWQLVCKNEEELIKLIEQFPESFFTIKDQENQKLNVQFFQELGLKNVVISRLLTAAPNVFH

SEQ ID NO: 70048 - protein, 103 aa, Homo sapiens
MSWSFLTRLLEEIHNHSTFVGKIWLTVLIVFRIVLTAVGGESIYYDEQSKFVCNTEQPGCENVCYDAFAPLSHVRFWVFQIILVATPSVMYLGYAIHKIAKME

SEQ ID NO: 70049 - protein, 183 aa, Homo sapiens
MYHSLSETRHPLQPEEQEVGIDPLSSYSNKSGGDSNKNGRRTSSTLDSEGTFNSYRKEWEELFVNNNYLATIRQKGINGQLRSSRFRSICWKLFLCVLPQDKSQWISRIEELRAWYSNIKEIHITNPRKVVGQQDLMINNPLSQDEGSLWNKFFQDKELRSMIEQDVKRTFPEMQFFQQENVR

SEQ ID NO: 70050 - protein, 1296 aa, Homo sapiens
MVSSGCRMRSLWFIIVISFLPNTEGFSRAALPFGLVRRELSCEGYSIDLRCPGSDVIMIESANYGRTDDKICDADPFQMENTDCYLPDAFKIMTQRCNNRTQCIVVTGSDVFPDPCPGTYKYLEVQYECVPYIFVCPGTLKAIVDSPCIYEAEQKAGAWCKDPLQAADKIYFMPWTPYRTDTLIEYASLEDFQNSRQTTTYKLPNRVDGTGFVVYDGAVFFNKERTRNIVKFDLRTRIKSGEAIINYANYHDTSPYRWGGKTDIDLAVDENGLWVIYATEQNNGMIVISQLNPYTLRFEATWETVYDKRAASNAFMICGVLYVVRSVYQDNESETGKNSIDYIYNTRLNRGEYVDVPFPNQYQYIAAVDYNPRDNQLYVWNNNFILRYSLEFGPPDPAQVPTTAVTITSSAELFKTIISTTSTTSQKGPMSTTVAGSQEGSKGTKPPPAVSTTKIPPITNIFPLPERFCEALDSKGIKWPQTQRGMMVERPCPKGTRGTASYLCMISTGTWNPKGPDLSNCTSHWVNQLAQKIRSGENAASLANELAKHTKGPVFAGDVSSSVRLMEQLVDILDAQLQELKPSEKDSAGRSYNKLQKREKTCRAYLKAIVDTVDNLLRPEALESWKHMNSSEQAHTATMLLDTLEEGAFVLADNLLEPTRVSMPTENIVLEVAVLSTEGQIQDFKFPLGIKGAGSSIQLSANTVKQNSRNGLAKLVFIIYRSLGQFLSTENATIKLGADFIGRNSTIAVNSHVISVSINKESSRVYLTDPVLFTLPHIDPDNYFNANCSFWNYSERTMMGYWSTQGCKLVDTNKTRTTCACSHLTNFAILMAHREIAYKDGVHELLLTVITWVGIVISLVCLAICIFTFCFFRGLQSDRNTIHKNLCINLFIAEFIFLIGIDKTKYAIACPIFAGLLHFFFLAAFAWMCLEGVQLYLMLVEVFESEYSRKKYYYVAGYLFPATVVGVSAAIDYKSYGTEKACWLHVDNYFIWSFIGPVTFIILLNIIFLVITLCKMVKHSNTLKPDSSRLENINNYRVCDGYYNTDLPGYEDNKPFIKSWVLGAFALLCLLGLTWSFGLLFINEETIVMAYLFTIFNAFQGVFIFIFHCALQKKVRKEYGKCFRHSYCCGGLPTESPHSSVKASTTRTSARYSSGTQSRIRRMWNDTVRKQSESSFISGDINSTSTLNQGMTGNYLLTNPLLRPHGTNNPYNTLLAETVVCNAPSAPVFNSPGVLYLQIKLPFFAAKQSYDLCPVSKIFKLSYIYCYILNFSVKKNYGIVYARLLKLHYIIVKAQS

SEQ ID NO: 70051 - protein, 286 aa, Homo sapiens
MGEPAGVAGTMESPFSPGLFHRLDEDWDSALFAELGYFTDTDELQLEAANETYENNFDNLDFDLDLMPWESDIWDINNQICTVKDIKAEPQPLSPASSSYSVSSPRSVDSYSSTQHVPEELDLSSSSQMSPLSLYGENSNSLSSAEPLKEDKPVTGPRNKTENGLTPKKKIQVNSKPSIQPKPLLLPAAPKTQTNSSVPAKTIIIQTVPTLMPLAKQQPIISLQPAPTKDCCAKETATYDKKSRIRLSVSQEEERIYARVRGEIKGCPLRKRATEERKWNTEAAAG

SEQ ID NO: 70052 - protein, 177 aa, Homo sapiens
  MOD_RES (1)..(1): Any amino acid
XMNSSKTKLELQKHLTTLTNQEQATIFEEVQKLRPRNEQRENELIISFLRCLYEEKQKEHIHIGEMKQEPSVCEKEALPISESSFKLLGSSEDLSSDSESHLPEEPAPLSPQQAFRRRANTLSHFPIECQEPPQPARGSPGVSQRKLMRYHSVSTETPHERKDFESKANHLGDSGGT

SEQ ID NO: 70053 - protein, 1086 aa, Homo sapiens
MYGSARSVGKVEPSSQSPGRSPRLPRSPRLGHRRTNSTGGSSGSSVGGGSGKTLSMENIQSLNAAYATSGPMYLSDHENVGSETPKSTMTLGRSGGRLPYGVRMTAMGSSPNIASSGVASDTIAFGEHHLPPVSMASTVPHSLRQARDNTIMDLQTQLKEVLRENDLLRKDVEVKESKLSSSMNSIKTFWSPELKKERALRKDEASKITIWKEQYRVVQEENQHMQMTIQALQDELRIQRDLNQLFQQDSSSRTGEPCVAELTEENFQRLHAEHERQAKELFLLRKTLEEMELRIETQKQTLNARDESIKKLLEMLQSKGLSAKATEEDHERTRRLAEAEMHVHHLESLLEQKEKENSMLREEMHRRFENAPDSAKTKALQTVIEMKDSKISSMERGLRDLEEEIQMLKSNGALSTEEREEEMKQMEVYRSHSKFMKNKVEQLKEELSSKEAQWEELKKKAAGLQAEIGQVKQELSRKDTELLALQTKLETLTNQFSDSKQHIEVLKESLTAKEQRAAILQTEVDALRLRLEEKETMLNKKTKQIQDMAEEKGTQAGEIHDLKDMLDVKERKVNVLQKKIENLQEQLRDKEKQMSSLKERVKSLQADTTNTDTALTTLEEALAEKERTIERLKEQRDRDEREKQEEIDNYKKDLKDLKEKVSLLQGDLSEKEASLLDLKEHASSLASSGLKKDSRLKTLEIALEQKKEECLKMESQLKKAHEAALEARASPEMSDRIQHLEREITRYKDESSKAQAEVDRLLEILKEVENEKNDKDKKIAELERQVKDQNKKVANLKHKEQVEKKKSAQMLEEARRREDNLNDSSQQLQDSLRKKDDRIEELEEALRESVQITAEREMVLAQEESARTNAEKQVEELLMAMEKVKQELESMKAKLSSTQQSLAEKETHLTNLRAERRKHLEEVLEMKQEALLAAISEKDANIALLELSSSKKKTQEEVAALKREKDRLVQQLKQQTQNRMKLMADNYEDDHFKSSHSNQTNHKPSPDQIIQPLLELDQNRSKLKLYIGHLTTLCHDRDPLILRGLTPPASYNLDDDQAAWENELQKMTRGQNPLHPKAMEKLPFFM

SEQ ID NO: 70054 - protein, 226 aa, Homo sapiens
MHTVATSGPNASWGAPANASGCPGCGANASDGPVPSPRAVDAWLVPLFFAALMLLGLVGNSLVIYVICRHKPMRTVTNFYIANLAATDVTFLLCCVPFTALLYPLPGWVLGDFMCKFVNYIQQVSVQATCATLTAMSVDRWYVTVFPLRALHRRTPRLALAVSLSIWVGAGAGRARRRRAGQGLAAGGGRGPALRRLLGPHPAVPGAAGAGPRGLLAPTQLRRLRA

SEQ ID NO: 70055 - protein, 166 aa, Homo sapiens
MTAPTGERLLNSGLICSPFWKRELKQRGQIQDDFRGGKINLEKTQRLLEKLDIRCSYIHVKQIFKTSDYPVVLSLENHCSTAQQEVMADNLQATFGESLLSDMLDDFPDTLPSPEALKFKILVKNKKIGTLKETHERKGSDKRGDNQDKETGVKKLPGVMLFKKKK

SEQ ID NO: 70056 - protein, 89 aa, Homo sapiens
MAWQGLVLAACLLMFPSTTADCLSRCSLCAVKTQDGPKPINPLICSLQCQAALLPSEEWERCQSFLSFFTPSTLGLNDKEDLGSKSVGE

SEQ ID NO: 70057 - protein, 236 aa, Homo sapiens
  MOD_RES (1)..(1): Any amino acid
XFHNFGNGCSAAVRRNGLHTVPTEMQFLASTEAKDHPGETEVPLDLPADSRKEDEYRRNIWKGFLISIPYSASIGGTATLTGTAPNLILLGQLKSFFPQCDVVNFGSWFIFAFPLMLLFLLAGWLWISFLYGGLSFRGWRKNKSEIRTNAEDRARAVIREEYQNLGPIKFAEQAVFILFCMFAILLFTRDPKFIPGWASLFNPGFLSDAVTGVAIVTILFFFPSQRPSLKWWFDFK

SEQ ID NO: 70058 - protein, 63 aa, Homo sapiens
MKQPIMADGPRCKRRKQANPRRKNVVNYDNVVDTGSETDEEDKLHIAEDDGIANPLDQETSPA

SEQ ID NO: 70059 - protein, 52 aa, Homo sapiens
GLDAFPSSYFDEDDFFTDQSSRDPLEDGDELLADEQAEGPPPPATLIMASLP

SEQ ID NO: 70060 - protein, 102 aa, Homo sapiens
  MOD_RES (1)..(1): Any amino acid
XSKGDDLSTAILKQKNRPNRLIVDEAINEDNSVVSLSQALTFFPQPKMDELQLFRGDTVLLKGKKRREAVCIVLSDDTCSDEKIRMNRVVRNNLRVRLGDVI

SEQ ID NO: 70061 - protein, 37 aa, Homo sapiens
  MOD_RES (1)..(1): Any amino acid
XMALFFVLCWIQEMGFHHVGQAGHELLTSMDPPASAS

SEQ ID NO: 70062 - protein, 185 aa, Homo sapiens
MPLYEGLGSGGEKTAVVIDLGEAFTKCGFAGETGPRCIIPSVIKRAGMPKPVRVVQYNINTEELYSYLKEFIHILYFRHLLVNPRDRRVVIIESVLCPSHFRETLTRVLFKYFEVPSVLLAPSHLMALLTLGINSAMVLDCGYRESLVLPISFLNPSSKLLGSTTPRRKSSSQRVGNSTIGTMYC

SEQ ID NO: 70063 - protein, 80 aa, Homo sapiens
MVDLTQVMDDEVFMAFASYATIILSKMMLMSTATAFYRLTRKVFANPEDCVAFGKGENAKKYLRTDDRVERVRRAHLNDL

SEQ ID NO: 70064 - protein, 742 aa, Homo sapiens
MAGERGASAVLFDITEDRAAAEQLQQPLGLTWPVVLIWGNDAEKLMEFVYKNQKAHVRIELKEPPAWPDYDVWILMTVVGTIFVIILASVLRIRCRPRHSRPDPLQQRTAWAISQLATRRYQASCRQARGEWPDSGSSCSSAPVCAICLEEFSEGQELRVISCLHEFHRNCVDPWLHQHRTCPLCMFNITEGDSFSQSLGPSRSYQEPGRRLHLIRQHPGHAHYHLPAAYLLGPSRSAVARPPRPGPFLPSQEPGMGPRHHRFPRAAHPRAPGEQQRLAGAQHPYAQGWGLSHLQSTSQHPAACPVPLRRARPPDSSGSGESYCTERSGYLADGPASDSSSGPCHGSSSDSVVNCTDISLQGVHGSSSTFCSSLSSDFDPLVYCSPKGDPQRVDMQPSVTSRPRSLDSVVPTGETQVSSHVHYHRHRHHHYKKRFQWHGRKPGPETGVPQSRPPIPRTQPQPEPPSPDQQVTRSNSAAPSGRLSNPQCPRALPEPAPGPVDASSICPSTSSLFNLQKSSLSARHPQRKRRGGPSEPTPGSRPQDATVHPACQIFPHYTPSVAYPWSPEAHPLICGPPGLDKRLLPETPGPCYSNSQPVWLCLTPRQPLEPHPPGEGPSEWSSDTAEGRPCPYPHCQVLSAQPGEFSEGSGCGRERRLQLNISGQVKSANKGLMEAEKDTAEMTTKILNHRDSVSCWLECRNTPPLPGATPLVGRSQGGPREVLVWLRHQKGTWKAGCDGSCL

SEQ ID NO: 70065 - protein, 123 aa, Homo sapiens
MPTVEELYRNYGILADATEQVGQHKDAYQVILDGVKGGTKEKRLAAQFIPKFFKHFPELADSAINAQLDLCEDEDVSKTSAFFSIVMSLIYLNSTTHWIAGDVPLNRLLPSAKNLMFFIPLYV

SEQ ID NO: 70066 - protein, 37 aa, Homo sapiens
MAGSSLTAVGSTLVRYSTTFETGRCLYPRAAGRSRSC

SEQ ID NO: 70067 - protein, 127 aa, Homo sapiens
  MOD_RES (1)..(1): Any amino acid
XLAASAKKKHGSTPPGDNKDVEDSSVIHYDDAAISKLLDRNQDATDDTELQNMNEYLSSFKVAQYVVREEDGVLSPKSSLWVSPGGLSVSSSAPHPPCRPGGGGAGNHQAGGERGPRLLGEAAAAPL

SEQ ID NO: 70068 - protein, 38 aa, Homo sapiens
MDNLSDTLKKLKITAVDKTEDSLEGCLDCLLQALAQNR

SEQ ID NO: 70069 - protein, 1145 aa, Homo sapiens
MCKCCNLFSPNQSELLSHVSEKHMEEGVNVDEIIIPLRPLSTPEPPNSSKTGDEFLVMKRKRGRPKGSTKKSSTEEELAENIVSPTEDSPLAPEEGNSLPPSSLECSKCCRKFSNTRQLRKHICIIVLNLGEEEGEAGNESDLELEKKCKEDDREKASKRPRSQKTEKVQKISGKEARQLSGAKKPIISVVLTAHEAIPGATKIVPVEAGPPETGATNSETTSADLVPRRGYQEYAIQQTPYEQPMKSSRLGPTQLKIFTCEYCNKVFKFKHSLQAHLRIHTNEKPYKCPQCSYASAIKANLNVHLRKHTGEKFACDYCSFTCLSKGHLKVHIERVHKKIKQHCRFCKKKYSDVKNLIKHIRDAHDPQDKKVKEALDELCLMTREGKRQLLYDCHICERKFKNELDRDRHMLVHGDKWPFACELCGHGATKYQALELHVRKHPFVYVCAVCRKKFVSSIRLRTHIKEVHGAAQEALVFTSSINQSFCLLEPGGDIQQEALGDQLQLVEEEFALQGVNALKEEACPGDTQLEEGRKEPEAPGEMPAPAVHLASPQAESTALPPCELETTVVSSSDLHSQEVVSDDFLLKNDTSSAEAHAAPEKPPDMQHRSSVQTQGEVITLLLSKAQSAGSDQESHGAQSPLGEGQNMAVLSAGDPDPSRCLRSNPAEASDLLPPVAGGGDTITHQPDSCKAAPEHRSGITAFMKVLNSLQKKQMNTSLCERIRKVYGDLECEYCGKLFWYQVHFDMHVRTHTREHLYYCSQCHYSSITKNCLKRHVIQKHSNILLKCPTDGCDYSTPDKYKLQAHLKVHTALDKRSYSCPVCEKSFSEDRLIKSHIKTNHPEVSMSTISEVLGRRVQLKGLIGKRAMKCPYCDFYFMKNGSDLQRHIWAHEGVKPFKCSLCEYATRSKSNLKAHMNRHSTEKTHLCDMCGKKFKSKGTLKSHKLLHTADGKQFKCTVCDYTAAQKPQLLRHMEQHVSFKPFRCAHCHYSCNISGSLKRHYNRKHPNEEYANVGTGELAAEVLIQQGGLKCPVCSFVYGTKWEFNRHLKNKHGLKVVEIDGDPKWEVTEEEPSSNHTVMIQETVQQASVELAEQHHLVVSSDDVEGIETVTVYTQGGEASEFIVYVQEAMQPVEEQAVEQPAQEL

SEQ ID NO: 70070 - protein, 121 aa, Homo sapiens
MKSRFSTIDLRAVLAELNASLLGMRVNNVYDVDNKTYLIRLQKPDFKATLLLESGIRIHTTEFEWPKNMMPSSFAMKCRKHLKSRRLVSAKQLGVDRIVDFQFGSDEAAYHLIIELYDRVS

SEQ ID NO: 70071 - protein, 153 aa, Homo sapiens
SRDSESHRSPSAALLLCSRVRERSEREQRMQAQWEREERERLEIARERLAFQRQRLERERMERERLERERMHVEHERRREQERIHREREELRRQQELRYEQERRPAVRRPYDLDRRDDAYWPEAKRAALDERYHSDFNRQDRFHDFDHRDRGR

SEQ ID NO: 70072 - protein, 158 aa, Homo sapiens
MSNVSGILETAGVPLVSANWPQPSPPPAVPAGPQMDHMGNSSQGAPWLFLTSALARGVSGIFVWTALVLTCHQIYLHLRSYTVPQEQRYIIRLLLIVPIYAFDSWLSLLLLGDHQYYVYFDSVRDCYEAFVIYSFLSLCFQYLGGEGAIMAEIRGKPI

SEQ ID NO: 70073 - protein, 185 aa, Homo sapiens
MGATGAAEPLQSVLWVKQQRCAVSLEPARALLRWWRSPGPGAGAPGADACSVPVSEIIAVEETDVHGKHQGSGKWQKMEKPYAFTVHCVKRARRHRWKWAQVTFWCPEEQLCHLWLQTLREMLEKLTSRPKHLLVFINPFGGKGQGKRIYERKVAPLFTLASITTDIIASSVSAEMVCSARCCTV

SEQ ID NO: 70074 - protein, 4634 aa, Homo sapiens
MMMCAATASPAAASSGLGGDGFYPAATFSSSPAPGALFMPVPDGSVAAAGLGLGLPAADSRGHYQLLLSGRALADRYRRIYTAALNDRDQGGGSAGHPASRNKKILNKKKLKRKQKSKSKVKTRSKSENLENTVIIPDIKLHSNPSAFNIYCNVRHCVLEWQKKEISLAAASKNSVQSGESDSDEEEESKEPPIKLPKIIEVGLCEVFELIKETRFSHPSLCLRSLQALLNVLQGQQPEGLQSEPPEVLESLFQLLLEITVRSTGMNDSTGQSLTALSCACLFSLVASWGETGRTLQAISAILTNNGSHACQTIQVPTILNSLQRSVQAVLVGKIQIQDWFSNGIKKAALMHKWPLKEISVDEDDQCLLQNDGFFLYLLCKDGLYKIGSGYSGTVRGHIYNSTSRIRNRKEKKSWLGYAQGYLLYRDVNNHSMTAIRISPETLEQDGTVMLPDCHTEGQNILFTDGEYINQIAASRDDGFVVRIFATSTEPVLQQELQLKLARKCLHACGISLFDLEKDLHIISTGFDEESAILGAGREFALMKTANGKIYYTGKYQSLGIKQGGPSAGKWVELPITKSPKIVHFSVGHDGSHALLVAEDGSIFFTGSASKGEDGESTKSRRQSKPYKPKKIIKMEGKIVVYTACNNGSSSVISKDGELYMFGKDAIYSDSSSLVTDLKGHFVTQVAMGKAHTCVLMKNGEVWTFGVNNKGQCGRDTGAMNQGGKGFGVENMATAMDEDLEEELDEKDEKSMMCPPGMHKWKLEQCMVCTVCGDCTGYGASCVSSGRPDRVPGGICGCGSGESGCAVCGCCKACARELDGQEARQRGILDAVKEMIPLDLLLAVPVPGVNIEEHLQLRQEEKRQRVIRRHRLEEGRGPLVFAGPIFMNHREQALARLRSHPAQLKHKRDKHKDGSGERGEKDASKITTYPPGSVRFDCELRAVQVSCGFHHSVVLMENGDVYTFGYGQHGQLGHGDVNSRGCPTLVQALPGPSTQVTAGSNHTAVLLMDGQVFTFGSFSKGQLGRPILDVPYWNAKPAPMPNIGSKYGRKATWIGASGDQTFLRIDEALINSHVLATSEIFASKHIIGLVPASISEPPPFKCLLINKVDGSCKTFNDSEQEDLQGFGVCLDPVYDVIWRFRPNTRELWCYNAVVADARLPSAADMQSRCSILSPELALPTGSRALTTRSHAALHILGCLDTLAAMQDLKMGVASTEEETQAVMKVYSKEDYSVVNRFESHGGGWGYSAHSVEAIRFSADTDILLGGLGLFGGRGEYTAKIKLFELGPDGGDHETDGDLLAETDVLAYDCAAREKYAMMFDEPVLLQAGWWYVAWARVSGPSSDCGSHGQASITTDDGVVFQFKSSKKSNNGTDVNAGQIPQLLYRLPTSDGSASKGKQQTSEPVHILKRSFARTVSVECFESLLSILHWSWTTLVLGVEELRGLKGFQFTATLLDLERLRFVGTCCLRLLRVYTCEIYPVSATGKAVVEETSKLAECIGKTRTLLRKILSEGVDHCMVKLDNDPQGYLSQPLSLLEAVLQECHNTFTACFHSFYPTPALQWACLCDLLNCLDQDIQEANFKTSSSRLLAAVMSALCHTSVKLTSIFPIAYDGEVLLRSIVKQVSTENDSTLVHRFPLLVAHMEKLSQSEENISGMTSFREVLEKMLVIVVLPVRNSLRRENELFSSHLVSNTCGLLASIVSELTASALGSEVDGLNSLHSVKASANRFTKTSQGRSWNTGNGSPDAICFSVDKPGIVVVGFSVYGGGGIHEYELEVLVDDSEHAGDSTHSHRWTSLELVKGTYTTDDSPSDIAEIRLDKVVPLKENVKYAVRLRNYGSRTANGDGGMTTVQCPDGVTFTFSTCSLSSNGTNQTRGQIPQILYYRSEFDGDLQSQLLSKANEEDKNCSRALSVVSTVVRASKDLLHRALAVDADDIPELLSSSSLFSMLLPLIIAYIGPVAAAIPKVAVEVFGLVQQLLPSVAILNQKYAPPAFNPNQSTDSTTGNQPEQGLSACTTSSHYAVIESEHPYKPACVMHYKVTFPECVRWMTIEFDPQCGTAQSEDVLRLLIPVRTVQNSGYGPKLTSVHENLNSWIELKKFSGSSGWPTMVLVLPGNEALFSLETASDYVKDDKASFYGFKCFAIGYEFSPGPDEGVIQLEKELANLGGVCAAALMKKDLALPIGNELEEDLEILEEAALQVCKTHSGILGKGLALSHSPTILEALEGNLPLQIQSNEQSFLDDFIACVPGSSGGRLARWLQPDSYADPQKTSLILNKDDIRCGWPTTITVQTKDQYGDVVHVPNMKVEVKAVPVSQKKMSLQQDQAKKPQRIPGSPAVTAASSNTDMTYGGLASPKLDVSYEPMIVKEARYIAITMMKVYENYSFEELRFASPTPKRPSENMLIRVNNDGTYCANWTPGAIGLYTLHVTIDGIEIDAGLEVKVKDPPKGMIPPGTQLVKPKSEPQPNKVRKFVAKDSAGLRIRSHPSLQSEQIGIVKVNGTITFIDEIHNDDGVWLRLNDETIKKYVPNMNGYTEAWCLSFNQHLGKSLLVPVDVTNSEGTWVQLDQNSMVEFCESDEGEAWSLARDRGGNQYLRHEDEQALLDQNSQTPPPSPFSVQAFNKGASCSAQGFDYGLGNSKESPSRNLASRERIYKNYGVAGPASALSSLSHKLKGDRGNISTSSKPASTSGKSELSSKHSRSLKPDGRMSRTTADQKKPRGTESLSASESLILKSDAAKLRSDSHSRSLSPNHNTLQTLKSDGRMPSSSRAESPGPGSRLSSPKPKTLPANRSSPSGASSPRSSSPHDKNLPQKSTAPVKTKLDPPRERSKSDSYTLDPDTLRKKKMPLTEPLRGRSTSPKPKSVPKDSTDSPGSENRAPSPHVVQENLHSEVVEVCTSSTLKTNSLTDSTCDDSSEFKSVDEGSNKVHFSIGKAPLKDEQEMRASPKISRKCANRHTRPKKEKSSFLFKGDGSKPLEPAKQAMSPSVAECARAVFASFLWHEGIVHDAMACSSFLKFHPELSKEHAPIRSSLNSQQPTEEKETKLKNRHSLEISSALNMFNIAPHGPDISKMGSINKNKVLSMLKEPPLHEKCEDGKTETTFEMSMHNTMKSKSPLPLTLQHLVAFWEDISLATIKAASQNMIFPSPGSCAVLKKKECEKENKKSKKEKKKKEKAEVRPRGNLFGEMAQLAVGGPEKDTICELCGESHPYPVTYHMRQAHPGCGRYAGGQGYNSIGHFCGGWAGNCGDGGIGGSTWYLVCDRCREKYLREKQAAAREKVKQSRRKPMQVKTPRALPTMEAHQVIKANALFLLSLSSAAEPSILCYHPAKPFQSQLPSVKEGISEDLPVKMPCLYLQTLARHHHENFVGYQDDNLFQDEMRYLRSTSVPAPYISVTPDASPNVFEEPESNMKSMPPSLETSPITDTDLAKRTVFQRSYSVVASEYDKQHSILPARVKAIPRRRVNSGDTEVGSSLLRHPSPELSRLISAHSSLSKGERNFQWPVLAFVIQHHDLEGLEIAMKQALRKSACRVFAMEAFNWLLCNVIQTTSLHDILWHFVASLTPAPVEPEEEEDEENKTSKENSEQEKDTRVCEHPLSDIVIAGEAAHPLPHTFHRLLQTISDLMMSLPSGSSLQQMALRCWSLKFKQSDHQFLHQSNVFHHINNILSKSDDGDSEESFSISIQSGFEAMSQELCIVMCLKDLTSIVDIKTSSRPAMIGSLTDGSTETFWESGDEDKNKTKNITINCVKGINARYVSVHVDNSRDLGNKVTSMTFLTGKAVEDLCRIKQVDLDSRHIGWVTSELPGGDNHIIKIELKGPENTLRVRQVKVLGWKDGESTKIAGQISASVAQQRNCEAETLRVFRLITSQVFGKLISGDAEPTPEQEEKALLSSPEGEEKATSDADLKEHMVGIIFSRSKLTNLQKQVCAHIVQAIRMEATRVREEWEHAISSKENANSQPNDEDASSDAYCFELLSMVLALSGSNVGRQYLAQQLTLLQDLFSLLHTASPRVQRQVTSLLRRVLPEVTPSRLASIIGVKSLPPADISDIIHSTEKGDWNKLGILDMFLGCIAKALTVQLKAKGTTITGTAGTTVGKGVTTVTLPMIFNSSYLRRGESHWWMKGSTPTQISEIIIKLIKDMAAGHLSEAWSRVTKNAIAETIIALTKMEEEFRSPVRCIATTRLWLALASLCVLDQDHVDRLSSGRWMGKDGQQKQMPMCDNHDDGETAAIILCNVCGNLCTDCDRFLHLHRRTKTHQRQVFKEEEEAIKVDLHEGCGRTKLFWLMALADSKTMKAMVEFREHTGKPTTSSSEACRFCGSRSGTELSAVGSVCSDADCQEYAKIACSKTHPCGHPCGGVKNEEHCLPCLHGCDKSATSLKQDADDMCMICFTEALSAAPAIQLDCSHIFHLQCCRRVLENRWLGPRITFGFISCPICKNKINHIVLKDLLDPIKELYEDVRRKALMRLEYEGLHKSEAITTPGVRFYNDPAGYAMNRYAYYVCYKCRKAYFGGEARCDAEAGRGDDYDPRELICGACSDVSRAQMCPKHGTDFLEYKCRYCCSVAVFFCFGTTHFCNACHDDFQRMTSIPKEELPHCPAGPKGKQLEGTECPLHVVHPPTGEEFALGCGVCRNAHTF

SEQ ID NO: 70075 - protein, 12 aa, Homo sapiens
MSQEPLSFKDVA

SEQ ID NO: 70076 - protein, 165 aa, Homo sapiens
MAEAITYADLRFVKAPLKKSISSRLGQDPGADDDGEITYENVQVPAVLGVPSSLASSVLGDKAAVKSEQPTASWRAVTSPAVGRILPCRTTCLRYLLLGLLLTCLLLGVTAICLGVRYLQVSQQLQQTNRVLEVTNSSLRQQLRLKITQLGQSAEDLQGSRRELA

SEQ ID NO: 70077 - protein, 68 aa, Homo sapiens
MDLQAAGAQAQGAAEPSRGPPLPSARGAPPSPEPVEHRAFLMTVLPGVRAPILKRKALPWMRRTLMEN

SEQ ID NO: 70078 - protein, 287 aa, Homo sapiens
GTGCNHELEMIRQKLQCVASKLQVLPQKASERLQFETADDEDFIWVQENIDEIILQLQKLTGQQGEEPSLVSPSTSCGSLTERLLRQNAELTGHISQLTEEKNDLRNMVMKLEEQIRWYRQTGAGRDNSSRFSLNGGANIEAIIASEKEVWNREKLTLQKSLKRAEAEVYKLKAELRNDSLLQTLSPDSEHVTLKRIYGKYLRAESFRKALIYQKKYLLLLLGGFQECEDATLALLARMGGQPAFTDLEVITNRPKGFTRFRSAVRVSIAISRFNYSISCWHEKIIL

SEQ ID NO: 70079 - protein, 137 aa, Homo sapiens
  MOD_RES (1)..(1): Any amino acid
XCHLCDRSFTEKWALNNHMKLHTGEKPFKCTWPTCHYSFLTASAMKDHYRTHTGEKSFLCDLCGFAGGTRHALTKHRRQHTGEKPFKCDECNFASTTQSHLTRHKRVHTGEKPYRCPWCDYSFFVSTYSEILPVWSL

SEQ ID NO: 70080 - protein, 39 aa, Homo sapiens
MRRSKAYGERYLASVQGSAPSPGKYKRVCKQLSLSCQKK

SEQ ID NO: 70081 - protein, 611 aa, Homo sapiens
MDPGAGSETSLTVNEQVIVMSGHETIRVLEVGVDAQLPAEEESKGLEGVAAEGSQSGDPAEASQAAGEAGPDNLGSSAEATVKSPPGIPPSPATAIATFSQAPSQPQASQTLTPLAVQAAPQVLTQENLATVLTGVMVPAGAVTQPLLIPISIAGQVAGQQGLAVWTIPTATVAALPGLTAASPTGGVFKPPLAGLQAAAVLNTALPAPVQAAAPVQASSTAQPRPPAQPQTLFQTQPLLQTTPAILPQPTAATAAAPTPKPVDTPPQITVQPAGFAFSPGIISAASLGGQTQILGSLTTAPVITSAIPSMPGISSQILTNAQGQVIGTLPWVVNSASVAAPAPAQSLQVQAVTPQLLLNAQGQVIATLASSPLPPPVAVRKPSTPESPAKSEVQPIQPTPTVPQPAVVIASPAPAAKPSASAPIPITCSETPTVSQLVSKPHTPSLDEDGINLEEIREFAKNFKIRRLSLGLTQTQVGQALTATEGPAYSQSAICRFEKLDITPKSAQKLKPVLEKWLNEAELRNQEGQQNLMEFVGGEPSKKRKRRTSFTPQAIEALNAYFEKNPLPTGQEITEIAKELNYDREVVRVWFCNRRQTLKNTSKLNVFQIP

SEQ ID NO: 70082 - protein, 264 aa, Homo sapiens
MVGALCGCWFRLGGARPLIPLGPLTTRSAMTSKGPEEEHPSVTLFRQYLRIRTVQPKPDYGAAVAFFEETARQLGLGCQKVEVAPGYVVTVLTWPGTNPTLSSILLNSHTDVVPVFKEHWSHDPFEAFKDSEGYIYARGAQDMKCVSIQYLEAVRRLKVEGHRFPRTIHMTFVPDEEVGGHQGMELFVQRPEFHALRAGFALDEGIANPTDAFTVFYSERSPWWVRVTSTGRPGHASRFMEDTAAEKLHKVVNSILAFREKEWQ

SEQ ID NO: 70083 - protein, 815 aa, Homo sapiens
MGPERTGAAPLPLLLVLALSQGILNCCLAYNVGLPEAKIFSGPSSEQFGYAVQQFINPKGNWLLVGSPWSGFPENRMGDVYKCPVDLSTATCEKLNLQTSTSIPNVTEMKTNMSLGLILTRNMGTGGFLTCGPLWAQQCGNQYYTTGVCSDISPDFQLSASFSPATQPCPSLIDVVVVCDESNSIYPWDAVKNFLEKFVQGLDIGPTKTQVGLIQYANNPRVVFNLNTYKTKEEMIVATSQTSQYGGDLTNTFGAIQYARKYAYSAASGGRRSATKVMVVVTDGESHDGSMLKAVIDQCNHDNILRFGIAVLGYLNRNALDTKNLIKEIKAIASIPTERYFFNVSDEAALLEKAGTLGEQIFSIEGTVQGGDNFQMEMSQVGFSADYSSQNDILMLGAVGAFGWSGTIVQKTSHGHLIFPKQAFDQILQDRNHSSYLGYSVAAISTGESTHFVAGAPRANYTGQIVLYSVNENGNITVIQAHRGDQIGSYFGSVLCSVDVDKDTITDVLLVGAPMYMSDLKKEEGRVYLFTIKEGILGQHQFLEGPEGIENTRFGSAIAALSDINMDGFNDVIVGSPLENQNSGAVYIYNGHQGTIRTKYSQKILGSDGAFRSHLQYFGRSLDGYGDLNGDSITDVSIGAFGQVVQLWSQSIADVAIEASFTPEKITLVNKNAQIILKLCFSAKFRPTKQNNQVAIVYNITLDADGFSSRVTSRGLFKENNERCLQKNMVVNQAQSCPEHIIYIQEPSDVVNSLDLRVDISLENPGTSPALEAYSETAKVFSIPFHKDCGEDGLCISDLVLDVRQIPAAQLMGQK

SEQ ID NO: 70084 - protein, 78 aa, Homo sapiens
MGEIIMGNIELTRYTRPTPVQKHAIPIIKEKRDLMACAQTGKWKVWAPQTIPNLLGISTNERVGSTDLRGSQKIFIPI

SEQ ID NO: 70085 - protein, 81 aa, Homo sapiens
MTAALAVVTTSGLEDGVPRSRGEGTGEVVLERGPGAAYHMFVVMEDLVEKLKLLRYEEEFLRKSNLKAPSREELQIFLLQN

SEQ ID NO: 70086 - protein, 110 aa, Homo sapiens
MSDKSELKAELERKKQRLAQIREEKKRKEEERKKKETDQKKEAVAPVQEESDLEKKRREAEALLQSMGLTPESPIVPPPMSPSSKSVSTPSEAGSQDSGDGAVGSRTLHW

SEQ ID NO: 70087 - protein, 40 aa, Homo sapiens
MSFLVSKPERIRRWVSEKFIVEGLRDLELFGGESPKSREQ

SEQ ID NO: 70088 - protein, 171 aa, Homo sapiens
MNGRADFREPNAEVPRPIPHIGPDYIPTEEERRVFAECNDESFWFRSVPLAATSMLITQGLISKGILSSHPKYGSIPKLILACIMGYFAGKLSYVKTCQEKFKKLENSPLGEALRSGQARRSSPPGHYYQKSKYDSSVSGQSSFVTSPAADNIEMLPHYEPIPFSSSMNES

SEQ ID NO: 70089 - protein, 76 aa, Homo sapiens
MQFRLFSFALIILNCMDYSHCQGNRWRRSKRASYVSNPICKGCLSCSKDNGCSRCQQKLFFFLRREGMRQYGECLH

SEQ ID NO: 70090 - protein, 170 aa, Homo sapiens
MSMAVETFGFFMATVGLLMLGVTLPNSYWRVSTVHGNVITTNTIFENLWFSCATDSLGVYNCWEFPSMLALSGIAGLRCTNIGGLELSRKAKLAATAGALHILAGICGMVAISWYAFNITRDFFDPLYPGTKYELGPALYLGWSASLISILGGLCLCSACCCGSDEDPAA

SEQ ID NO: 70091 - protein, 61 aa, Homo sapiens
MAKPKLPSKTSGTTRIGLERSFIQCMGLVKELLIYSIQTSSLPVNGLWRSTLSYRNLEKQM

SEQ ID NO: 70092 - protein, 110 aa, Homo sapiens
MTTSHQPQDRYKAVWLIFFMLGLGTLLPWNFFMTATQYFTNRLDMSQNVSLVTAELSKDAQASAAPAAPLPERNSLSAIFNNVMTLCAMLPLLLFTYLNSFLHQRIPQSV

SEQ ID NO: 70093 - protein, 4400 aa, Homo sapiens; identical to SEQ ID NO: 24944

SEQ ID NO: 70094 - protein, 203 aa, Homo sapiens
MSDSEMDGRTHIPSLLNALLSRNRVMQMSYLKSKEQGYGKLSSDEDLEIIVDQKQGKGSRAADKAVAMVMKEIPREESAEEKPLLTMTSQLVNEQQESRPLLSPSIDDFLCETKSEAIARPVTSNTAVLTTGLDLLDLSEPVSQTQTKAKKSEPSSKTSSLKKKADGSDLISTDAEQRGQPLRVPETSSLDLDIQTQLEKWDD

SEQ ID NO: 70095 - protein, 93 aa, Homo sapiens
DMDMADYSAALDPAYTTLEFENVQVLTMGNDTSPSEGTNLNAPNSLGVSALCAICGDRATGKHYGASSCDGCKGFFRRSVRKNHMYSCSPPQI

SEQ ID NO: 70096 - protein, 122 aa, Homo sapiens
  MOD_RES (1)..(1): Any amino acid
XKRDGTEVTERIVTETVTTRLTSLPPKGGTSNGYAKTASLGGGSRLEKQSLTHGSSGYINSTGSTRGHASTSSYRRAHSPASTLPNSPGSTFERKTHVTRHAYEGSSSGNSSPEYPRKEFAY

SEQ ID NO: 70097 - protein, 54 aa, Homo sapiens
MAVYVGMLRLGRLCAGSSGVLGARAALSRSWQEARLQGVRFLRPSGEKLAHQGV

SEQ ID NO: 70098 - protein, 44 aa, Homo sapiens
MNVIYPLAVPKGRRLCCEVCEAPAERVCAACTVTYYWSGPNRSG

SEQ ID NO: 70099 - protein, 142 aa, Homo sapiens
ASQAAAAAAAMSSIASSQAFGNALSSLQGVTGQLVTNAQGQIIGTIPLMPNPGPSSQAASGTQGLQVQPITPQLLTNAQGQIIATVIGNQILPVINTQGITLSPIKPGQQILKRQRVRWMGLIWRRSENLPKLLKSGACPLA

SEQ ID NO: 70100 - protein, 650 aa, Homo sapiens
EGGERPREQRESPGPEQGPDSPGQRETSPKPEPPSERGDSAGERGPESPRHRGEGGGEWGPGVPRERRESAGEWGADTPKEGGESAGEWGAEVPRGRGEGAGEWGPDTPKERGQGVREWGPEIPQEHGEATRDWALESPRALGEDARELGSSPHDRGASPRDLSGESPCTQRSGLLPERRGDSPWPPWPSPQERDAGTRDREESPRDWGGAESPRGWEAGPREWGPSPSGHGDGPRRRPRKRRGRKGRMGRQHEAAATAATAATATGGTAEEAGASAPESQAGGGPRGRARGPRQQGRRRHGTQRRRGPPQAREEGPRDATTILGLGTPSGEQRADQSQALPALAGAAAAHAHAIPGAGPAAAPVGGRGRRGGWRGGRRGGSAGAGGGGRGGRGRGRGGGRGGGGAGRGGGAAGPREGASSPGARRGEQRRRGRGPPAAGAAQVSARGRRARGQRAGEEAQDGLLPRGRDRLPLRPGDANQRAERPGPPRGGHGPVNASSAPDTSPPRHPRRWVSQQRQRLWRQFRVGGGFPPPPPSRPPAVLLPLLRLACAGDPGATRPGPRRPARRPRGELIPRRPDPAAPSEEGLRMESSVDDGATATTADAASGEAPEAGPSPSHSPTMCQTGGPGPPPPSPPDGSPDPPDPLGAK

SEQ ID NO: 70101 - protein, 87 aa, Homo sapiens
MAAAVPDEAVARDVQRLLVQFQDEGGQLLGSPFDVPVDITPDRLQLVCNALLAQVPGQWLWRHHRALLGSQHRDTTFHMQGTQTLGP

SEQ ID NO: 70102 - protein, 280 aa, Homo sapiens
MTEDYAGRYRCYYRSPVGWSQPSDPLELVMTGAYSKPTLSALPSPLVTSGKSVTLLCQSRSPMDTFLLIKERAAHPLLHLRSEHGAQQHQAEFPMSPVTSVHGGTYRCFSSHGFSHYLLSHPSDPLELIVSGSLEDPRPSPTRSVSTAAGPEDQPLMPTGSVPHSGLRRHWEVLIGVLVVSILLLSLLLFLLLQHWRQGKHRTLAQRQADFQRPPGAAEPEPKDGGLQRRSSPAADVQGENFCAAVKNTQPEDGVEMDTRSPHDEDPQAVTYAKVKHSRP

SEQ ID NO: 70103 - protein, 121 aa, Homo sapiens
  MOD_RES (1)..(1): Any amino acid
XNWPFLEGCACTPERMAEAGFIHCPTENEPDLAQCFFCFKELEGWEPDDDPIGPGTVAYACNTSTLGGRGGRITREEHKKHSSGCAFLSVKKQFEELTLGEFLKLDRERAKNKIERALLAE

SEQ ID NO: 70104 - protein, 76 aa, Homo sapiens
  MOD_RES (1)..(1): Any amino acid
XEDLRWWRSTHGPGMAMNWPQFEEWSLDTQRTISRKEKGGRSPDEVTLTSIVPTRDGTAPPPQSPGSPGGGAAEDE

SEQ ID NO: 70105 - protein, 249 aa, Homo sapiens
MANLGCWMLVLFVATWSDLGLCKKRPKPGGWNTGGSRYPGQGSPGGNRYPPQGGGGWGQPHGGGWGQPHGGGWGQPHGGGWGQPHGGGWGQGGGTHSQWNKPSKPKTNMKHMAGAAAAGAVVGGLGGYMLGSAMSRPIIHFGSDYEDRYYRENMHRYPNQVYYRPMDEYSNQNNFVHDCVNITIKQHTVTTTTKGENFTETDVKMMERVVEQMCITQYERESQAYYQRGSSMVLFSSPPVILLISFLIF

SEQ ID NO: 70106 - protein, 252 aa, Homo sapiens
  MOD_RES (1)..(1): Any amino acid
XKSHRDPYATSVGHLIEKATFAGVQTEDWGQFMHICDIINTTQDGPKDAVKALKKRISKNYNHKEIQLTLSTWSQGFPGGVDVSEVKEVYLDLVKKGVQFPPSEAEAETARQETAQISSNPPTSVPTAPALSSVIAPKNSTVTLVPEQIGKLHSELDMVKMNVRVMSAILMENTPGSENHEDIELLQKLYKTGREMQERIMDLLVVVENEDVTVELIQVNEDLNNAILGYERFTRNQQRILEQNKNQKEATN

SEQ ID NO: 70107 - protein, 546 aa, Homo sapiens
LDSDFGESGRLTYEIVDGNDDHLFEIDPSSGEIRTLHPFWEDVTPVVELVVKVTDHGKPTLSAVAKLIIRSVSGSLPEGVPRVNGEQHHWDMSLPLIVTLSTISIILLAAMITIAVKCKRENKEIRTYNCRIAEYSHPQLGGGKGKKKKINKNDIMLVQSEVEERNAMNVMNVVSSPSLATSPMYFDYQTRLPLSSPRSEVMYLKPASNNLTVPQGHAGCHTSFTGQGTNASETPATRMSIIQTDNFPAEPNYMGSRQQFVQSSTFKDPERASLRDSGHGDSDQADSDQDTNKGSCCDMSVREALKMKTTSTKSQPLEQEPEECVNCTDECRVLGHSDRCWMPQFPAANQAENADYRTNLFVPTVEANVETETYETVNPTGKKTFCTFGKDKREHTILIANVKPYLKAKRALSPLLQEVPSASSSPTKACIEPCTSTKGSLDGCEAKPGALAEASSQYLPTDSQYLSPSKQPRDPPFMASDQMARVFADVHSRASRDSSEMGAVLEQLDHPNRDLGRESVDAEEVVREIDKLLQDCRGNDPVAVRK

SEQ ID NO: 70108 - protein, 255 aa, Homo sapiens
MEAAAAGHEIIVQYFLNHGVKVDARDHSGATARMLAKQYGHMKIVALMDTYSPSLPKSLYRSPEKYEDLSSSDESCPAPQRQRPCRKKGVSIHEGPRALARITGIGLGGRAPRPRYEQAPPRGYVTFNSSGENPLEEEGLCCRDVTSPINERDVESSSSSSSREEHAFCANLGPVQSSSSSEGLARAQGLSSEASVESNEDSDHACKSSARKQAKSYMKTKNPDSQWPPRAATDREGFLAESSPQTQRAPYSGPQ

SEQ ID NO: 70109 - protein, 448 aa, Homo sapiens
MSSCRGQKVAGGLRVVSPFPLCQPAGEPSQGKMRSSCVLLTALVALAAYYVYIPLPGSVSDPWKLMLLDATFRGAQQVSNLIHYLGLSHHLLALNFIIVSFGKKSAWSSAQVKVTDTDFDGVEVRVFEGPPKPEEPLKRSVVYIHGGGWALASASASWSPSDEIRYYDELCTAMAEELNAVIVSIEYRLVPKVYFPEQIHDVVRATKYFLKPEVLQKYMVDPGRICISGDSAGGNLAAALGQQFTQDASLKNKLKLQALIYPVLQALDFNTPSYQQNVNTPILPRYVMVKYWVDYFKGNYDFVQAMIVNNHTSLDVEEAAAVRARLNWTSLLPASFTKNYKPVVQTTGNARIVQELPQLLDARSAPLIADQAVLQLLPKTYILTCEHDVLRDDGIMYAKRLESAGVEVTLDHFEDGFHGCMIFTSWPTNFSVGIRTRNSYIKWLDQNL

SEQ ID NO: 70110 - protein, 367 aa, Homo sapiens
MSWPCDSVINQDHKTKEKNICFQKASFKMSTVHEILCKLSLEGDHSTPPSAYGSVKAYTNFDAERDALNIETAIKTKGVDEVTIVNILTNRSNAQRQDIAFAYQRRTKKELASALKSALSGHLETVILGLLKTPAQYDASELKASMKGLGTDEDSLIEIICSRTNQELQEINRVYKEMYKTDLEKDIISDTSGDFRKLMVALAKGRRAEDGSVIDYELIDQDARDLYDAGVKRKGTDVPKWISIMTERSVPHLQKVFDRYKSYSPYDMLESIRKEVKGDLENAFLNLVQCIQNKPLYFADRLYDSMKGKGTRDKVLIRIMVSRSEVDMLKIRSEFKRKYGKSLYYYIQQDTKGDYQKALLYLCGGDD

SEQ ID NO: 70111 - protein, 837 aa, Homo sapiens
VPGRRGRRDGEVDATASSIPELERQIEKLSKRQLFFRKKLLHSSQMLRAVSLGQDRYRRRYWVLPYLAGIFVEGTEGNLVPEEVIKKETDSLKVAAHASLNPALFSMKMELAGSNTTASSPARARGRPRKTKPGSMQPRHLKSPVRGQDSEQPQAQLQPEAQLHAPAQPQPQLQLQLQSHKGFLEQEGSPLSLGQSQHDLSQSAFLSWLSQTQSHSSLLSSSVLTPDSSPGKLDPAPSQPPEEPEPDEAESSPDPQALWFNISAQMPCNAAPTPPPAVSEDQPTPSPQQLASSKPMNRPSAANPCSPVQFSSTPLAGLAPKRRAGDPGEMPQSPTGLGQPKRRGRPPSKFFKQMEQRYLTQLTAQPVPPGWWWIRDPEMLDAMLKALHPRGIREKALHKHLNKHRDFLQEVCLRPSADPIFEPRQLPAFQEGIMSWSPKEKTYETDLAVLQWVEELEQRVIMSDLQIRGWTCPSPDSTREDLAYCEHLSDSQEDITWRGRGREGLAPQRKTTNPLDLAVMRLAALEQNVERRYLREPLWPTHEVVLEKALLSTPNGAPEGTTTEISYEITPRIRVWRQTLERCRSAAQVCLCLGQLERSIAWEKSVNKVTCLVCRKGDNDEFLLLCDGCDRGCHIYCHRPKMEAVPEGDWFCTVCLAQQVEGEFTQKPGFPKRGQKRKSGYSLNFSEGDGRRRRVLLRGRESPAAGPRYSEEGLSPSKRRRLSMRNHHSDLTFCEIILMEMESHDAAWPFLEPVNPRLVSGYRRIIKNPMDFSTMRERLLRGGYTSSEEFAADALLVFDNCQTFNEDDSEVGKAGHIMRRFFESRWEEFYQGKQANL

SEQ ID NO: 70112 - protein, 176 aa, Homo sapiens
MYFTEFPTAHVSFLPFRVDLSNVLDLHAFDSLSGISLQKKLQHVPGTQPHLDQSIVTITFEVPGNAKEEHLNMFIQNLLWEKNVRNKDNHCMEVIRLKGLVSIKDKSQQVIVQGVHELYDLEETPVSWKDDTERTNRLVLIGRNLDKDILKQLFIATVTETEKQWTTHFKEDQVCT

SEQ ID NO: 70113 - protein, 57 aa, Homo sapiens
  MOD_RES (1)..(1): Any amino acid
XQSHLQAKSLLPEKTVTRDVIGSRWLIKEELEEMLVEKLSDLDVQKSLRVCEMQSRE

SEQ ID NO: 70114 - protein, 465 aa, Homo sapiens
  MOD_RES (1)..(1): Any amino acid
XPTAAGKKTEKEESTEVLKAQSAGTVRSAAPPQEKKRKVEKDTMSDQALEALSASLGTRQAEPELDLRSIKEVDEAKAKEEKLEKCGEDDETIPSEYRLKPATDKDGKPLLPEPEEKPKPRSESELIDELSEDFDRSECKEKPSKPTEKTEESKAAAPAPVSEAVCRTSMCSIQSAPPEPATLKGTVPDDAVEALADSLGKKEADPEDGKPVMDKVKEKAKEEDREKLGEKEETIPPDYRLEEVKDKDGKPLLPKESKEQLPPMSEDFLLDALSEDFSGPQNASSLKFEDAKLAAAISEVVSQTPASTTQAGAPPRDTSSDKDLDDALDKLSDSLGQRQPDPDENKPMEDKVKEKAKAEHRDKLGERDDTIPPEYRHLLDDNGQDKPVKPPTKKSEDSKKPADDQDPIDALSGDLDSCPSTTETSQNTAKDKCKKAASSSKAPKNGGKAKDSAKTTEETSKPKDD

SEQ ID NO: 70115 - protein, 829 aa, Homo sapiens
MLRRRAQEEDSTVLIDVSPPEAEKRGSYGSTAHASEPGGQQAAACRAGSPAKPRIDFVLVWEEDLKLDRQQDSAARDRTDMHRTWRETFLDNLRAAGLCVDQQDVQDGNTTVHYALLSASWAVLCYYAEDLRLKLPLQELPNQASNWSAGLLAWLGIPNVLLEVVPDVPPEYYSCRFRVNKLPRFLGSDNQDTFFTSTKRHQILFEILAKTPYGHEKKNLLGIHQLLAEGVLSAAFPLHDGPFKTPPEGPQAPRLNQRQVLFQHWARWGKWNKYQPLDHVRRYFGEKVALYFAWLGFYTGWLLPAAVVGTLVFLVGCFLVFSDIPTQELCGSKDSFEMCPLCLDCPFWLLSSACALAQAGRLFDHGGTVFFSLFMALWAVLLLEYWKRKSATLAYRWDCSDYEDTEERPRPQFAASAPMTAPNPITGEDEPYFPERSRARRMLAGSVVIVVMVAVVVMCLVSIILYRAIMAIVVSRSGNTLLAAWASRIASLTGSVVNLVFILILSKIYVSLAHVLTRWEMHRTQTKFEDAFTLKVFIFQFVNFYSSPVYIAFFKGRFVGYPGNYHTLFGVRNEECAAGGCLIELAQELLVIMVGKQVINNMQEVLIPKLKGWWQKFRLRSKKRKAGASAGASQGPWEDDYELVPCEGLFDEYLEMVLQFGFVTIFVAACPLAPLFALLNNWVEIRLDARKFVCEYRRPVAERAQDIGIWFHILAGLTHLAVISNAFLLAFSSDFLPRAYYRWTRAHDLRGFLNFTLARAPSSFAAAHNRTCRYRAFRDDDGHYSQTYWNLLAIRLAFVIVFEVAEAPAGSPIHGMRPRPCALPNSSTW

SEQ ID NO: 70116 - protein, 150 aa, Homo sapiens
MAPRKGKEKKEEQVISLGPQVAEGENVFGVCHIFASFNDTFVHVTDLSGKETICRVTGGMKVKADRDESSPYAAMLAAQDVAQRCKELGITALHIKLRATGGNRTKTPGPGAQSALRALARSGMKIGRIEDVTPIPSDSTRRKGGRRGRR

SEQ ID NO: 70117 - protein, 545 aa, Homo sapiens
MSGNWVHPGQILIWAIWVLAAPTKGPSAEGPQRNTRLGWIQGKQVTVLGSPVPVNVFLGVPFAAPPLGSLRFTNPQPASPWDNLREATSYPNLCLQNSEWLLLDQHMLKVLVWFPGGAFKTGSASIFDGSALAAYEDVLVVVVQYRLGIFGFFTTWDQHAPGNWAFKDQVAALSWVQKNIEFFGGDPSSVTIFGESAGAISVSSLILSPMAKGLFHKAIMESGVAIIPYLEAHDYEKSEDLQVVAHFCGNNASDSEALLRCLRTKPSKELLTLSQKTKSFTRVVDGAFFPNEPLDLLSQKAFKAIPSIIGVNNHECGFLLPMKEAPEILSGSNKSLALHLIQNILHIPPQYLHLVANEYFHDKHSLTEIRDSLLDLLGDVFFVVPALITARYHRDAGAPVYFYEFRHRPQCFEDTKPAFVKADHADEVRFVFGGAFLKGDIVMFEGATEEEKLLSRKMMKYWATFARTGNPNGNDLSLWPAYNLTEQYLQLDLNMSLGQRLKEPRVEFWTSTIPLILSASDMLHSPLSSLTFLSLLQPFFFFCAP

SEQ ID NO: 70118 - protein, 118 aa, Homo sapiens
MLSARDRRDRHPEEGVVAELQGFAVDKAFLTSHKGILLETELYYQRFDRINWPCLDFLRCVSAIIIFLVVSFAAVTSRDGAAIAAFVFGIILVSIFAYDAFKIYRTEMAPGASQGDQQ

SEQ ID NO: 70119 - protein, 1197 aa, Homo sapiens
MANGGGGGGGSSGGGGGGGGSSLRMSSNIHANHLSLDASSSSSSSSSSSSSSSSSSSSSSVHEPKMDALIIPVTMEVPCDSRGQRMWWAFLASSMVTFFGGLFIILLWRTLKYLWTVCCHCGGKTKGRKPRLQGGVIGCMFHLQPREAQKSSSALEVHKKYGDSTGTTLEEAQKINNGSSQADGTLKPVDEKEEAVAAEVGWMTSVKDWAGVMISAQTLTGRVLVVLVFALSIGALVIYFIDSSNPIESCQNFYKDFTLQIDMAFNVFFLLYFGLRFIAANDKLWFWLEVNSVVDFFTVPPVFVSVYLNRSWLGLRFLRALRLIQFSEILQFLNILKTSNSIKLVNLLSIFISTWLTAAGFIHLVENSGDPWENFQNNQALTYWECVYLLMVTMSTVGYGDVYAKTTLGRLFMVFFILGGLAMFASYVPEIIELIGNRKKYGGSYSAVSGRKHIVVCGHITLESVSNFLKDFLHKDRDDVNVEIVFLHNISPNLELEALFKRHFTQVEFYQGSVLNPHDLARVKIESADACLILANKYCADPDAEDASNIMRVISIKNYHPKIRIITQMLQYHNKAHLLNIPSWNWKEGDDAICLAELKLGFIAQSCLAQGLSTMLANLFSMRSFIKIEEDTWQKYYLEGVSNEMYTEYLSSAFVGLSFPTVCELCFVKLKLLMIAIEYKSANRESRILINPGNHLKIQEGTLGFFIASDAKEVKRAFFYCKACHDDITDPKRIKKCGCKRLEDEQPSTLSPKKKQRNGGMRNSPNTSPKLMRHDPLLIPGNDQIDNMDSNVKKYDSTGMFHWCAPKEIEKVILTRSEAAMTVLSGHVVVCIFGDVSSALIGLRNLVMPLRASNFHYHELKHIVFVGSIEYLKREWETLHNFPKVSILPGTPLSRADLRAVNINLCDMCVILSANQNNIDDTSLQDKECILASLNIKSMQFDDSIGVLQANSQGFTPPGMDRSSPDNSPVHGMLRQPSITTGVNIPIITELVNDTNVQFLDQDDDDDPDTELYLTQPFACGTAFAVSVLDSLMSATYFNDNILTLIRTLVTGGATPELEALIAEENALRGGYSTPQTLANRDRCRVAQLALLDGPFADLGDGGCYGDLFCKALKTYNMLCFGIYRLRDAHLSTPSQCTKRYVITNPPYEFELVPTDLIFCLMQFDHNAGQSRASLSHSSHSSQSSSKKSSSVHSIPS

SEQ ID NO: 70120 - protein, 1275 aa, Homo sapiens
MLWRTERLYKPYVFFFKYTYAWVLLLPLLLTDNINVFLKACEQIGLKEAQLFHPGDLQDLSNRVTVKQEETDRRVKNVLITLYWLGRKAQSNPYYNGPHLNLKAFENLLGQALTKALEDSSFLKRSGRDSGYGDIWCPERGEFLAPPRHHKREDSFESLDSLGSRSLTSCSSDITLRGGREGFESDTDSEFTFKMQDYNKDDMSYRRISAVEPKTALPFNRFLPNKSRQPSYVPAPLRKKKPDKHEDNRRSWASPVYTEADGTFSRSKSMSDVSAEDVQNLRQLRYEEMQKIKSQLKEQDQKWQDDLAKWKDRRKSYTSDLQKKKEEREEIEKQALEKSKRSSKTFKEMLQDRESQNQKSTVPSRRRMYSFDDVLEEGKRPPTMTVSEASYQSERVEEKGATYPSEIPKEDSTTFAKREDRVTTEIQLPSQSPVEEQSPASLSSLRSRSTQMESTRVSASLPRSYRKTDTVRLTSVVTPRPFGSQTRGISSLPRSYTMDDAWKYNGDVEDIKRTPNNVVSTPAPSPDASQLASSLSSQKEVAATEEDVTRLPSPTSPFSSLSQDQAATSKATLSSTSGLDLMSESGEGEISPQREVSRSQDQFSDMRISINQTPGKSLDFGFTIKWDIPGIFVASVEAGSPAEFSQLQVDDEIIAINNTKFSYNDSKEWEEAMAKAQETGHLVMDVRRYGKADWGKDQPSLPFIRHKTLNLTSMATKIIGSPETKWIDATSGIYNSEKSSNLSVTTDFSESLQSSNIESKEINGIHDESNAFESKASESISLKNLKRRSQFFEQGSSDSVVPDLPVPTISAPSRWVWDQEEERKRQERWQKEQDRLLQEKYQREQEKLREEWQRAKQEAERENSKYLDEELMVLSSNSMSLTTREPSLATWEATWSEGSKSSDREGTRAGEEERRQPQEEVVHEDQGKKPQDQLVIERERKWEQQLQEEQEQKRLQAEAEEQKRPAEEQKRQAEIERETSVRIYQYRRPVDSYDIPKTEEASSGFLPGDRNKSRSTTELDDYSTNKNGNNKYLDQIGNMTSSQRRSKKEQVPSGAELERQQILQEMRKRTPLHNDNSWIRQRSASVNKEPVSLPGIMRRGESLDNLDSPRSNSWRQPPWLNQPTGFYASSSVQDFSRPPPQLVSTSNRAYMRNPSSSVPPPSAGSVKTSTTGVATTQSPTPRSHSPSASQSGSQLRNRSVSGKRICSYCNNILGKGAAMIIESLGLCYHLHCFKCVACECDLGGSSSGAEVRIRNHQLYCNDCYLRFKSGRPTAM

SEQ ID NO: 70121 - protein, 434 aa, Homo sapiens
MNVVFAVKQYISKMIEDSGPGMKVLLMDKETTGIVSMVYTQSEILQKEVYLFERIDSQNREIMKHLKAICFLRPTKENVDYIIQELRRPKYTIYFIYFSNVISKSDVKSLAEADEQEVVAEVQQVITKEYELFEFRRTEVPPLLLILDRCDDAITPLLNQWTYQAMVHELLGINNNRIDLSRVPGISKDLREVVLSAENDEFYANNMYLNFAEIGSNIKNLMEDFQKKKPKEQQKLESIADMKAFVENYPQFKKMSGTVSKHVTVVGELSRLVSERNLLEVSEVEQELACQNDHSSALQNIKRLLQNPKVTEFDAARLVMLYALHYERHSSNSLPGLMMDLRNKGVSEKYRKLVSAVVEYGGKRVRGSDLFSPKDAVAITKQFLKGLKGVENVYTQHQPFLHETLDHLIKGRLKENLYPYLGPSTLRDRIASCL

SEQ ID NO: 70122 - protein, 82 aa, Homo sapiens
MMPQEQYTHHRSTMPGSVGPQVYKVGIYGWRKRCLYFFVLLLMILILVNLAMTIWILKVMNFTISIHLLLRFNWLFRCCGMS

SEQ ID NO: 70123 - protein, 79 aa, Homo sapiens
MKRSGNPGAEVTNSSVAGPDCCGGLGNIDFRQADFCVMTRLLGYVDPLDPSFVAAVITITFNPLYWNVVITSGSSRRRE

SEQ ID NO: 70124 - protein, 811 aa, Homo sapiens
MREAAERRQQLQLEHDQALAVLSAKQQEIDLLQKAQVEAKKEHEGAVRLLENTLDSMQSKVRELEEKCRTQSEQFNLLSRDLEKFRQHAGKIDLLGGSAVAPLDISTAPSKPFPQFMNGLATSLGKGQESAIGGSSAIGEYIRPLPQPGDRPEPLSAKPTFLSRSGSARCRSESDMENERNSNTSKQRYSGKVHLCVARYSYNPFDGPNENPEAELPLTAGKYLYVYGDMDEDGFYEGELLDGQRGLVPSNFVDFVQDNESRLASTLGNEQDQNFINHSGIGLEGEHILDLHSPTHIDAGITDNSAGTLDVNIDDIGEDIVPYPRKITLIKQLAKSVIVGWEPPAVPPGWGTVSSYNVLVDKETRMNLTLGSRTKALIEKLNMAACTYRISVQCVTSRGSSDELQCTLLVGKDVVVAPSHLRVDNITQISAQLSWLPTNSNYSHVIFLNEEEFDIVKAARYKYQFFNLRPNMAYKVKVLAKPHQMPWQLPLEQREKKEAFVEFSTLPAGPPAPPQDVTVQAGVTPATIRVSWRPPVLTPTGLSNGANVTGYGVYAKGQRVAEVIFPTADSTAVELVRLRSLEAKGVTVRTLSAQGESVDSAVAAVPPELLVPPTPHPRPAPQSKPLASSGVPETKDEHLGPHARMDEAWEQSRAPGPVHGHMLEPPVGPGRRSPSPSRILPQPQGTPVSTTVAKAMAREAAQRVAESSRLEKRSVFLERSSAGQYAASDEEDAYDSPDFKRRGASVDDFLKGSELGKQPHCCHGDEYHTESSRGSDLSDIMEEDEEELYSEMQLEDGGRRRPSGTSHNALK

SEQ ID NO: 70125 - protein, 56 aa, Homo sapiens
ALTCLGASGSGSVWLELFTVMPIFSCWMTHCPRWTLMWPSTSLTTSSGQKACWQAR

SEQ ID NO: 70126 - protein, 88 aa, Homo sapiens
  MOD_RES (1)..(1): Any amino acid
XKRFDGKLQSESTNNGKNKRDVDFEGTDEPIFGKKPRIEESITEDLSLADLMPRVKVQSVETVEGCTHEVCHCIGLKGKAACNIYQPN

SEQ ID NO: 70127 - protein, 198 aa, Homo sapiens
  MOD_RES (1)..(1): Any amino acid
XLQQQHSEQPPLQPSPVMTRRGLRDSHSSEGEDRGEDEASSQTDLSQTISKKTVRSIQEAPVSEDLVIRLRRPPLRYPRYEATSVQQKVNFSEEGETEEDDQDSSHSSVTTVKARSRDSDESGDKTTRSSSQYIESFWQSSQSQNFTAHDKQPSVLSSGYQKTPQEWAPQTARIRTRMQNDSILKSELGNQSPSTSSR

SEQ ID NO: 70128 - protein, 194 aa, Homo sapiens
MLLLLLSIIVLHVAVLVLLFVSTIVSQWIVGNGHATDLWQNCSTSSSGNVHHCFSSSPNDLLSSTGFSVVHLIPSWSDSPEASIRQNISEIVQEWLQSVQATMILSIIFSILSLFLFFCQLFTLTKGGRFYITGIFQILAGLCVMSAAAIYTVRHPEWHLNSDYSYGFAYILAWVAFPLALLSGVIYVILRKRE

SEQ ID NO: 70129 - protein, 282 aa, Homo sapiens
SRAEVAELQLRAASSHEHIAARLTEAVHTMLSSPLEYLPPWDPKDYSARWNEIFGNNLGALAMFCVLYPENIEARDMAKDYMERMAAQPSWLVKDAPWDEVPLAHSLVGFATAYDFLYNYLSKTQQEKFLEVIANASGYMYETSYRRGWGFQYLHNHQPTNCMALLTGSLVLMNQGYLQEAYLWTKQVLTIMEKSLVLLREVTDGSLYEGVAYGSYTTRSLFQYMFLVQRHFNINHFGHPWLKQHFAFMYRTILPGVGLDLDSSCYHHSSDFYICHPMPISS

SEQ ID NO: 70130 - protein, 172 aa, Homo sapiens
ARVQEEIDLVVGRARLPALKDRAAMPYTDAVIHEVQRFADIIPMNLPHRVTRDTAFRGFLIPKGTDVITLLNTVHYDPSQFLTPQEFNPEHFLDANQSFKKSPAFMPFSAGEGRNQSLSGPISTYIPHPNSTCQILSLLPSTHSQLWMHRDIHSSSQLCSYRQVVTKILVKQ

SEQ ID NO: 70131 - protein, 204 aa, Homo sapiens
MAENSVLTSTTGRTSLADSSIFDSKVTEISKENLLIGSTSYVEEMPQIETRVILVQEAGKQEELIKALKDIKVGFVKMESVEEFEGLDSPEFENVFVVTDFQDSVFNDLYKADCRVIGPPVVLNCSQKGEPLPFSCRPLYCTSMMNLVLCFTGFRKKEELVRLVTLVHHMGGVIRKDFNSKVTHLVANCTQGEKFRVAVSLGTP

SEQ ID NO: 70132 - protein, 1271 aa, Homo sapiens
MFSSVSHSGESSFTYRAYCTEFIEASEISALIRQKRHELELSWFPDTLPGIGRIGFIPWNVETEVLPLISSVLPRTIFPTSTISFEHFGTSCKGYALAHTQEGEEKKQTSGTSNTRGSRRKPAMTTPTRRSTRNTRAETASQSQRSPISDNSGCDAPGNSNPSLSVPSSAESEKQTRQAPKRKSVRRGRKPPLLKKKLRSSVAAPEKSSSNDSVDEETAESDTSPVLEKEHQPDVDSSNICTVQTHVENQSANCLKSCNEQIEESEKHTANYDTEERVGSSSSESCAQDLPVLVGEEGEVKKLENTGIEANVLCLESEISENILEKGGDPLEKQDQISGLSQSEVKTDVCTVHLPNDFPTCLTSESKVYQPVSCPLSDLSENVESVVNEEKITESSLVEITEHKDFTLKTEELIESPKLESSEGEIIQTVDRQSVKSPEVQLLGHVETEDVEIIATCDTFGNEDFNNIQDSENNLLKNNLLNTKLEKSLEEKNESLTEHPRSTELPKTHIEQIQKHFSEDNNEMIPMECDSFCSDQNESEVEPSVNADLKQMNENSVTHCSENNMPSSDLADEKVETVSQPSESPKDTIDKTKKPRTRRSRFHSPSTTWSPNKDTPQEKKRPQSPSPRRETGKESRKSQSPSPKNESARGRKKSRSQSPKKDIARERRQSQSRSPKRDTTRESRRSESLSPRRETSRENKRSQPRVKDSSPGEKSRSQSRERESDRDGQRRERERRTRKWSRSRSHSRSPSRCRTKSKSSSFGRIDRDSYSPRWKGRWANDGWRCPRGNDRYRKNDPEKQNENTRKEKNDIHLDADDPNSADKHRNDCPNWITEKINSGPDPRTRNPEKLKESHWEENRNENSGNSWNKNFGSGWVSNRGRGRGNRGRGTYRSSFAYKDQNENRWQNRKPLSGNSNSSGSESFKFVEQQSYKRKSEQEFSFDTPADRSGWTSASSWAVRKTLPADVQNYYSRRGRNSSGPQSGWMKQEEETSGQDSSLKDQTNQQVDGSQLPINMMQPQMNVMQQQMNAQHQPMNIFPYPVGVHAPLMNIQRNPFNIHPQLPLHLHTGVPLMQVATPTSVSQGLPPPPPPPPPSQQVNYIASQPDGKQLQGIPSSSHVSNNMSTPVLPAPTAAPGNTGMVQGPSSGNTSSSSHSKASNAAVKLAESKVSVAVEASADSSKTDKKLQIQEKAAQEVKLAIKPFYQNKDITKEEYKEIVRKAVDKVCHSKSGEVNSTKVANLVKAYVDKYKYSRKGSQKKTLEEPVSTEKNIG

SEQ ID NO: 70133 - protein, 65 aa, Homo sapiens
MFRKKKKKRPEISAPQNFQHRVHTSFDPKEGKFVGLPPQWQNILDTLRRPKPVVDPSRITRVQLQ

SEQ ID NO: 70134 - protein, 150 aa, Homo sapiens
MMWRPSVLLLLLLLRHGAQGKPSPDAGPHGQGRVHQAAPLSDAPHDDAHGNFQYDHEAFLGREVAKEFDQLTPEESQARLGRIVDRMDRAGDGDGWVSLAELRAWIAHTQQRHIRDSVKNFMTWRMQRPTKRCWLGTSGVSGWPTRMGTR

SEQ ID NO: 70135 - protein, 494 aa, Homo sapiens
MADESETAVKPPAPPLPQMMEGNGNGHEHCSDCENEEDNSYNRGGLSPANDTGAKKKKKKQKKKKEKGSETDSAQDQPVKMNSLPAERIQEIQKAIELFSVGQGPAKTMEEASKRSYQFWDTQPVPKLGEVVNTHGPVEPDKDNIRQEPYTLPQGFTWDALDLGDRGVLKELYTLLNENYVEDDDNMFRFDYSPEFLLWALRPPGWLPQWHCGVRVVSSRKLVGFISAIPANIHIYDTEKKMVEINFLCVHKKLRSKRVAPVLIREITRRVHLEGIFQAVYTAGVVLPKPVGTCRYWHRSLNPRKLIEVKFSHLSRNMTMQRTMKLYRLPETPKTAGLRPMETKDIPVVHQLLTRYLKQFHLTPVMSQEEVEHWFYPQENIIDTFVVENANGEVTDFLSFYTLPSTIMNHPTHKSLKAAYSFYNVHTQTPLLDLMSDALVLAKMKGFDVFNALDLMENKTFLEKLKFGIGDGNLQYYLYNWKCPSMGAEKVGDT

SEQ ID NO: 70136 - protein, 133 aa, Homo sapiens
MSQPRTPEQALDTPGDCPPGRRDEDAGEGIQCSQRMLSFSDALLSIIATVMILPVTHTEISPEQQFDRSVQRLLATRIAVYLMTFLIVTVAWAAHTRLFQVVGKTDDTLALLNLACMMTITFLPYTFSLMVTF

SEQ ID NO: 70137 - protein, 212 aa, Homo sapiens
MSSMPKPERHAESLLDICHDTNSSPTDLMTVTKNQNIILQSISRSEEFDQDGDCSHSTLVNEEEDPSGGRQDWQPRTEGVEITVTFPRDVSPPQEMSQEDLKEKNLINSSLQEWAQAHAVSHPNEIETVELRKKKLTMRPLVLQKEESSRELCNVNLGFLLPRSCLELNISKSVTREDAPHFLKEQQRKSEEFSTSHMKYSGRSIKLFLSSF

SEQ ID NO: 70138 - protein, 680 aa, Homo sapiens
MALIMEPVSKWSPSQVVDWMKGLDDCLQQYIKNFEREKISGDQLLRITHQELEDLGVSRIGHQELILEAVDLLCALNYGLETENLKTLSHKLNASAKNLQNFITGRRRSGHYDGRTSRKLPNDFLTSVVDLIGAAKSLLAWLDRSPFAAVTDYSVTRNNVIQLCLELTTIVQQDCTVYETENKILHVCKTLSGVCDHIISLSSDPLVSQSAHLEVIQLANIKPSEGLGMYIKSTYDGLHVITGTTENSPADRCKKIHAGDEVIQVNHQTVPLIPRSPTSSVATPSSTISTPTKRDSSALQDLYIPPPPAEPYIPRDEKGNLPCEDLRGHMVGKPVHKGSESPNSFLDQEYRKRFNIVEEDTVLYCYEYEKGRSSSQGRRESTPTYGKLRPISMPVEYNWVGDYEDPNKMKRDSRRENSLLRYMSNEKIAQEEYMFQRNSKKDTGKKSKKKGDKSNSPTHYSLLPSLQMDALRQDIMGTPVPETTLYHTFQQSSLQHKSKKKNKGPIAGKSKRRISCKDLGRGDCEGWLWKKKDAKSYFSQKWKKYWFVLKDASLYWYINEEDEKAEGFISLPEFKIDRASECRKKYAFKACHPKIKSFYFAAEHLDDMNRWLNRINMLTAGYAERERIKQEQDYWSESDKEEADTPSTPKQDSPPPPYDTYPRPPSDLDNFFKISIKEEE

SEQ ID NO: 70139 - protein, 20 aa, Homo sapiens
  MOD_RES (1)..(1): Any amino acid
XDYGNNRLAFGKGNQVVVIP

SEQ ID NO: 70140 - protein, 114 aa, Homo sapiens
MGIQGGSVLFGLLLVLAVFCHSGHSLQCYNCPNPTADCKTAVNCSSDFDACLITKADTHPLRGGGQDSYACSYKLRSVVFQALHGIGVGISLCCPGWPQAILSLQPPKVLGLQV

SEQ ID NO: 70141 - protein, 91 aa, Homo sapiens
MDSKKGRPKAAAGKWQTLHPGPKTRAAAGKPGENRPPQRKAGWQAREPASAESPQAPTDGVSLCCQAGVHWGLAHCYLRLPGSGNSPASAS

SEQ ID NO: 70142 - protein, 125 aa, Homo sapiens
MASVAVDPQPSVVTRVVNLPLVSSTYDLMSSAYLSTKDQYPYLKSVCEMAENGVKTITSVAMTSALPIIQKLEPQIAVANTYACKGLDRIEERLPILNQPSTQIVANAKGAVTGAKDAVTTTVTG

SEQ ID NO: 70143 - protein, 705 aa, Homo sapiens
MPSPRPVLLRGARAALLLLLPPRLLARPSLLLRRSLSAASCPPISLPAAASRSSMDGAGAEEVLAPLRLAVRQQELALQPKDDIVDRAKMEDTLKRRFFYDQAFAIYGGVSGLYDFGPVGCALKNNIIQTWRQHFIQEEQILEIDCTMLTPEPVLKTSGHVDKFADFMVKDVKNGECFRADHLLKAHLQKLMSDKKCSVEKKSEMESVLAQLDNYGQQELADLFVNYNVKSPITGNDLSPPVSFNLMFKTFIGPGGNMPGYLRPETAQGIFLNFKRLLEFNQGKLPFAAAQIGNSFRNEISPRSGLIRVREFTMAEIEHFVDPSEKDHPKFQNVADLHLYLYSAKAQVSGQSARKMRLGDAVEQGVINNTVLGYFIGRIYLYLTKVGISPDKLRFRQHMENEMAHYACDCWDAESKTSYGWIEIVGCADRSCYDLSCHARATKVPLVAEKPLKEPKTVNVVQFEPSKGAIGKAYKKDAKLVMEYLAICDECYITEMEMLLNEKGEFTIETEGKTFQLTKDMINVKRFQKTLYVEEVVPNVIEPSFGLGRIMYTVFEHTFHVREGDEQRTFFSFPAVVAPFKCSVLPLSQNQEFMPFVKELSEALTRHGVSHKVDDSSGSIGRRYARTDEIGVAFGVTIDFDTVNKTPHTATLRDRDSMRQIRAEISELPSIVQDLANGNITWADVEARYPLFEGQETGKKETIEE

SEQ ID NO: 70144 - protein, 71 aa, Homo sapiens
  MOD_RES (1)..(1): Any amino acid
XQTFPRPPIHSSHSGLTAATRSKFGNEEQQLAWAKRESEKAEQERLARLRRQEQEDLELAIALSKADMPAA

SEQ ID NO: 70145 - protein, 128 aa, Homo sapiens
MEYVAALSLVLKGKVEQKLRWYFKLYDVDGNGCIDRDELLTIIQAIRAINPCSDTTMTAEEFTDTVFSKIDVNGDGELSLEEFIEGVQKDQMLLDTLTRSLDLTRIVRRLQNGEQDEEGADEAAEAAG

SEQ ID NO: 70146 - protein, 292 aa, Homo sapiens
SVSPAATCGQPVWSEEHPMEGPAHLTLNSEVGSLLFSEGGAGRGGAGDVHQPTKGKEEFVATFKGNEFFCYDLSHNPIQSSTDEITLAFRTLQRNGLMLHTGKSADYVNLSLKSGAVWLVINLGSGAFEALVEPVNGKFNDNAWHDVRVTRNLRQVTISVDGILTTTGYTQEDYTMLGSDDFFYIGGSPNTADLPGSPVSNNFMGCLKDVVYKNNDFKLELSRLAKEGDPKMKLQGDLSFRCEDVAALDPVTFESPEAFVALPRWSAKRTGSISLDFRTTEPNGLLLFSQGR

SEQ ID NO: 70147 - protein, 179 aa, Homo sapiens
  MOD_RES (1)..(1): Any amino acid
XTPGKSLDFGFTIKWDIPGIFVASVEAGSPAEFSQLQVDDEIIAINNTKFSYNDSKEWEEAMAKAQETGHLVMDVRRYGKAGSPETKWIDATSGIYNSEKSSNLSVTTDFSESLQSSNIESKEINGIHDESNAFESKASESISLKNLKRRSQFFEQGSSGFSYSSWVYLCGSSDSVVPD

SEQ ID NO: 70148 - protein, 163 aa, Homo sapiens
MLPPQKKPWESMAKGLVLGALFTSFLLLVYSYAVPPLHAGLASTRTPEAAASCSPPALEPEAVIRANGSAGECQPRRNIVFLKTHKTASSTLLNILFRFGQKHRLKFAFPNGRNDFDYPTFFARSLVQDYRPGACFNIICNHMRFHYDEVRGLVPTNAIFITV

SEQ ID NO: 70149 - protein, 67 aa, Homo sapiens
MFQFHAGSWESWCCCCLIPADRPWDRGQHWQLEMADTRSVHETRFEAAVKVIQSLPKNGMLGVHWVI

SEQ ID NO: 70150 - protein, 141 aa, Homo sapiens
MGRCCFYTAGTLSLLLLVTSVTLLVARVFQKAVDQSIEKKIVLRNGTEAFDSWEKPPLPVYTQFYFFNVTNPEEILRGETPRVEEVGPYTYRELRNKANIQFGDNGTTISAVSNKAYVFERDQSVGDPKIDLIRTLNIPVL

SEQ ID NO: 70151 - protein, 151 aa, Homo sapiens
MEVAEVESPLNPSCKIMTFRPSMEEFREFNKYLAYMESKGAHRAGLAKVIPPKEWKPRQCYDDIDNLLIPAPIQQMVTGQSGLFTQYNIQKKAMTVKEFRQLANSGKYCTPRYLDYEDLERKYWKNLTFVAPIYGADINGSIYDEVHSYLQ

SEQ ID NO: 70152 - protein, 61 aa, Homo sapiens
MDAIHIGMSSTPLVKHTAGAGLKANRPRVMSKSGHSNVRIDKVDGIYLLYLQDLWTTVIDM

SEQ ID NO: 70153 - protein, 48 aa, Homo sapiens
  MOD_RES (1)..(1): Any amino acid
XTIVPGEQGAEYQHFIQQCTGWSAVVQSQLTATSVSRVQEILLPQPPE

SEQ ID NO: 70154 - protein, 761 aa, Homo sapiens
MQRAGSKTAGPPCQWSRMASEGTNIPSPVVRQIDKQFLICSICLERYKNPKVLPCLHTFCERCLQNYIPAHSLTLSCPVCRQTSILPEKGVAALQNNFFITNLMDVLQRTPGSNAEESSILETVTAVAAGKPLSCPNHDGNVMEFYCQSCETAMCRECTEGEHAEHPTVPLKDVVEQHKASLQVQLDAVNKRLPEIDSALQFISEIIHQLTNQKASIVDDIHSTFDELQKTLNVRKSVLLMELEVNYGLKHKVLQSQLDTLLQGQESIKSCSNFTAQALNHGTETEVLLVKKQMSEKLNELADQDFPLHPRENDQLDFIVETEGLKKSIHNLGTILTTNAVASETVATGEGLRQTIIGQPMSVTITTKDKDGELCKTGNAYLTAELSTPDGSVADGEILDNKNGTYEFLYTVQKEGDFTLSLRLYDQHIRGSPFKLKVIRSADVSPTTEGVKRRVKSPGSGHVKQKAVKRPASMYSTGKRKENPIEDDLIFRVGTKGRNKGEFTNLQGVAASTNGKILIADSNNQCVQIFSNDGQFKSRFGIRGRSPGQLQRPTGVAVHPSGDIIIADYDNKWVSIFSSDGKFKTKIGSGKLMGPKGVSVDRNGHIIVVDNKACCVFIFQPNGKIVTRFGSRGNGDRQFAGPHFAAVNSNNEIIITDFHNHSVKVFNQEGEFMLKFGSNGEGNGQFNAPTGVAVDSNGNIIVADWGNSRIQVFDGSGSFLSYINTSADPLYGPQGLALTSDGHVVVADSGNHCFKVYRYLQ

SEQ ID NO: 70155 - protein, 58 aa, Homo sapiens
MGELASESQGSKELGDVLFQMAEVHRQIQNQLEEMLKSFHNELLTQLEQKVELDSRLR

SEQ ID NO: 70156 - protein, 262 aa, Homo sapiens
  MOD_RES (1)..(1): Any amino acid
XADPRDKALQDYRKKLLEHKEIDGRLKELREQLKELTKQYEKSENDLKALQSVGQIVGEVLKQLTEEKFIVKATNGPRYVVGCRRQLDKSKLKPGTRVALDMTTLTIMRYLPREVDPLVYNMSHEDPGNVSYSEIGGLSEQIRELREVIELPLTNPELFQRVGIIPPKGCLLYGPPGTGKTLLARAVASQLDCNFLKVVSSSIVDKYIGESARLIREMFNYARDHQPCIIFMDEIDAIDYEAIVKLSDGFNGADLRNVCTEA

SEQ ID NO: 70157 - protein, 161 aa, Homo sapiens
MEELIWEQYTVTLQKDSKRGFGIAVSGGRDNPHFENGETSIVISDVLPGGPADGLLQENDRVVMVNGTPMEDVLHSFAVQQLRKSGKVAAIVVKRPRKVQVAALQASPPLDQDDRAFEVMDEFDGRSFRSGYSERSRLNSHGGRSRSWEDSPERGRPHERA

SEQ ID NO: 70158 - protein, 217 aa, Homo sapiens
TLVNNVRLPRGHRLELSDGDLLTFGPEGPPGTSPSEFYFMFQQVRVKPQDFAAITIPRSRGEARVGAGFRPMLPSQGAPQRPLSTFSPAPKATLILNSIGSLSKLRPQPLTFSPSWGGPKSLPVPAPPGEMGTTPSAPPQRNRRKSVHRVLAELDDESEPPENPPPVLMEPRKKLRVDKAPLTPTGNWHIQGMQSIVKGQKERPWPREHLSGYEEAS

SEQ ID NO: 70159 - protein, 79 aa, Homo sapiens
MATWDEKAVTRRAKVAPAERMSKFLRHFTVVGDDYHAWNINYKKWENEEEEEEEEQPPPTPVSGHHHLLGGSGCPPGAC

SEQ ID NO: 70160 - protein, 404 aa, Homo sapiens
  MOD_RES (1)..(1): Any amino acid
XALGAVIALLLWGQLFAVDSGNDVTDIADDGCPKPPEIAHGYVEHSVRYQCKNYYKLRTEGDGVYTLNDKKQWINKAVGDKLPECEADDGCPKPPEIAHGYVEHSVRYQCKNYYKLRTEGDVYTLNNEKQWINKAVGDKLPECEAVCGKPKNPANPVQRILGGHLDAKGSFPWQAKMVSHHNLTTGATLINEQWLLTTAKNLFLNHSENATAKDIAPTLTLYVGKKQLVEIEKVVLHPNYSQVDIGLIKLKQKVSVNERVMPICLPSKDYAEVGRVGYVSGWGRNANFKFTDHLKYVMLPVADQDQCIRHYEGSTVPEKKTPKSPVGVQPILNEHTFCAGMSKYQEDTCYGDAGSAFAVHDLEEDTWYATGILSFDKSCAVAEYGVYVKVTSIQDWVQKTIAEN

SEQ ID NO: 70161 - protein, 828 aa, Homo sapiens
MQIRVFNYNTLERVHMFEAHSDYIRCIAVHPTQPFILTSSDDMLIKLWDWDKKWSCSQVFEGHTHYVMQIVINPKDNNQFASASLDRTIKVWQLGSSSPNFTLEGHEKGVNCIDYYSGGDKPYLISGADDRLVKIWDYQNKTCVQTLEGHAQNVSCASFHPELPIIITGSEDGTVRIWHSSTYRLESTLNYGMERVWCVASLRGSNNVALGYDEGSIIVKLGREEPAMSMDANGKIIWAKHSEVQQANLKAMGDAEIKDGERLPLAVKDMGSCEIYPQTIQHNPNGRFVVVCGDGEYIIYTAMALRNKSFGSAQEFAWAHDSSEYAIRESNSIVKIFKNFKEKKSFKPDFGAESIYGGFLLGVRSVNGLAFYDWDNTELIRRIEIQPKHIFWSDSGELVCIATEESFFILKYLSEKVLAAQETHEGVTEDGIEDAFEVLGEIQEIVKTGLWVGDCFIYTSSVNRLNYYVGGEIVTIAHLDRTMYLLGYIPKDNRLYLGDKELNIISYSLLVSVLEYQTAVMRRDFSMADKVLPTIPKEQRTRVAHFLEKQGFKQQALTVSTDPEHRFELALQLGELKIAYQLAVEAESEQKWKQLAELAISKCQFGLAQECLHHAQDYGGLLLLATASGNANMVNKLAEGAERDGKNNVAFMSYFLQGKVDACLELLIRTGRLPEAAFLARTYLPSQVSRVVKLWRENLSKVNQKAAESLADPTEYENLFPGLKEAFVVEEWVKETHADLWPAKQYPLVTPNEERNVMEEGKDFQPSRSTAQQELDGKPASPTPVIVASHTANKEEKSLLELEVDLDNLELEDIDTTDINLDEDILDD

SEQ ID NO: 70162 - protein, 357 aa, Homo sapiens
MSLRRHIGNPEYLMKRIPQNPRYQHIKSRLDTDYRYKKDELFKRLKVTTFAQLIIQVASLSDQTLEVTAEEIQRLEDNDSAASDPDAETTARTNGKGNPGEQSPSPEQFINNAGAGDSSRSTLQSVISGVGELDLDKGPVKKAEPHTKDKPYPDCPFLLLDVRDRDSYQQCHIVGAYSYPIATLSRTMNPYSNDILEYKNAHGKIIILYDDDERLASQAATTMCERGFENLFMLSGGLKVLAQKFPEGLITGSLPASCQQALPPGSARKRSSPKGPPLPAENKWRFTPEDLKKIEYYLEEEQGPADHPSRLNQANSSGRESKVPGARSAQNLPGGGPASHSNPRSLSSGHLQGKPWK

SEQ ID NO: 70163 - protein, 194 aa, Homo sapiens
MDLEEAEEFKERCTQCAAVSWGLTDEGKYYCTSCHNVTERYQEVTNTDLIPNTQIKALNRGLKKKNNTEKGWDWYVCEGFQYILYQQAEALKNLGVGPELKNDVLHNFWKRYLQKSKQAYCKNPVYTTGRKPTVLEDNLSHSDWASEPELLSDVSCPPFLESGAESQSDIHTRKPFPVSKASQSGLLKRTIFLT

SEQ ID NO: 70164 - protein, 31 aa, Homo sapiens
MSTSLGSNLSELDRLLLELNAVQHNPPGFPA

SEQ ID NO: 70165 - protein, 15 aa, Homo sapiens
  MOD_RES (1)..(1): Any amino acid
XSLIEAYALHKQMRL

SEQ ID NO: 70166 - protein, 324 aa, Homo sapiens
  MOD_RES (1)..(1): Any amino acid
XETLEKESASLADRLIQGQVTRAQEAEENYLIKRELATIKQQSDEASAKLEQAENTIRKLQHQQQWHKCSSNYNEDFVLQLEKELVQARLSEAESQCALKEMQDKVLDIEKRNNSLPDENNIARLQEELIAVKLREAEAIMGLKELRQQVKDLEEHWQRHLARTTGRWKDPPKKNAMNELQDELMTIRLREAETQAEIREIKQRMMEMETQNQINSNHLRRAEQEVISLQEKVQYLSAQNKGLLTQLSEAKRKQAEIECKNKEEVMAVRLREADSIAAVAELRQHIAELEIQKEEGKLQGQLNKSDSNQYIGELKDQIAELNHE

SEQ ID NO: 70167 - protein, 582 aa, Homo sapiens
MEVRASLQKVSGSSDSVATMNSEEFVLVPQYADDNSTKHEEKPQLKIVSNGDEQLEKAMEEILRDSEKRPSSLLVDCQSSSEISDHSFGDIPASQTNKPSLQLILDPSNTEISTPRPSSPGGLPEEDSVLFNKLTYLGCMKVSSPRNEVEALRAMATMKSSSQYPFPVTLYVPNVPEGSVRIIDQSSNVEIASFPIYKVLFCARGHDGTTESNCFAFTESSHGSEEFQIHVFSCEIKEAVSRILYSFCTAFKRSSRQVSDVKDSVIPTPDSDVFTFSVSLEVKEDDGKGNFRLLVIPIPFEYFSPVPKDRDKFYFKLKQGIEKKVVITVQQLSNKELAIERCFGMLLSPGRNVKNSDMHLLDMESMGKSYDGRAYVITGMWNPNAPVFLALNEETPKDKQVYMTVAVDMVVTEVVEPVRFLLETVVRVYPANERFWYFSRKTFTETFFMRLKQSEGKGHTNAGDAIYEVVSLQRESDKEEPVTPTSGGGPMSPQDDEAEEESDNELSSGTGDVSKDCPEKILYSWGELLGKWHSNLGARPKGLSTLVKSGVPEALRAEVWQLLAGCHDNQAMLDRYRILITK

SEQ ID NO: 70168 - protein, 119 aa, Homo sapiens
MKIYGEVVFKCENVATLDPINFETPEAYISLPKWNTKRMGSISFDFRTTEPNGLILFTHGKPQERKDARSQKNTKVDFFAVELLDGNLYLLLDMGSGTIKVKATQKKANDGEWYHVDIQ

SEQ ID NO: 70169 - protein, 743 aa, Homo sapiens
MGDSKVKVAVRIRPMNRRETDLHTKCVVDVDANKVILNPVNTNLSKGDARGQPKVFAYDHCFWSMDESVKEKYAGQDIVFKCLGENILQNAFDGYNACIFAYGQTGSGKSYTMMGTADQPGLIPRLCSGLFERTQKEENEEQSFKVEVSYMEIYNEKVRDLLDPKGSRQTLKVREHSVLGPYVDGLSKLAVTSYKDIESLMSEGNKSRTVAATNMNEESSRSHAVFKITLTHTLYDVKSGTSGEKVGKLSLVDLAGSERATKTGAAGDRLKEGSNINKSLTTLGLVISALADQSAGKNKNKFVPYRDSVLTWLLKDSLGGNSKTAMVATVSPAADNYDETLSTLRYADRAKHIVNHAVVNEDPNARIIRDLREEVEKLREQLTKAEAMKSPELKDRLEESEKLIQEMTVTWEEKLRKTEEIAQERQKQLESLGISLQSSGIKVGDDKCFLVNLNADPALNELLVYYLKEHTLIGSANSQDIQLCGMGILPEHCIIDITSEGQVMLTPQKNTRTFVNGSSVSSPIQLHHGDRILWGNNHFFRLNLPKKKKKAEREDEDQDPSMKNENSSEQLDVDGDSSSEVSSEVNFNYEYAQMEVTMKALGSNDPMQSILNSLEQQHEEEKRSALERQRLMYEHELEQLRRRLSPEKQNCRSMDRFSFHSPSAQQRLRQWAEEREATLNNSLMRLREQIVKANLLVREANYIAEELDKRTEYKVTLQIPASSLDANRKVRLPFLEKNKDLIG

SEQ ID NO: 70170 - protein, 26 aa, Homo sapiens
  MOD_RES (1)..(1): Any amino acid
XNDLHWEPIRDPADNCSCLHAGGLDL

SEQ ID NO: 70171 - protein, 411 aa, Homo sapiens
MDEFHPFIEALLPHVRAIAYTWFNLQARKRKYFKKHEKRMSKDEERAVKDELLSEKPEIKQKWASRLLAKLRKDIRQEYREDFVLTVTGKKHPCCVLSNPDQKGKIRRIDCLRQADKVWRLDLVMVILFKGIPLESTDGERLMKSPHCTNPALCVQPHHITVSVKELDLFLAYYVQEQDSGQSGSPSHNDPAKNPPGYLEDSFVKSGVFNVSELVRVSRTPITQGTGVNFPIGEIPSQPYYHDMNSGVNLQRSLSSPPSSKRPKTISIDENMEPSPTGDFYPSPSSPAAGSRTWHERDQDMSSPTTMKKPEKPLFSSASPQDSSPRLSTFPQHHHPGIPGVAHSVISTRTPPPPSPLPFPTQAILPPAPSSYFSHPTIRYPPHLNPQDTLKNYVPSYDPSSPQTSQSWYLG

SEQ ID NO: 70172 - protein, 113 aa, Homo sapiens
MDFSRLHMYSPPQCVPENTGYTYALSSSYSSDALDFETEHKLDPVFDSPRMSRRSLRLATTACTLGDGEAVGADSGTSSAVSLKNRAARTTKQRRSTNKSAFSINHVSRQVTS

SEQ ID NO: 70173 - protein, 131 aa, Homo sapiens
MGAQVRLPPGEPCREGYVLSLVCPNSSQAWCEITNVSQLLASPVLYTDLNYSINNLSISANVENKYSLYVGLVLAVSSSIFIGSSFILKKKGLLQLASKGFTRAGQGGHSYLKEWLWWVGLLSMQYYLPTF

SEQ ID NO: 70174 - protein, 295 aa, Homo sapiens
LIAAYSGVLRGERQAEADRSQRSHGGPALSREGSGRWGVACSAILMYIFCTDCWLIAVLYFTWLVFDWNTPKKGGRRSQWVRNWAVWRYFRDYFPIQLVKTHNLLTTRNYIFGYHPHGIMGLGAFCNFSTEATEVSKKFPGIRPYLATLAGNFRMPVLREYLMSGGICPVSRDTIDYLLSKNGSGNAIIIVVGGAAESLSSMPGKNAVTLRNRKGFVKLALRHGADLVPIYSFGENEVYKQVIFEEGSWGRWVQKKFQKYIGFAPCIFHGRGLFSSDTWGLVPYSKPITTVVGEP

SEQ ID NO: 70175 - protein, 115 aa, Homo sapiens
VKAATGEEVSAEDLGGADLHCRKSGVSDHWALDDHHALHLTRKVVRNLNYQKKLDVTIEPSEEPLFPADELYGIVGANLKRSFDVREVIARIVDGSRFTEFKAFYGDTLVTVKQD

SEQ ID NO: 70176 - protein, 87 aa, Homo sapiens
MQKSEGSGGTQLKNRATGNYDQRTSSSTQLKHRNAVQGSKSSLSTSSPESARKLHPRPSDKLNPKTINPGSLSIIKSKIPTYCSICC

SEQ ID NO: 70177 - protein, 119 aa, Homo sapiens
ELSDQAGSEFENSDVRWVITVPAIWKQPAKQFMRQAAYQAGLASPENSEQLIIALEPEAASIYCRKLRLHQMIELSSKAAVNGYSGSDTVGAGFTQGTSALSLPLLLSFLPKPWMSLSL

SEQ ID NO: 70178 - protein, 161 aa, Homo sapiens
MIVERLGYCQGCVWPKEWFCECMGERETDHQEALVRQDPGGWEAAARMVPEIVSGEMLGSRIGSPYSLDPLIRWSLGPGCCNSYNRTWHRVGQGFRAGGACAGTGQHPQSIQQHIRLHLLHTTAIVRLPADTLGLCPDAAELPGVSRWFCLPGLDPVLRAL

SEQ ID NO: 70179 - protein, 153 aa, Homo sapiens
MVSWGRFICLVVVTMATLSLARPSFSLVEDTTLEPEEPPTKYQISQPEVYVAAPGESLEVRCLLKDAAVISWTKDGVHLGPNNRTVLIGEYLQIKGATPRDSGLYACTASRTVDSETWYFMVNVTDAISSGDDEDDTDGAEDFVSENSNNKSK

SEQ ID NO: 70180 - protein, 38 aa, Homo sapiens
MGFWILAILTILMYSTAAKFSKQSWGLENEALIVRCPR

SEQ ID NO: 70181 - protein, 420 aa, Homo sapiens
ETSSSVHEQVADSGAQAVAFQSGGESSIVWNSQLKTLLAIGGWNFGTAPFTAMVSTPENRQTFITSVIKFLRQYEFDGLDFDWEYPGSRGSPPQDKHLFTVLVQEMREAFEQEAKQINKPRLMVTAAVAAGISNIQSGYEIPQLSQYLDYIHVMTYDLHGSWEGYTGENSPLYKYPTDTGSNAYLNVDYVMNYWKDNGAPAEKLIVGFPTYGHNFILSNPSNTGIGAPTSGAGPAGPYAKESGIWAYYEICTFLKNGATQGWDAPQEVPYAYQGNVWVGYDNIKSFDIKAQWLKHNKFGGAMVWAIDLDDFTGTFCNQGKFPLISTLKKALGLQSASCTAPAQPIEPITAAPSGSGNGSGSSSSGGSSGGSGFCAVRANGLYPVANNRNAFWHCVNGVTYQQNCQAGLVFDTSCDCCNWA

SEQ ID NO: 70182 - protein, 107 aa, Homo sapiens
MAAGLRKRGRSGSAAQAEGLCKQWLQRAWQERRLLLREPRYTLLVAACLCLAEVGITFWVIHRVACTQLVSCTSLWGCTMPPAEALTSAWPRTSLLCSTWLPCCLSS

SEQ ID NO: 70183 - protein, 213 aa, Homo sapiens
MGSKALPAPIPLHPSLQLTNYSFLQAVNTFPATVDHLQGLYGLSAVQTMHMNHWTLGYPNVHEITRSTITEMAAAQGLVDARFPFPALPFTTHLFHPKQGAIAHVLPALHKDRPRFDFANLAVAATQEDPPKMGDLSKLSPGLGSPISGLSKLTPDRKPSRGRLPSKTKKEFICKFCGRHFTKSYNLLIHERTHTDERPYTCDICHKAFRRQD

SEQ ID NO: 70184 - protein, 34 aa, Homo sapiens
MASKPEKRVASSVFITLAPPRRDVAVAEEVRQAV

SEQ ID NO: 70185 - protein, 849 aa, Homo sapiens
MKMHSTERIPLFGPYPSLLKKIERETWRESGVSLIATVTRLMERLLDYRDCMKMGEVDGKKIGCTVSLLNFYKTELNKEEMYIRYIHKLYDLHLKAQNFTEAAYTLLLYDELLEWSDRPLREFLTYPMQTEWQRKEHLHLTIIQNFDRGKCWENGIILCRKIAEQYESYYDYRNLSKMRMMEASLYDKIMDQQRLEPEFFRVGFYGKKFPFFLRNKEFVCRGHDYERLEAFQQRMLNEFPHAIAMQHANQPDETIFQAEAQYLQIYAVTPIPESQEVLQREGVPDNIKSFYKVNHIWKFRYDRPFHKGTKDKENEFKSLWVERTSLYLVQSLPGISRWFEVEKREVVEMSPLENAIEVLENKNQQLKTLISQCQTRQMQNINPLTMCLNGVIDAAVNGGVSRYQEAFFVKEYILSHPEDGEKIARLRELMLEQAQILEFGLAVHEKFVPQDMRPLHKKLVDQFFVMKSSLGIQEFSACMQASPVHFPNGSPRVCRNSAPASVSPDGTRVIPRRSPLSYPAVNRYSSSSLSSQASAEVSNITGQSESSDEVFNMQPSPSTSSLSSTHSASPNVTSSAPSSARASPLLSDKHKHSRENSCLSPRERPCSAIYPTPVEPSQRMLFNHIGDGALPRSDPNLSAPEKAVNPTPSSWSLDSGKEAKNMSDSGKLISPPVPPRPTQTASPARHTTSVSPSPAGRSPLKGSVQSFTPSPVEYHSPGLISNSPVLSGSYSSGISSLSRCSTSETSGFENQVNEQSAPLPVPVPVPVPSYGGEEPVRKESKTPPPYSVYERTLRRPVPLPHSLSIPVTSEPPALPPKPLAARSSHLENGARRTDPGPRPRPLPRKVSQL

SEQ ID NO: 70186 - protein, 271 aa, Homo sapiens
MSSAMLVTCLPDPSSSFREDAPRPPVPGEEGETPPCQPGVGKGQVTKPMPVSSNTRRNEDGLGEPEGRASPDSPLTRWTKSLHSLLGDQDGAYLFRTFLEREKCVDTLDFWFACNGFRQMNLKDTKTLRVAKAIYKRYIENNSIVSKQLKPATKTYIRDGIKKQQIDSIMFDQAQTEIQSVMEENAYQMFLTSDIYLEYVRSGGENTAYMSNGGLGSLKVVCGYLPTLNEEEEWTCADFKCKLSPTVVGLSSKTLRATASVRSTETVDSGY

SEQ ID NO: 70187 - protein, 119 aa, Homo sapiens
  MOD_RES (1)..(1): Any amino acid
XNYTNSFGGEWSAPDTMKRYSMYLTPKGGVRTSYQPSSPGRFTKETTQKNFNNLYGTKGNYTSRVWEYSSSIQNSDNDLPVVQGSSSFSLKGYPSLMRSQSPKAQPQTWKSGKQTMLVV

SEQ ID NO: 70188 - protein, 79 aa, Homo sapiens
  MOD_RES (1)..(1): Any amino acid
XYTETVNHHYLLFQDTDLGSFHDLLRREPMLRMQEGEGHSQLCLDRLQLEAIHKTAWLLSNQPSPSAHSLALAHTRSLE

SEQ ID NO: 70189 - protein, 389 aa, Homo sapiens
ARSLDKLYNFADCSGLHLIFALNALRRNPNNSWNSSSALSLLKYSASKKYNISWELGNEPNNYRTMHGRAVNGSQLGKDYIQLKSLLQPIRIYSRASLYGPNIGRPRKNVIALLDGFMKVAGSTVDAVTWQHCYIDGRVVKVMDFLKTRLLDTLSDQIRKIQKVVNTYTPGKKIWLEGVVTTSAGGTNNLSDSYAAGFLWLNTLGMLANQGIDVVIRHSFFDHGYNHLVDQNFNPLPDYWLSLLYKRLIGPKVLAVHVAGLQRKPRPGRVIRDKLRIYAHCTNHHNHNYVRGSITLFIINLHRSRKKIKLAGTLRDKLVHQYLLQPYGQEGLKSKSVQLNGQPLVMVDDGTLPELKPRPLRAGRTLVIPPVTMGFYVVKNVNALACRYR

SEQ ID NO: 70190 - protein, 165 aa, Homo sapiens
MSSRGGKKKSTKTSRSAKAGVIFPVGRMLRYIKKGHPKYRIGVGAPVYMAAVLEYLTAEILELAGNAARDNKKGRVTPRHILLAVANDEELNQLLKGVTIASGGVLPNIHPELLAKKRGSKGKLEAIITPPPAKKAKSPSQKKPVSKKAGGKKGARKSKNSCTSK

SEQ ID NO: 70191 - protein, 100 aa, Homo sapiens
MEANQCPLVVEPSYPDLVINVGEVTLGEENRKKLQKIQRDQEKERVMRAACALLNSGGGVIRMAKKVEHPVEMGLDLEQSLRELIQSSDLQAFFETKQQG

SEQ ID NO: 70192 - protein, 418 aa, Homo sapiens
MPDSPAEVKTQPRSTPPSMPPPPPAASQGATRPPSFTPHTHREDGPATLPHGRFHGCLKWSMVCLLMNGSSHSPTAINGAPCTPNGFSNGPATSSTASLSTQHLPPACGARQLSKLKRFLTTLQQFGSDISPEIGERVRTLVLGLVNSTLTIEEFHSKLQEATNFPLRPFVIPFLKANLPLLQRELLHCARLAKQTPAQYLAQHEQLLLDASASSPIDSSELLLEVNENGKRRTPDRTKENGSDRDPLHPEHLSKRPCTLNPAQRYSPSNGPPQPTPPPHYRLEDIAMAHHFRDAYRHPDPRELRERHRPLVVPGSRQEEVIDHKLTEREWAEEWKHLNNLLNCIMDMVEKTRRSLTVLRRCQEADREELNHWARRYSDAEDTKKGPAPAAARPRSSSAGPEGPQLGKHGLVCQEAWS

SEQ ID NO: 70193 - protein, 25 aa, Homo sapiens
MPRPRLLAALCGALLCAPSLLVALG

SEQ ID NO: 70194 - protein, 190 aa, Homo sapiens
  MOD_RES (1)..(1): Any amino acid
XSRGGAEVQIFAPDVPQMHVIDHTKGQPSEGESRNVLTESARIARGKITDLANLSAANHDAAIFPGGFGAAKNLSTFAVDGKDCKVNKEVERVLKEFHQAGKPIGPGDGGDVSMSVSLRSLSLALSLPGGSCSQPSLPPHRHPACPSGPARLLCLEGATKEEDVNVQVLREAGPAASVSVFRPQEEPRPG

SEQ ID NO: 70195 - protein, 824 aa, Homo sapiens
MLAVQQTEHLPACPPARRWSSNFCPESTEGGPSLLGLRDMVRRGWSVCTAILLARLWCLVPTHTFLSEYPEAAEYPHPGWVYWLQMAVAPGHLRAWVMRNNVTTNIPSAFSGTLTHEEKAVLTVFTGTATAVHVQVAALASAKLESSVFVTDCVSCKIENVCDSALQGKRVPMSGLQGSSIVIMPPSNRPLASAASCTWSVQVQGGPHHLGVVAISGKVLSAAHGAGRAYGWGFPGDPMEEGYKTLLKGISGKFNSGELVAIMGPSGAGKSTLMNILAGYRETGMKGAVLINGLPRDLRCFRKVSCYIMQDDMLLPHLTVQEAMMVSAHLKLQEKDEGRREMVKEILTALGLLSCANTRTGSLSGGQRKRLAIALELVNNPPVMFFDEPTSGLDSASCFQVVSLMKGLAQGGRSIICTIHQPSAKLFELFDQLYVLSQGQCVYRGKVCNLVPYLRDLGLNCPTYHNPADFVMEVASGEYGDQNSRLVRAVREGMCDSDHKRDLGGDAEVNPFLWHRPSEEVKQTKRLKGLRKDSSSMEGCHSFSASCLTQFCILFKRTFLSIMRDSVLTHLRITSHIGIGLLIGLLYLGIGNEAKKVLSNSGFLFFSMLFLMFAALMPTVLTFPLEMGVFLREHLNYWYSLKAYYLAKTMADVPFQIMFPVAYCSIVYWMTSQPSDAVRFVLFAALGTMTSLVAQSLGLLIGAASTSLQVATFVGPVTAIPVLLFSGFFVSFDTIPTYLQWMSYISYVRYGFEGVILSIYGLDREDLHCDIDETCHFQKSEAILRELDVENAKLYLDFIVLGIFFISLRLIAYFVLRYKIRAER

SEQ ID NO: 70196 - protein, 43 aa, Homo sapiens
HILQVSTFQMTILMLFNNREKYTFELLPNKVNPTQRGKKQGRK

SEQ ID NO: 70197 - protein, 250 aa, Homo sapiens
MNRPIQVKPADSESRGDRKLFVGMLNKQQSEDDVRRLFEAFGNIEECTILRGPDGNSKGCAFVKYSSHAEAQAAINALHGSQTMPVSAGPLGRGRGQRRAETPAPATPRRLSSLPKRQESMTLIPGLRQGRGSPGMLRNWPEVTQVENARGGVHTSFPWASADAASSKAPRGAGGVGAGQRHRQLRAEALEQVGLTRRPGRREPRPVWWSSSPTPTRSARCGECSRWLARWACSTPWPSLSGPTAPTLRQ

SEQ ID NO: 70198 - protein, 297 aa, Homo sapiens
GFLSAIGHPFPKMIFNHGRKKRTWNYLEFEEEENKQLADSMASLAYLVFVQGIHIDQLPMVLSPLYLLQFNMGHIEVFLQRTEESVISKGLELLENSLLRIEDNSLLYQYLEIKSFLTVPQRKKSLAMLQLYINKLDSQGKYTLFRCLLNTSNHSGVEAFIIQNIKNQIDMSLKRTRNNKWFTGPQLISLLDLVLFLPEGAETDLLQNSDRIMASLNLLRYLVIKDNENDNQTGLWTELGNIENNFLKPLHIGLNMSKAHYEAEIKNSQEAQKSKDLCSITVSGEEIPNMPPEMQLK

SEQ ID NO: 70199 - protein, 233 aa, Homo sapiens
MAATASPQPLATEDADSENSSFYYYDYLDEVAFMLCRKDAVVSFGKVFLPVFYSLIFVLGLSGNLLLLMVLLRYVPRRRMVEIYLLNLAISNLLFLVTLPFWGISVAWHWVFGSFLCKMVSTLYTINFYSGIFFISCMSLDKYLEIVHAQPYHRLRTRAKSLLLATIVWAVSLAVSIPDMVFVQTHENPKGVWNCHADFGGHGTIWKLFLRFQQNLLGFLLPLLAMIFFYSRI

SEQ ID NO: 70200 - protein, 188 aa, Homo sapiens
MIEESGNKRKTMAEKRQLFIEMRAQNFDVIRLSTYRTACKLRFVQKRCNLHLVDIWNMIEAFRDNGLNTLDHTTEISVSRLETVISSIYYQLNKRLPSTHQISVEQSISLLLNFMIAAYDSEGRGKLTVFSVKAMLATMCGGKMLDKLRYVFSQMSDSNGLMIFSKFDQFLKEVLKLPTAVFEGPSFG

SEQ ID NO: 70201 - protein, 199 aa, Homo sapiens
KSRSYSVEQLQPAPPGLTSQSRAPSLQSLHPVSPSHQRRKAASFQNLHSLLSSKGNRSSLYLVAGPGDHSAAGRPAKTSPRRALSVEDVGAPSLARTVGRLVEVFPDGTSQLQLQRSPGGTFGFCVASGNGRPDSGIYVQEMADMSMAKLYSGLLGVGDEILEVNGAKVAGLGLAHIKELLAHSESLSIRVLRQRPVPR

SEQ ID NO: 70202 - protein, 28 aa, Homo sapiens
MREPVLTWACAGKDEMGKMVSVINTVDT

SEQ ID NO: 70203 - protein, 90 aa, Homo sapiens
  MOD_RES (1)..(1): Any amino acid
XPAPVTLAEQIETLFKSKDYEFMWNPHLGYILTCPSNLGTGLRAGVHIKLPNLGKHEKFSEVLKRLRLQKRGTGGVDTAAVGGVFDVSNA

SEQ ID NO: 70204 - protein, 59 aa, Homo sapiens
MRQSLLFLTSVVPFVLAPRPPDDPGFGPHQRLAFGKKKRSTDFNTCRNTTNFFSFEKAF

SEQ ID NO: 70205 - protein, 152 aa, Homo sapiens
GGLWCFGGNGLPYAESFGEVPSATVEMFCLEAIVKHSEISTHCDKIEANGGLQLLQRLYRLHKDCPKVQRNIMRVIGNMALNEHLHSSIVRSGWVSIMAEAMKSPHIMESSHAARILANLDRETVQEKYQDGVYVLHPQYRTSIQNMAPAGQ

SEQ ID NO: 70206 - protein, 145 aa, Homo sapiens
MYGSARSVGKVEPSSQSPGRSPRLPRSPRLGHRRTNSTGGSSGSSVGGGSGKTLSMENIQSLNAAYATSGPMYLSDHENVGSETPKSTMTLGRSGGRLPYGVRMTAMGSSPNIASSGVASDTIAFGEHHLPPVSMASTVPHSLRQ

SEQ ID NO: 70207 - protein, 14 aa, Homo sapiens
  MOD_RES (1)..(1): Any amino acid
XGTFLLTVEYERDK

SEQ ID NO: 70208 - protein, 276 aa, Homo sapiens
LAARVAAVRAAAWLLLGAATGLTRGPAAAFTAARSDAGIRAMCSEIILRQEVLKDGFHRDLLIKVKFGESIEDLHTCRLLIKQDIPAGLYVDPYELASLRERNITEAVMVSENFDIEAPNYLSKESEVLIYARRDSQCIDCFQAFLPVHCRYHRPHSEDGEASIVVNNPDLLMFCDQAGSRRMIRFRFDSFDKTIEFPILKCWAHSEVAAPCALENEDICQWNKMKYKSVYKNVILQVPVGLTVHTSLVCSVTLLITILCSTLILVAVFKYGHFSL

SEQ ID NO: 70209 - protein, 137 aa, Homo sapiens
MGDLPGLVRLSIALRIQPNDGPVFYKVDGQRFGQNRTIKLLTGSSYKVEVKIKPSTLQVENISIGGVLVPLELKSKEPDGDRVVYTGTYDTEGVTPTKSGERQPIQITMPVRLACGYRSMVPWKMETTEKKTITISL

SEQ ID NO: 70210 - protein, 131 aa, Homo sapiens
IICLLPAIEGKNCLRCWPELSALIDYDLQILWVTPGPPTELSQSIHSLFLEDNNFLKPWYLDRDHLEEETAKFFTQVHQAIKTLRDGEEAKSPRALGLGLTKAHPPRHSQRPMWPWVGGLVKVGDECSLSP

SEQ ID NO: 70211 - protein, 277 aa, Homo sapiens
  MOD_RES (1)..(1): Any amino acid
XLADDSQTSTSIFASPTSPPVLGESVLQDNSFDLNNGSDAEQEEMETQSSDFPPSLTQPAPDQSSTIQLHPATSPAVSPTTSPAVSLVVSPAASPEISPEVCPAASTVVSPAVFSVVSPASSAVLPAVSLEVPLTASVTSPKASPVTSPAAAFPTASPANKDVSSFLETTADVEEITGEGLTASGSGDVMRRRIATPEEVRLPLQHGAHVLLWQVAERGAHQEGQPPMAGGDLVLWPLWEEDEAISRSDQVPEPQRGTQCPPRALQLQSPYACWRFL

SEQ ID NO: 70212 - protein, 25 aa, Homo sapiens
  MOD_RES (1)..(1): Any amino acid
XPLQSYSQVISRGQAPLAPTHTPEL

SEQ ID NO: 70213 - protein, 35 aa, Homo sapiens
MERPYTFKDFLLRPRSHKSRVKGFLRLKMAYMPKN

SEQ ID NO: 70214 - protein, 1005 aa, Homo sapiens
MAHESERSSRLGVPCGEPAELGGDASEEDHPQVCAKCCAQFTDPTEFLAHQNACSTDPPVMVIIGGQENPNNSSASSEPRPEGHNNPQVMDTEHSNPPDSGSSVPTDPTWGPERRGEESSGHFLVAATGTAAGGGGGLILASPKLGATPLPPESTPAPPPPPPPPPPPGVGSGHLNIPLILEELRVLQQRQIHQMQMTEQICRQVLLLGSLGQTVGAPASPSELPGTGTASSTKPLLPLFSPIKPVQTSKTLASSSSSSSSSSGAETPKQAFFHLYHPLGSQHPFSAGGVGRSHKPTPAPSPALPGSTDQLIASPHLAFPSTTGLLAAQCLGAARGLEATASPGLLKPKNGSGELSYGEVMGPLEKPGGRHKCRFCAKVFGSDSALQIHLRSHTGERPYKCNVCGNRFTTRGNLKVHFHRHREKYPHVQMNPHPVPEHLDYVITSSGLPYGMSVPPEKAEEEAATPGGGVERKPLVASTTALSATESLTLLSTSAGTATAPGLPAFNKFVLMKAVEPKNKADENTPPGSEGSAISGVAESSTATRMQLSKLVTSLPSWALLTNHFKSTGSFPFPYVLEPLGASPSETSKLQQLVEKIDRQGAVAVTSAASGAPTTSAPAPSSSASSGPNQCVICLRVLSCPRALRLHYGQHGGERPFKCKVCGRAFSTRGNLRAHFVGHKASPAARAQNSCPICQKKFTNAVTLQQHVRMHLGGQIPNGGTALPEGGGAAQENGSEQSTVSGARSFPQQQSQQPSPEEELSEEEEEEDEEEEEDVTDEDSLAGRGSESGGEKAISVRGDSEEASGAEEEVGTVAAAATAGKEMDSNEKTTQQSSLPPPPPPDSLDQPQPMEQGSSGVLGGKEEGGKPERSSSPASALTPEGEATSVTLVEELSLQEAMRKEPGESSSRKACEVCGQAFPSQAALEEHQKTHPKEGPLFTCVFCRQGFLERATLKKHMLLAHHQVQPFAPHGPQNIAALSLVPGCSPSITSTGLSPFPRKDDPTIP

SEQ ID NO: 70215 - protein, 660 aa, Homo sapiens
  MOD_RES (1)..(1): Any amino acid
XMGGQTALNCGVELFKRGVLKEYGVKVLGTSVESIMATEDRQLFSDKLNEINEKIAPSFAVESIEDALKAADTIGYPVMIRSAYALGGLGSGICPNRETLMDLSTKAFAMTNQILVEKSVTGWKEIEYEVVRDADDNCVTVCNMENVDAMGVHTGDSVVVAPAQTLSNAEFQMLRRTSINVVRHLGIVGECNIQFALHPTSMEYCIIEVNARLSRSSALASKATGYPLAFIAAKIALGIPLPEIKNVVSGKTSACFEPSLDYMVTKIPRWDLDRFHGTSSRIGSSMKSVGEVMAIGRTFEESFQKALRMCHPSIEGFTPRLPMNKEWPSNLDLRKELSEPSSTRIYAIAKAIDDNMSLDEIEKLTYIDKWFLYKMRDILNMEKTLKGLNSESMTEETLKRAKEIGFSDKQISKCLGLTEAQTRELRLKKNIHPWVKQIDTLAAEYPSVTNYLYVTYNGQEHDVNFDDHGMMVLGCGPYHIGSSVEFDWCAVSSIRTLRQLGKKTVVVNCNPETVSTDFDECDKLYFEELSLERILDIYHQEACGGCIISVGGQIPNNLAVPLYKNGVKIMGTSPLQIDRAEDRSIFSAVLDELKVAQAPWKAVNTLNEALEFAKSVDYPCLLRPSYVLSGSAMNVVFSEDEMKKFLEEATRVSQSPLFSN

SEQ ID NO: 70216 - protein, 119 aa, Homo sapiens
MERNVLTTFSQEMSQLILNEMPKAEYSSLFNDFVESEFFLIDGDSLLITCICEISFKPGQNLHFFYLVERYLVDLISKGGQFTIVFFKDAEYAYFNFPELLSLRTALILHLQKNTTIDV

SEQ ID NO: 70217 - protein, 134 aa, Homo sapiens
MQTQEILRILRLPELGDLGQFFRSLSATTLVSMGALAAILAYWFTHRPKALQPPCNLLMQSEEVEDSGGARRSVIGSGPQLLTHYYDDARTMYQVFRRGLSISGNGPCLGFRKPKQPYQWLSYQEVADRAEFLG

SEQ ID NO: 70218 - protein, 165 aa, Homo sapiens
MAQTLQMEIPNFGNSILECLNEQRLQGLYCDVSVVVKGHAFKAHRAVLAASSSYFRDLFNNSRSAVVELPAAVQPQSFQQILSFCYTGRLSMNVGDQFLLMYTAGFLQIQEIMEKGTEFFLKVSSPSCDSQGLHAEEAPSSEPQSPVAQTSGWPACSTPLPLVSR

SEQ ID NO: 70219 - protein, 62 aa, Homo sapiens
MIQAQESITLEDVAVDFTWEEWQLLGAAQKDLYRDVMLENYSNLVAVGYQASKPDALFKLEQ

SEQ ID NO: 70220 - protein, 178 aa, Homo sapiens
MTLRPGTMRLACMFSSILLFGAAGLLLFISLQDPTELAPQQVPGIKFNIRPRQPHHDLPPGGSQDGDLKEPTERVTRDLSSGAPRGRNLPAPDQPQPPLQRGTRLRLRQRRRRLLIKKMPAAATIPANSSDAPFIRPGPGTLDGRWVSLHRSQQERKRVMQEACAKYRASSSRRAVTP

SEQ ID NO: 70221 - protein, 166 aa, Homo sapiens
MGSSEPLPIADGDRRRKKKRRGRATDSLPGKFEDMYKLTSELLGEGAYAKVQGAVSLQNGKEYAVKIIEKQAGHSRSRVFREVETLYQCQGNKNILELIEFFEDDTRFYLVFEKLQGGSILAHIQKQKHFNEREASRVVRDVAAALDFLHTKGIAHRDLKPENILC

SEQ ID NO: 70222 - protein, 1124 aa, Homo sapiens
MGVDFDVKTFCHNLRATKPPYECPVETCRKVYKSYSGIEYHLYHYDHDNPPPPQQTPLRKHKKKGRQSRPANKQSPSPSEVSQSPGREVMSYAQAQRMVEVDLHGRVHRISIFDNLDVVSEDEEAPEEAPENGSNKENTETPAATPKSGKHKNKEKRKDSNHHHHHNVSASTTPKLPEVVYRELEQDTPDAPPRPTSYYRYIEKSAEELDEEVEYDMDEEDYIWLDIMNERRKTEGVSPIPQEIFEYLMDRLEKESYFESHNKGDPNALVDEDAVCCICNDGECQNSNVILFCDMCNLAVHQECYGVPYIPEGQWLCRRCLQSPSRAVDCALCPNKGGAFKQTDDGRWAHVVCALWIPEVCFANTVFLEPIDSIEHIPPARWKLTCYICKQRGSGACIQCHKANCYTAFHVTCAQQAGLYMKMEPVRETGANGTSFSVRKTAYCDIHTPPGSARRLPALSHSEGEEDEDEEEDEGKGWSSEKVKKAKAKSRIKMKKARKILAEKRAAAPVVSVPCIPPHRLSKITNRLTIQRKSQFMQRLHSYWTLKRQSRNGVPLLRRLQTHLQSQRNCDQVGRDSEDKNWALKEQLKSWQRLRHDLERARLLVELIRKREKLKRETIKVQQIAMEMQLTPFLILLRKTLEQLQEKDTGNIFSEPVPLSEVTELDEVPDYLDHIKKPMDFFTMKQNLEAYRYLNFDDFEEDFNLIVSNCLKYNAKDTIFYRAAVRLREQGGAVLRQARRQAEKMGIDFETGMHIPHSLAGDEATHHTEDAEEERLVLLENQKHLPVEEQLKLLLERLDEVNASKQSVGRSRRAKMIKKEMTALRRKLAHQRETGRDGPERHGPSSRGSLTPHPAACDKDGQTDSAAEESSSQETSKDLPANGFSGGNQPVKKSFLVYRNDCSLPRSSSDSESSSSSSSSAASDRTSTTPSKQGRGKPSFSRGTFPEDSSEDTSGTENEAYSVGTGRGVGHSMVRKSLGRGAGWLSEDEDSPLDALDLVWAKCRGYPSYPALIIDPKMPREGMFHHGVPIPVPPLEVLKLGEQMTQEAREHLYLVLFFDNKRTWQWLPRTKLVPLGVNQDLDKEKMLEGRKSNIRKSVQIAYHRALQHRSKVQGEQSSETSDSD

SEQ ID NO: 70223 - protein, 78 aa, Homo sapiens
MAVPTSIYQTSTGQYIAIAQGGTIQISNPGSDGVQGLQALTMTNSGAPPPGATIVQYAAQSADGTQQFFVPGSQVVVQ

SEQ ID NO: 70224 - protein, 28 aa, Homo sapiens
MGLKMSCLKVWLDETGSCPDDGEIDPEA

SEQ ID NO: 70225 - protein, 149 aa, Homo sapiens
  MOD_RES (1)..(1): Any amino acid
XDDYANYNYCDGRETSETTAMLQDEDISSDGDEDAIVEVTPKLPKESSGIMALQILVPFLLAGFGTVSAGMVLDIVQVNIGKMDSPIEKWNLIIGNLALKQVQATVVGFLAAVAAIILGWIPEGKYYLDHSILLCSSSVATAFIASLLQ

SEQ ID NO: 70226 - protein, 392 aa, Homo sapiens
MGDSCPAVTFRSQKENRAGLQEKLRYLQQQLQDETPRRQEAELQEPEEKQEPEEKQEPEEKQKPEAGLSWNSLGPAATSQGCPGPPGSPDKPSRPHGLVPAGWGMGPRAGEGPYVSEQELQKLFTGIEELRREVSSLTARWHQEEGAVQEALRLLGGLGGRVDGFLGQWERAQREQAQTARDLQELRGRADELCTMVERSAVSVASLRSELEGLGPLKPILEEFGRQFQNSRRGPDLSMNLDRSHQGNCARCASQGSQLSTESLQQLLDRALTSLVDEVKQRGLTPACPSCQRLHKKILELERQALAKHVRAEALSSTLRLAQDEALRAKNLLLTDKMKPEEKMATLDHLHLKMCSLHDHLSNLPLEGSTGTMGGGSSAGTPPKQGGSAPEQ

SEQ ID NO: 70227 - protein, 807 aa, Homo sapiens
MTTEKSLVTEAENSQHQQKEEGEEAINSGQQEPQQEESCQTAAEGDNWCEQKLKASNGDTPTHEDLTKNKERTSESRGLSRLFSSFLKRPKSQVSEEEGKEVESDKEKGEGGQKEIEFGTSLDEEIILKAPIAAPEPELKTDPSLDLHSLSSAETQPAQEELREDPDFEIKEGEGLEECSKIEVKEESPQSKAETELKASQKPIRKHRNMHCKVSLLDDTVYECVVEKHAKGQDLLKRVCEHLNLLEEDYFGLAIWDNATSKTWLDSAKEIKKQVRGVPWNFTFNVKFYPPDPAQLTEDITRYYLCLQLRQDIVAGRLPCSFATLALLGSYTIQSELGDYDPELHGVDYVSDFKLAPNQTKELEEKVMELHKSYRSMTPAQADLEFLENAKKLSMYGVDLHKAKDLEGVDIILGVCSSGLLVYKDKLRINRFPWPKVLKISYKRSSFFIKIRPGEQEQYESTIGFKLPSYRAAKKLWKVCVEHHTFFRLTSTDTIPKSKFLALGSKFRYSGRTQAQTRQASALIDRPAPHFERTASKRASRSLDGAAAVDSADRSPRPTSAPAITQGQVAEGGVLDASAKKTVVPKAQKETVKAEVKKEDEPPEQAEPEPTEAWKVEKTHIEVTVPTSNGDQTQKLAEKTEDLIRMRKDLDKSQEEIKKHHASISELKKNFMESVPEPRPSEWDKRLSTHSPFRTLNINGQIPTGEGVKKTSVLPSERKVGGPETQERALLVQDEEKIKRQERSTERALPQQENEEILPKVSIPIPEDHKSLKKCHLYFSTFPSPRIPFMMSFLVILVLAVWWLVFL

SEQ ID NO: 70228 - protein, 98 aa, Homo sapiens
MSYIPGQPVTAVVQRVEIHKLRQGENLILGFSIGGGIDQDPSQNPFSEDKTDKVNGWDMTMVTHDQARKRLTKRSEEVVRLLVTRQSLQKAVQQSMLS

SEQ ID NO: 70229 - protein, 226 aa, Homo sapiens
MQRAVSVVARLGFRLQAFPPALCRPLSCAQEVLRRTPLYDFHLAHGGKMVAFAGWSLPVQYRDSHTDSHLHTRQHCSLFDVSHMLQTKILGSDRVKLMESLVVGDIAELRPNQGTLSLFTNEAGGILDDLIVTNTSEGHLYVVSNAGCWEKDLALMQDKVRELQNQGRDVGLEVLDNALLALQDLGAGSGGSSPGNSYSEKPRGEAGRAGSQGQPAPGGRPLPVWE

SEQ ID NO: 70230 - protein, 21 aa, Homo sapiens
  MOD_RES (1)..(1): Any amino acid
XIYNQGGKLIFGQGTELSVKP

SEQ ID NO: 70231 - protein, 74 aa, Homo sapiens
MWPQDPSRKEVLRFAVSCRILTLMLQALFNAIIPDHHAEAFSPPRLAPSGFVDQLVEVLCLHPILSARLSPPHS

SEQ ID NO: 70232 - protein, 961 aa, Homo sapiens
MFLTYMETVTKELVSWMRGHESSVFSISVHASGKYAITTSSDTAQLWDLDTFQRKRKLNIRQSVGIQKVFFLPLSNTILSCFKDNSIFAWECDTLFCKYQLPAPPESSSILYKVFAVTRDGRILAAGGKSNHLHLWCLEARQLFRIIQMPTKVRAIRHLEFLPDSFDAGSNQVLGVLSQDGIMRFINMQTCKLLFEIGSLDEGISSSAISPHGRYIASIMENGSLNIYSVQALTQEINKPPPPLVKVIEDLPKNKLSSSDLKMKVTSGRVQQPAKSRESKMQTRILKQDLTGDFESKKNELPDGLNKKRLQILLKGYGEYPTKYRMFIWRSLLQLPENHTAFSTLIDKGTHVAFLNLQKKYPIKSRKLLRVLQRTLSALAHWSVIFSDTPYLPLLAFPFVKLFQNNQLICFEVIATLIINWCQHWFEYFPNPPINILSMIENVLAFHDKELLQHFIDHDITSQLYAWPLLETVFSEVLTREEWLKLFDNIFSNHPSFLLMTVVAYNICSRTPLLSCNLKDDFEFFFHHRNNLDINVVIRQVYHLMETTPTDIHPDSMLNVFVALTKGQYPVFNQYPKFIVDYQTQERERIRNDELDYLRERQTVEDMQAKVDQQRVEDEAWYQKQELLRKAEETRREMLLQEEEKMIQQRQRLAAVKRELKVKEMHLQDAARRRFLKLQQDQQEMELRRLDDEIGRKVYMRDREIAATARDLEMRQLELESQKRLYEKNLTENQEALAKEMRADADAYRRKVDLEEHMFHKLIEAGETQSQKTQKVIKENLAKAEQACLNTDWQIQSLHKQKCDDLQRNKCYQEVAKLLRENRRKEIEIINAMVEEEAKKWKEAEGKEFRLRSAKKASALSDASRKWFLKQEINAAVEHAENPCHKEEPRFQNEQDSSCLPRTSQLNDSSEMDPSTQISLNRRAVEWDTTGQNLIKKVRNLRQRLTARARHRCQTPHLLAA

SEQ ID NO: 70233 - protein, 178 aa, Homo sapiens
KDTTEVAENSHHLKIFLPKKLLECLPRCPLLPPERLRWNTNEEIASYLITFEKHDEWLSCAPKTRPQNGSIILYNRKKVKYRKDGYLWKKRKDGKTTREDHMKLKVQGMEQRPSRVAEVVPGGVVGTAEAHVSWHQVELREWNRRVLCRTPGAADFGHPPNQACSPNPRLSLQWGAWF

SEQ ID NO: 70234 - protein, 772 aa, Homo sapiens
  MOD_RES (1)..(1): Any amino acid
XDFPFQIHNSSGWITVCAELDREEVEHYSFGVEAVDHGSPPMSSSTSVSITVLDVNDNDPVFTQPTYELRLNEDAAVGSSVLTLQARDRDANSVITYQLTGGNTRNRFALSSQRGGGLITLALPLDYKQEQQYVLAVTASDGTRSHTAHVLINVTDANTHRPVFQSSHYTVSVSEDRPVGTSIATLSANDEDTGENARITYVIQDPVPQFRIDPDSGTMYTMMELDYENQVAYTLTIMAQDNGIPQKSDTTTLEILILDANDNAPQFLWDFYQGSIFEDAPPSTSILQVSATDRDSGPNGRLLYTFQGGDDGDGDFYIEPTSGVIRTQRRLDRENVAVYNLWALAVDRGSPTPLSASVEIQVTILDINDNAPMFEKDELELFVEENNPVGSVVAKIRANDPDEGPNAQIMYQIVEGDMRHFFQLDLLNGDLRAMVELDFEVRREYVLVVQATSAPLVSRATVHILLVDQNDNPPVLPDFQILFNNYVTNKSNSFPTGVIGCIPAHDPDVSDSLNYTFVQGNELRLLLLDPATGELQLSRDLDNNRPLEALMEVSVSDGIHSVTAFCTLRVTIITDDMLTNSITVRLENMSQEKFLSPLLALFVEGVAAVLSTTKDDVFVFNVQNDTDVSSNILNVTFSALLPGGVRGQFFPSEDLQEQIYLNRTLLTTISTQRVLPFDDNICLREPCENYMKCVSVLRFDSSAPFLSSTTVLFRPIHPINGLRCRCPPGFTGDYCETEIDLCYSDPCGANGRCRSREGGYTCECFEDFTEIS

SEQ ID NO: 70235 - protein, 198 aa, Homo sapiens
MAGLRNESEQEPLLGDTPGSREWDILETEEHYKSRWRSIRILYLTMFLSSVGFSVVMMSIWPYLQKIDPTADTSFLGWVIASYSLGQMVASPIFGLWSNYRPRKEPLIVSILISVAANCLYAYLHIPASHNKYYMLVARGLLGIGAVFQTCFTFLGEKGVTWDVIKLQINMYTTPVLLSAFLGILNIILILAILSKYR

SEQ ID NO: 70236 - protein, 169 aa, Homo sapiens
MVWKWMPLLLLLVCVATMCSAQDRTDLLNVCMDAKHHKTKPGPEDKLHDQCSPWKKNACCTASTSQELHKDTSRLYNFNWDHCGKMEPACKRHFIQDTCLYECSPNLGPWIQQVNQSWRKERFLDVPLCKEDCQRWWEDCHTSHTCKSNWHRGWDWTSAALCEGLWSHS

SEQ ID NO: 70237 - protein, 51 aa, Homo sapiens
MLPQIPFLLLVSLNLVHGVFYAERYQMPTGIKGPLPNTKTQFFIPYTIKSK

SEQ ID NO: 70238 - protein, 201 aa, Homo sapiens
MKTGHFEIVTMLLATMILVDIFQVKAEVLDMADNAFDDEYLKCTDRMEIKYVPQLLKEEKASHQQLDTVWENAKAKWAARKTQIFLPMNFKDNHGIALMAYISEAQEQTPFYHLFSEAVKMAGQSREDYIYGFQFKAFHFYLTRALQLLRKPCEASSKTVVYRTSQGTSFTFGGLNQARFGHFTLAYSAKPQAANDQLTVL

SEQ ID NO: 70239 - protein, 107 aa, Homo sapiens
MTPTDFTSPPGPAPDHLPSLAQESISFQDLSPGLTQALFLTWLMTMALNPHLPWKTTLTSTSLTSTVRKTMSGSLRAISSHPCTGSCSSWVPWATVLLSLSTGTAQE

SEQ ID NO: 70240 - protein, 194 aa, Homo sapiens
MMSEHDLADVVQIAVEDLSPDHPGTELWDIVLENHVVTDEDEPALKRQRLEINCQDPSIKSFLYSINQTICLRLDSIEAKLQALEATCKSLEEKLDLVTNKQHSPIQVPMVAGSPLGATQTCNKVRCAVPGRRQNTIVVKVPGQEDSHHEDGESGSEASDSVSSCGQAGSQSIGSNVTLITLNSEEDYPNGTWL

SEQ ID NO: 70241 - protein, 145 aa, Homo sapiens
MSVSFHTHTKELWTWMEDLQKEMLEDVCADSVDAVQELIKQFQQQQTATLDATLNVIKEGEDLIQQLRSAPPSLGEPSEARDSAVSNNKTPHSSSISHIESVLQQLDDAQVQMEELFHERKIKLDIFLQLRIFEQYTIEVTAELD

SEQ ID NO: 70242 - protein, 168 aa, Homo sapiens
  MOD_RES (1)..(1): Any amino acid
XKMVKTYLEEELDKWAKIAAYGHEVGKRPWITGDESIVGLMKDIVGANEKEIALMNALTVNLHLLMLSFFKPTPKRYKILLEAKAFPSDHYAIESQLQLHGLNIEESMRMIKPREGEETLRIEDILEVIEKEGDSIAVILFSGVHFYTGQHFNIPAITKAGQAKLTKS

SEQ ID NO: 70243 - protein, 73 aa, Homo sapiens
EEELETEENKFSEVAALPGPRGLLGGVAHTLQKTLQTTISALLAHSHISICIITAFTCIVTLLMLGNQNGDDI

SEQ ID NO: 70244 - protein, 99 aa, Homo sapiens
MEANGSQGTSGSANDSQHDPGKMFIGGLSWQTSPDSLRDYFSKFGEIRECMVMRDPTTKRSRGFGFVTFADPASVDKVLGQPHHELDSKTCRRQKRLVY

SEQ ID NO: 70245 - protein, 64 aa, Homo sapiens
MAAQRGMPSSAVRVLEEALGMGLTAAGDARDTADAVAAEGAYYLEQVTITEASEDDYEYEEVTC

SEQ ID NO: 70246 - protein, 154 aa, Homo sapiens
  MOD_RES (1)..(1): Any amino acid
XCERGRHQSLQCRSPEEQCLDVVTHWIQEGEEGRPKDDRHLRGCGYLPGCPGSNGFHNNDTFHFLKCCNTTKCNEGPILELENLPQNGRQCYSCKGNSTHGCSSEETFLIDCRGPMNQCLVATGTHGCGHFCHGKVEFRLGAVAEACTLSTLGG

SEQ ID NO: 70247 - protein, 136 aa, Homo sapiens
MEERKLLHSFLAKSQDGLPPRRMKDSYIEVLLPLGSEPELREKYLTVQNTVRFGRILEDLDSLGVLICYMHNKIHSAKMSPLSIVTALVDKIDMCKKSLSPEQDIKFSGHVSWVGKTSMEVKMQMFQAGICKSTHP

SEQ ID NO: 70248 - protein, 149 aa, Homo sapiens
MLRGGRRGQLGWHSWAAGPGSLLAWLILASAGAAPCPDACCPHGSSGLRCTRDGALDSLHHLPGAENLTELYIENQQHLQHLELRDLRGLGELRNLTIVKSGLRFVAPDAFHFTPRLSRLAQIHTSAKGASGRSRTPGFWLGLHFPGTH

SEQ ID NO: 70249 - protein, 108 aa, Homo sapiens
MREYKVVVLGSGGVGKSALTVQFVTGTFIEKYDPTIEDFYRKEIEVDSSPSVLEILDTAGTEQFASMRDLYIKNGQGFILVYSLVNQQSFQDIKPMRDQIIRVKRPML

SEQ ID NO: 70250 - protein, 544 aa, Homo sapiens
MPEELTSSLHAFKNKAFKKSKVCGVCKQIIDGQGISCRACKYSCHKKCEAKVVIPCGVQVRLEQAPGSSTLSSSLCRDKPLRPVILSPTMEEGHGLDLTYITERIIAVSFPAGCSEESYLHNLQEVTRMLKSKHGDNYLVLNLSEKRYDLTKLNPKIMDVGWPELHAPPLDKMCTICKAQESWLNSNLQHVVVIHCRGGKGRIGVVISSYMHFTNVSASADQALDRFAMKKFYDDKVSALMQPSQKRYVQFLSGLLSGSVKMNASPLFLHFVILHGTPNFDTGGVCRPFLKLYQAMQPVYTSGIYNVGPENPSRICIVIEPAQLLKGDVMVKCYHKKYRSATRDVIFRLQFHTGAVQGYGLVFGKEDLDNASKDDRFPDYGKVELVFSATPEKIQGSEHLYNDHGVIVDYNTTDPLIRWDSYENLSADGEVLHTQGPVDGSLYAKVRKKSSSDPGIPGGPQAIPATNSPDHSDHTLSVSSDSGHSTASARTDKTEERLAPGTRRGLSAQEKAELDQLLSGFGLEDPGSSLKEMTDARSKYSGTR

SEQ ID NO: 70251 - protein, 125 aa, Homo sapiens
MGNIFEKLFKSLLGKKKMRILILSLDTAGKTTILYKLKLGETVPAVPTVGFCVETVEYKNNTFGVWDVGSHFKIRPLWQHFFQNTKELSASQFAQFIKKLCGVTGTNDEASPGSLTSYPSHLLDR

SEQ ID NO: 70252 - protein, 49 aa, Homo sapiens
MRLRVRLLKRTWPLEVPETEPTLGHLRSHLRQSLLCTWGYRFRAFFTPE

SEQ ID NO: 70253 - protein, 48 aa, Homo sapiens
  MOD_RES (1)..(1): Any amino acid
XMDGDRGKPNRILYSLVNDFPRQCRTILWHDSPAPPCGPVQNFRVHLP

SEQ ID NO: 70254 - protein, 77 aa, Homo sapiens
MEEAKKMISGLQALLLNGSLPEDEQERPLALCEPGVNPEEQLIIIQSRLDQSMEENQDLKKELLKCKQEARNLQGIK

SEQ ID NO: 70255 - protein, 226 aa, Homo sapiens
MGAPLEVLQNRVLDARIFHTEFGSGVAILTGAHRFTLSANVGDLKLRRMPEVPGLQSAPSCWTVLCQDRVAHILLAVGPDLYLLDHAACSAVTPPGLAPGVSSFLQMAVSFTYRHLALFTDTGYIWMGTASLKEKLCEFNCNIRAPPKQMVWCSRPRSKERAVVVAWERRLMVVGDAPESIQFVLDEDSYLVPELDGVRIFSRSTHEFLHEVPAASEEIFKIASMA

SEQ ID NO: 70256 - protein, 460 aa, Homo sapiens
MISQFFILSSKGDPLIYKDFRGDSGGRDVAELFYRKLTGLPGDESPVVMVTSGGRRHHHGRHFIHIRHSGLYLVVTTSENVSPFSLLELLSRLATLLGDYCGSLGEGTISRNVALVYELLDEVLDYGYVQTTSTEMLRNFIQTEAVVSKPFSLFDLSSVGLFGAETQQSKVAPSSAASRPVLSSRSDQSQKNEVFLDVVERLSVLIASNGSLLKVDVQGEIRLKSFLPSGSEMRIGLTEEFCVGKSELRGYGPGIRVDEVSFHSSVNLDEFESHRILRLQPPQGELTVMRYQLSDDLPSPLPFRLFPSVQWDRGSGRLQVYLKLRCDLLSKSQALNVRLHLPLPRGVVSLSQELSSPEQKAELAEGALRWDLPRVQGGSQLSGLFQMDVPGPPGPPSHGLSTSASPLGLGPASLSFELPRHTCSGLQVRFLRLAFRPCGNANPHKWVRHLSHSDAYVIRI

SEQ ID NO: 70257 - protein, 132 aa, Homo sapiens
MTHLLLTATVTPSEQNSSREPGWETAMAKDILGEAGLHFDELNKLRVLDPEVTQQTIELKEECKDFVDKIGQFQKIVGGLIELVDQLAKEAENEKMKAIGARNLLKSIAKQREAQQQQLQALIAEKKMQLER

SEQ ID NO: 70258 - protein, 204 aa, Homo sapiens
MGTVSSRRSWWPLPLLLLLLLLLGPAGARAQEDEDGDYEELVLALRSEEDGLAEAPEHGTTATFHRCAKDPWRLPGTYVVVLKEETHLSQSERTARRLQAQAARRGYLTKILHVFHGLLPGFLVKMSGDLLELALKLPHVDYIEEDSSVFAQSIPWNLERITPPRYRADEYQPPGVPGPGHFRWRRTLLAATCLKSSFGLAESF

SEQ ID NO: 70259 - protein, 89 aa, Homo sapiens
MSGVRGLSRLLSARRLALAKACTDTACKLFESSLIRGKRKPRNFNSYWLTAYFSGQQCCKQEPEVFTSLLMGTRGHLLKFQIPFLLSIQ

SEQ ID NO: 70260 - protein, 166 aa, Homo sapiens
MEHKEVVLLLLLFLKSGQGEPLDDYVNTQGASLFSVTKKQLGAGSIEECAAKCEEDEEFTCRYFHCRCTYAGICNSDGKAFQYHSKEQQCVIMAENRKSSIIIRMRDVVLFEKKVYLSECKTGNGKNYRGTMSKTKNGITCQKWSSTSPHRPRFSPATHPSEGLEE

SEQ ID NO: 70261 - protein, 1056 aa, Homo sapiens
MSSEEDKSVEQPQPPPPPPEEPGAPAPSPAAADKRPRGRPRKDGASPFQRARKKPRSRGKTAVEDEDSMDGLETTETETIVETEIKEQSAEEDAEAEVDNSKQLIPTLQRSVSEESANSLVSVGVEAKISEQLCAFCYCGEKSSLGQGDLKQFRITPGFILPWRNQPSNKKDIDDNSNGTYEKMQNSAPRKQRGQRKERSPQQNIVSCVSVSTQTASDDQAGKLWDELSLVGLPDAIDIQALFDSTGTCWAHHRCVEWSLGVCQMEEPLLVNVDKAVVSGSTERCAFCKHLGATIKCCEEKCTQMYHYPCAAGAGTFQDFSHIFLLCPEHIDQAPERSKEDANCAVCDSPGDLLDQFFCTTCGQHYHGMCLDIAVTPLKRAGWQCPECKVCQNCKQSGEDSKMLVCDTCDKGYHTFCLQPVMKSVPTNGWKCKNCRICIECGTRSSSQWHHNCLICDNCYQQQDNLCPFCGKCYHPELQKDMLHCNMCKRWVHLECDKPTDHELDTQLKEEYICMYCKHLGAEMDRLQPGEEVEIAELTTDYNNEMEVEGPEDQMVFSEQAANKDVNGQESTPGIVPDAVQVHTEEQQKSHPSESLDTDSLLIAVSSQHTVNTELEKQISNEVDSEDLKMSSEVKHICGEDQIEDKMEVTENIEVVTHQITVQQEQLQLLEEPETVVSREESRPPKLVMESVTLPLETLVSPHEESISLCPEEQLVIERLQGEKEQKENSELSTGLMDSEMTPTIEGCVKDVSYQGGKSIKLSSETESSFSSSADISKADVSSSPTPSSDLPSHDMLHNYPSALSSSAGNIMPTTYISVTPKIGMGKPAITKRKFSPGRPRSKQGAWSTHNTVSPPSWSPDISEGREIFKPRQLPGSAIWSIKVGRGSGFPGKRRPRGAGLSGRGGRGRSKLKSGIGAVVLPGVSTADISSNKDDEENSMHNTVVLFSSSDKFTLNQDMCVVCGSFGQGAEGRLLACSQCGQCYHPYCVSIKKENLWIVMENQNLVLSGKLWMMKLREWKEQMVSKREKGNHTDQVLVDLWCGKEVELGKGKPKDL

SEQ ID NO: 70262 - protein, 417 aa, Homo sapiens
MSSKGSSTDGRTDLANGSLSSSPEEMSGAEEGRETSSGIEVEASDLSLSLTGDDGGPNRTSTESRGTDTESSGEDKDSDSMEDTGHYSINDENRVHDRSEEEEEEEEEEEEEQPRRRVQRKRANRDQDSSDDERALEDWVSSETSALPRPRWQALPALRERELGSSARFVYEACGARVFVQRFRLQHGLEGHTGCVNTLHFNQRGTWLASGSDDLKVVVWDWVRRQPVLDFESGHKSNVFQAKFLPNSGDSTLAMCARDGQVRVAELSATQCCKNTKRVAQHKGASHKLALEPDSPCTFLSAGEDAVVFTIDLRQDRPASKLVVTKEKEKKVGLYTIYVNPANTHQFAVGGRDQFVRIYDQRKIDENENNGVLKKFCPHHLSSWPVTMMKTFTSSTPLTVMGPSMLRDTRATEIMPQ

SEQ ID NO: 70263 - protein, 83 aa, Homo sapiens
MVEVLYFAKSAEITGVRSETISVPQEIKALQLWKEIETRHPGLADVRNQIIFAVRQEYVELGDQLLVLQPGDEIAVIPPISGG

SEQ ID NO: 70264 - protein, 74 aa, Homo sapiens
MAEASPHPGRYFCHCCSVEIVPRLPDYICPRCESGFIEELPEETRSTENGSAPSTAPTDQSRPPLERPQQTARA

SEQ ID NO: 70265 - protein, 320 aa, Homo sapiens
  MOD_RES (1)..(1): Any amino acid
XTVAAMYYSYYMLPDGTYCLAPPPPGIDVTTYYSTLPAGVTVSNSPGVTTTAPPPPGTTPLPPPTTAETSSGATSTTTTTSALAPVAAIIPPPPDVQPVIDKLAEYVARNGLKFETSVRAKNDQRFEFLQPWHQYNAYYEFKKQFFLQKEGGDSMQAVSAPEEAPTDSAPEKPSDAGEDGAPEDAAEVGARAGSGGKKEASSSKTVPDGKLVKAKQKLEDRLAAAAREKLAQASKESKEKQLQAERKRKAALFLQTLKNPLPEAEAGKIEESPFSVEESSTTPCPLLTGGRPLPTLEVKPPDRPSSKSKDPPREEEKEKK

SEQ ID NO: 70266 - protein, 94 aa, Homo sapiens
  MOD_RES (1)..(1): Any amino acid
XAGKVEEQHLRTRDIINVSNRYFNPSGEPLELDSRFWELRDSIVQCELLMLRVLRFQVSFQHPHKVFNDDLTKPIIDNIVSDLIQIYTMDTEIP

SEQ ID NO: 70267 - protein, 93 aa, Homo sapiens
MSSEVSARRDAKKLVRSPSGLRMVPEHRAFGSPFGLEEPQWVPDKECRRCMQCDAKFDFLTRKVRRIPAAWWGAQGLATGGARVQRPAQGPRV

SEQ ID NO: 70268 - protein, 232 aa, Homo sapiens
MWQLLLPTALLLLVSAGMRTDLPKAVVFLEPQWYSVLEKDSVTLKCQGAYSPEDNSTQWFHNENLISSQASSYFIDAATVNDSGEYRCQTNLSTLSDPVQLEVHIGWLLLQAPRWVFKEEDPIHLRCHSWKNTALHKVTYLQNGKDRKYFHHNSDFHIPKATLKDSGSYFCRGLVGSKNVSSETVNITITQGLAVSTISSFSPPGYQVSFCLVMVLLFAVDTGLYFSVKTNI

SEQ ID NO: 70269 - protein, 920 aa, Homo sapiens
MEHGTLLAQPGLWTRDTSWALLYFLCYILPQTAPQVLRIGGIFETVENEPVNVEELAFKFAVTSINRNRTLMPNTTLTYDIQRINLFDSFEASRRACDQLALGVAALFGPSHSSSVSAVQSICNALEVPHIQTRWKHPSVDNKDLFYINLYPDYAAISRAILDLVLYYNWKTVTVVYEDSTGLIRLQELIKAPSRYNIKIKIRQLPSGNKDAKPLLKEMKKGKEFYVIFDCSHETAAEILKQILFMGMMTEYYHYFFTTLDLFALDLELYRYSGVNMTGFRLLNIDNPHVSSIIEKWSMERLQAPPRPETGLLDGMMTTEAALMYDAVYMVAIASHRASQLTVSSLQCHRHKPWRLGPRFMNLIKEARWDGLTGHITFNKTNGLRKDFDLDIISLKEEGTEKAAGEVSKHLYKVWKKIGIWNSNSGLNMTDSNKDKSSNITDSLANRTLIVTTILEEPYVMYRKSDKPLYGNDRFEGYCLDLLKELSNILGFIYDVKLVPDGKYGAQNDKGEWNGMVKELIDHRADLAVAPLTITYVREKVIDFSKPFMTLGISILYRKPNGTNPGVFSFLNPLSPDIWMYVLLACLGVSCVLFVIARFTPYEWYNPHPCNPDSDVVENNFTLLNSFWFGVGALMQQGSELMPKALSTRIVGGIWWFFTLIIISSYTANLAAFLTVERMESPIDSADDLAKQTKIEYGAVRDGSTMTFFKKSKISTYEKMWAFMSSRQQTALVRNSDEGIQRVLTTDYALLMESTSIEYVTQRNCNLTQIGGLIDSKGYGVGTPIGSPYRDKITIAILQLQEEGKLHMMKEKWWRGNGCPEEDNKEASALGVENIGGIFIVLAAGLVLSVFVAIGEFIYKSRKNNDIEQCLSFNAIMEELGISLKNQKKIKKKSRTKGKSSFTSILTCHQRRTQRKETVA

SEQ ID NO: 70270 - protein, 151 aa, Homo sapiens
MEATGTDEVDKLKTKFISAWNNMKYSWVLKTKTYFSRNSPVLLLGKCYHFKYEDEDKTLPAESGCTIEDHVIAGNVEEFRKDFISRIWLTYREEFPQIEGSALTTDCGWGCTLRTGQMLLAQGLILHFLGRAWTWPDALNIENSDSESWTS

SEQ ID NO: 70271 - protein, 84 aa, Homo sapiens
MMMLQNILQINSGDLLRIGRKALYSILDEVIFKLFSTPSPVIRSTATKLLLLMAESHQEILILLRQSTCYKGLRRLLSKQETGT

SEQ ID NO: 70272 - protein, 409 aa, Homo sapiens
MTSTNSVKLEMQSDEECDRKPLSREDEIRGHDEGSSLEEPLIESSEVADNRKVQELQGEGGIRLPNGERPFHCNQCGASFTQKGNLLRHIKLHSGEKPFKCPFCSYACRRRDALTGHLRTHSVGKPHKCNYCGRSYKQRSSLEEHKERCHNYLQNVSMEAAGQVMSHHGEKLMRFSYPDIHFDMNLTYEKEAELMQSHMMDQAINNAITYLGAEALHPLMQHPPSTIAEVAPVISSAYSQVYHPNRIERPISRETADSHENNMDGPISLIRPKSRPQEREASPSNSCLDSTDSESSHDDHQSYQGHPALNPKRKQSPAYMKEDVKALDTTKAPKGSLKDIYKVFNGEGEQIRAFKCEHCRVLFLDHVMYTIHMGCHGYRDPLECNICGYRSQDRYEFSSHIVRGEHTFH

SEQ ID NO: 70273 - protein, 62 aa, Homo sapiens
LVDSAETKNHRPGNGAGPKKAPSRARNSGTQSDGEALGPGLPHPDLSKERESQAEEGPGGAP

SEQ ID NO: 70274 - protein, 186 aa, Homo sapiens
FHRPRATVMVMVKGVNKLALPPGSVISYPLENLSRHKHLAKDHSPDLYSLELAGLDEIGKRYGEDSEQFRDASKILVDALQKFADDMYSLYGGNAVVELVTVKSFDTSLIRKTRTILEAKQAKNPASPYNLAYKYNFEYSVVFNMVLWIMIALALAVIITSYNIWNMDPGYDSIIYRMTNQKIRMD

SEQ ID NO: 70275 - protein, 636 aa, Homo sapiens
MSSLPGCIGLDAATATVESEEIAELQQAVVEELGISMEELRHFIDEELEKMDCVQQRKKQLAELETWVIQKESEVAHVDQLFDDASRAVTNCESLVKDFYSKLGLQYRDSSSEDESSRPTEIIEIPDEDDDVLSIDSGDAGSRTPKDQKLREAMAALRKSAQDVQKFMDAVNKKSSSQDLHKGTLSQMSGELSKDGDLIVSMRILGKKRTKTWHKGTLIAIQTVGPGKKYKVKFDNKGKSLLSGNHIAYDYHPPADKLYVGSRVVAKYKDGNQVWLYAGIVAETPNVKNKLRFLIFFDDGYASYVTQSELYPICRPLKKTWEDIEDISCRDFIEEYVTAYPNRPMVLLKSGQLIKTEWEGTWWKSRVEEVDGSLVRILFLDDKRCEWIYRGSTRLEPMFSMKTSSASALEKKQGQLRTRPNMGAVRSKGPVVQYTQDLTGTGTQFKPVEPPQPTAPPAPPFPPAPPLSPQAGDSESLESQLAQSRKQVAKKSTSFRPGSVGSGHSSPTSPALSENVSGGKPGINQTYRSPLGSTASAPAPSALPAPPAPPVFHGMLERAPAEPSYRAPMEKLFYLPHVCSYTCLSRVRPMRNEQYRGKNPLLVPLLYDFRRMTARRRVNRKMGFHVIYKTPCGLCL

SEQ ID NO: 70276 - protein, 259 aa, Homo sapiens
  MOD_RES (1)..(1): Any amino acid
XTNAMEKYSPKFEIYSENILNSLKDITVKGPSLLNANLLDSLWDTFQNKSAARGKVVLLFSDGLDDDVEKLEQKSDELRKEGLNALITVALDGPADSSDLADLPYIEFGKGFEYRTQLSIGMRELGSRLSKQLVNVAERTCCCLFCKCIGGDGTMGDPGPPGKRLHVKRVVDFFKKQGSERMERKGPPGFKGSEGYLGEEGIAGERGAPGPVGEQGTKGCYGTKGPKGNRGLNGQEGEVGENGIDGLNGEQGDNGLPGR

SEQ ID NO: 70277 - protein, 84 aa, Homo sapiens
MDLLFQLLVTFRDVAIDFSQEEWECLDPAQRDLYRDVMLENYSNLISLDLESSCVTKKLSPEKEIYEMESLQWENMGKRINHHL

SEQ ID NO: 70278 - protein, 285 aa, Homo sapiens
CVAAFAVSAVASQWERTGKPFNPLLGETYELVRHNEAYTWTNPTCCVHNIIVGKLWIEQYGNVEIINHKTGDKCVLNFKPCGLFGKELHKVEGYIQDKSKKKLCALYGKWTECLYSVDPATFDAYKKNDKKNTEEKKNSKQMSTSEELDEMPVPDSESVFIIPGSVLLWRIAPRPPNSAQMYNFTSFAMVLNEVDKDMESVIPKTDCRLRPDIRAMENGEIDQASEEKKRLEEKQRAARKNRSKSEEDWKTRWFHQGPNPYNGAQDWIYSGSYWDRNYFNLPDIY

SEQ ID NO: 70279 - protein, 217 aa, Homo sapiens
MHRKHLQEIPDLSSNVATSFTWGWDSSKTSELLSGMGVSALEKEEPDSENIPQELLSNLGHPESPPRKRLKSKGSDKDFVIVRRPKLNRENFPDLSTLVRRCPNLVHLDLSDSVMLKNDCFQEFFQLNYLQHLSLSRCYDIIPETLLELGEIPTLKTLQVFGIVPDGTLQLLKEALPHLQINCSHFTTIARPTIGNKKNQEIWGIKCRLTLQKPSCL

SEQ ID NO: 70280 - protein, 527 aa, Homo sapiens
MASNDYTQQATQSYGAYPTQPGQGYSQQSSQPYGQQSYSGYSQSTDTSGYGQSSYSSYGQSQNTGYGTQSTPQGYGSTGGYGSSQSSQSSYGQQSSYPGYGQQPAPSSTSGSYGSSSQSSSYGQPQSGSYSQQPSYGGQQQSYGQQQSYNPPQGYGQQNQYNSSSGGGGGGGGGGNYGQDQSSMSSGGGSGGGYGNQDQSGGGGSGGYGQQDRGGRGRGGSGGGGGGGGGGYNRSSGGYEPRGRGGGRGGRGGMGGSDRGGFNKFGGPRDQGSRHDSAEQDNSDNNTIFVQGLGENVTIESVADYFKQIGIIKTNKKTGQPMINLYTDRETGKLKGEATVSFDDPPSAKAAIDWFDGKEFSGNPIKVSFATRRADFNRGGGNGRGGRGRGGPMGRGGYGGGGSGGGGRGGFPSGGGGGGGQQRAGDWKCPNPTCENMNFSWRNECNQCKAPKPDGPGGGPGGSHMGGNYGDDRRGGRGGYDRGGYRGRGGDRGGFRGGRGGGDRGGFGPGKMDSRGEHRQDRRERPY

SEQ ID NO: 70281 - protein, 203 aa, Homo sapiens
MMEEEELEFVEELEAVLQLTPEVQLAIEQVFPSQDPLDRADFNAVEYINTLFPTEQSLANIDEVVNKIRLKIRRLDDNIRTVVRGQTNVGQDGRQALEEAQKAIQQLFGKIKDIKDKAEKSEQMVKEITRDIKQLDHAKRHLTTSITTLNHLHMLAGGVDSLEAMTRRRQYGEVANLLQGVMNVLEHFHKYMGIPQIRQLSER

SEQ ID NO: 70282 - protein, 155 aa, Homo sapiens
  MOD_RES (1)..(1): Any amino acid
XKRLQKELLALQNDPPPGMTLNEKSVQNSITQWIVDMEGAPGTLYEGEKFQLLFKFSSRYPFDSPQVMFTGENIPVHPHVYSNGHICLSILTEDWSPALSVQSVCLSIISMLSSCKEKRRPPDNSFYVRTCNKNPKKTKWWYHELKSAFILSITD

SEQ ID NO: 70283 - protein, 75 aa, Homo sapiens
  MOD_RES (1)..(1): Any amino acid
XYGKGKLLMDMALFMGRSFRVGWGPNWTLANSGEQLNGSHELENHQIADSMEFGFLPNPVAVKPCEALEPDMDTM

SEQ ID NO: 70284 - protein, 590 aa, Homo sapiens
MDILKSESYGTVVRISPQDFPQNPGFGDVSDSEVWLDSHLGSPGLKVTGFTFQNNCLNEETVVPKTFTKDAPQGCKELGSSGLDCQPLESQGESAEGMSQRCEECGKGIRATSDIALHWEINTQKISRCQECQKKLSDCLQGKHTNNCHGEKPYECAECGKVFRLCSQLNQHQRIHTGEKPFKCTECGKAFRLSSKLIQHQRIHTGEKPYRCEECGKAFGQSSSLIHHQRIHTGERPYGCRECGKAFSQQSQLVRHQRTHTGERPYPCKECGKAFSQSSTLAQHQRMHTGEKAQILKASDSPSLVAHQRIHAVEKPFKCDECGKAFRWISRLSQHQLIHTGEKPYKCNKCTKAFGCSSRLIRHQRTHTGEKPFKCDECGKGFVQGSHLIQHQRIHTGEKPYVCNDCGKAFSQSSSLIYHQRIHKGEKPYECLQCGKAFSMSTQLTIHQRVHTGERPYKCNECGKAFSQNSTLFQHQIIHAGVKPYECSECGKAFSRSSYLIEHQRIHTRAQWFYEYGNALEGSTFVSRKKVNTIKKLHQCEDCEKIFRWRSHLIIHQRIHTGEKPYKCNDCGKAFNRSSRLTQHQKIHMG

SEQ ID NO: 70285 - protein, 98 aa, Homo sapiens
MRHAKGLDQDTFKTCKEYLRPLKKFLRKLHLPRDLPQKKKLKYMKQSLVVLGDHINTFLQHYCQAWEIKHWRKMLWRFISLFSELEAKQLRRLYKYTK

SEQ ID NO: 70286 - protein, 422 aa, Homo sapiens
MWLFFGITGLLTAALSGHPSPAPPDQLNTSSAESELWEPGERLPVRLTNGSSSCSGTVEVRLEASWEPACGALWDSRAAEAVCRALGCGGAEAASQLAPPTPELPPPPAAGNTSVAANATLAGAPALLCSGAEWRLCEVVEHACRSDGRRARVTCAENRALRLVDGGGACAGRVEMLEHGEWGSVCDDTWDLEDAHVVCRQLGCGWAVQALPGLHFTPGRGPIHRDQVNCSGAEAYLWDCPGLPGQHYCGHKEDAGAVCSASRSLHNLSTPEVPASVQTVTIESSVTVKIENKESRELMLLIPSIVLGILLLGSLIFIAFILLRIKGKYVFMLPIQVQAPPPEDSDSGSDSDYEHYDFSAQPPVALTTFYNSQRHRVTDEEVQQSRFQMPPLEEGLEELHASHIPTANPGHCITDPPSLGPQ

SEQ ID NO: 70287 - protein, 127 aa, Homo sapiens
MGSLTFRDVAIEFSLEEWQCLDTAQQNLYRNVMLENYRNLVFLGIAAFKPDLIIFLEEGKESWNMKRHEMVEESPVICSHFAQDLWPEQGIEDSFQKVILRRYKIHHHACELGPIMNHHPTCGQMHI

SEQ ID NO: 70288 - protein, 123 aa, Homo sapiens
MALVPCQVLRMAILLSYCSILCNYKAIEMPSHQTYGGSWKFLTFIDLFVVAVFWIIYAYDREMIYPKLLDNFIPGWLNHGMHTTVLPFILIEMRTSHHQYPSRSSGLTAICTFSVGYILWVCW

SEQ ID NO: 70289 - protein, 129 aa, Homo sapiens
MFRITNIEFLPEYRQKESREFLSVSRTVQQVINLVYTTSAFSKFYEQSVVADVSNNKGGLLVHFWIVFVMPRAKGHIFCEDCVAAILKDSIQTSIINRTSVGSLQGLAVDMDSVVLNEVLGLTLIVWID

SEQ ID NO: 70290 - protein, 135 aa, Homo sapiens
MKILLVFDFDNTIIDDNSDTWIVQCAPNKKLPIELRDSYRKGFWTEFMGRVFKYLGDKGVREHEMKRAVTSLPFTPGMVELFNFIRKNKDKFDCIIISDSNSVFIDWVLEAASFHDIFDKVFTNPAAFNSNGHLT

SEQ ID NO: 70291 - protein, 425 aa, Homo sapiens
MAAVATCGSVAASTGSAVATASKSNVTSFQRRGPRASVTNDSGPRLVSIAGTRPSVRNGQLLVSTGLPALDQLLGGGLAVGTVLLIEEDKYNIYSPLLFKYFLAEGIVNGHTLLVASAKEDPANILQELPAPLLDDKCKKEFDEDVYNHKTPESNIKMKIAWRYQLLPKMEQIGPVSSSRFGHYYDASKRMPQELIEASNWHGFFLPEKISSTLKVEPCSLTPGYTKLLQFIQNIIYEEGFDGSNPQKKQRNILRIGIQNLGSPLWGDDICCAENGGNSHSLTKFLYVLRGLLRTSLSACIITMPTHLIQNKAIIARVTTLSDVVVGLESFIGSERETNPLYKDYHGLIHIRQIPRLNNLICDESDVKDLAFKLKRKLFTIERLHLPPDLSDTVSRSSKMDLAESAKRLGPGCGMMAGGKKHLDF

SEQ ID NO: 70292 - protein, 72 aa, Homo sapiens
MEDKVTSPEKAEEAKLKARYPHLGQKPGGSDFLRKRLQKGQKYFDSGDYNMAKAKMKNKQLPTAAPDKTEVT

SEQ ID NO: 70293 - protein, 439 aa, Homo sapiens
MRELPAGLLPPGREVHQCAKCRESFHGSPLGGQQCYRLISVEQECCLDPTSQTNCFHEPKRRALGPGRTVLFGVQPKFTNVDIRLTLDVTFGAVDLYVSTSYDTFVVRVAPDTGVHTVHIQPPPAPPPPPPPADGGPRGAGDPGGAGASSGPGAPAEPRVREVWPRGLITYVTVTEPSAVLVVRGVRDRLVITYPHEHHALKSSRFYLLLLGVGDPSGPGANGSADSQGLLFFRQDQAHIDLFVFFSVFFSCFFLFLSLCVLLWKAKQALDQRQEQRRHLQEMTKMASRPFAKVTVCFPPDPTAPASAWKPAGLPPPAFRRSEPFLAPLLLTGAGGPWGPMGGGCCPPAIPATTAGLRAGPITLEPTEDGMAGVATLLLQLPGGPHAPNGACLGSALVTLRHRLHEYCGGGGGAGGSGHGTGAGRKGLLSQDNLTSMSL

SEQ ID NO: 70294 - protein, 270 aa, Homo sapiens
RRGPLGMRWGAGVVHSGLGARTSIYFPPGARAPSRWLGFLGKATPRPARPSRRTLGSATALMIRESEDSTDFNDKILNEPLKHSDFFNVKELFSVRSLFDARVHLGHKAGCRHRFMEPYIFGSRLDHDIIDLEQTATHLQLALNFTAHMAYRKGIILFISRNRQFSYLIENMARDCGEYAHTRYFRGGMLTNARLLFGPTVRLPDLIIFLHTLNNIFEPHVAVRDAAKMNIPTVGIVDTNCNPCLITYPVPGNDDSPLAVHLYCRLFQTA

SEQ ID NO: 70295 - protein, 44 aa, Homo sapiens
MACRGGAGNGHRASATLSRVSPGSLYTCRTRTHNICMGSICLVV

SEQ ID NO: 70296 - protein, 92 aa, Homo sapiens
MSALGAVIALLLWGQLFAVDSGNDVTDIADDGCPKPPEIAHGYVEHSVRYQCKNYYKLRTEGDGVYTLNNEKQWINKAVGDKLPECEAAHTE

SEQ ID NO: 70297 - protein, 580 aa, Homo sapiens
MFTLPSTLRSNAKTNHQSSDSEGNFETPEAETPIRSPFKESCDPSLGLAGPGAKSQESQEADEQLVAEVVEKCSSKTCSKPSENEVPQQAIDSHSVKNFREEPEHDFSKISIVRPFSIETKDSTDISAVLGTKAAHGCVTAVSGKALPSSPPDALQDEAMTEGSMGVTLEASAEADLKAGNSCPELVPSRRSKLRKPKPVPLRKKAIGGEFSDTNAAVEGTPLPKASYHFSPEELDENTSPLLGDARFQKSPPDLKETPGTLSSDTNDSGVELGEESRSSPLKLEFDFTEDTGNIEARKALPRKLGRKLGSTLTPKIQKDGISKSAGLEQPTDPVARDGPLSQTSSKPDPSQWESPSFNPFGSHSVLQNSPPLSSEGSYHFDPDNFDESMDPFKPTTTLTSSDFCSPTGNHVNEILESPKKAKSRLITSGCKVKKHETQSLALDACSRDEGAVISQISDISNRDGHATDEEKLASTSCGQKSAGAEVKGIEKETCQKMEEDGSTVLGLLESSAEKAPVSVSCGGESPLDGICLSESDKTAVLTLIREEIITKEIEANEWKKKYEETRQEVLEMRKESYEP

SEQ ID NO: 70298 - protein, 9 aa, Homo sapiens
MSHLQSLLL

SEQ ID NO: 70299 - protein, 85 aa, Homo sapiens
MLAKLLCDQVVGAPIAVSAFYAGMSILQGKDDIFLDLKQKFWNTYMEHGADPGHLPPATGVREGGPAHQVLCRGTGAPAELPGPA

SEQ ID NO: 70300 - protein, 93 aa, Homo sapiens
MATAAQGPLSLLWGWLWSERFWLPENVSWADLEGPADGYGYPRGRHILSVFPLAAGIFFVRLLFERLECSGAISLQPSTPWFKRFSCLSLPSS

SEQ ID NO: 70301 - protein, 148 aa, Homo sapiens
MEAAAQFFVESPDVVYGPEAIEAQYEYRTTRVSREGGVLKVHPTSTRFTFRTARQVPRLGVMLVGWGGNNGSTLTAAVLANRLRLSWPTRSGRKEANYYGSLTQAGTVSLGLDAEGQEVFVPFSAVLPMVAPNDLVFDGWDISSLNLA

SEQ ID NO: 70302 - protein, 85 aa, Homo sapiens
MGRKKIQITRIMDERNRQVTFTKRKFGLMKKAYELSVLCDCEIALIIFNSSNKLFQYASTDMDKVLLKYTEYNEPHESRTNSDIV

SEQ ID NO: 70303 - protein, 163 aa, Homo sapiens
MQLITDIPLLDITYEISVEAISTMVVFLSCQLFHKEVLRQSISHKYLMRGPCLPYTSKLVKTLLYNFIRQEKPPPPGAHVFPQQSDGGGLLYGLASGVATGLWTVFTLGGVGSKAAASPELSSPLANQSLLLLLVLANLTDASDAPNPYRQAIMSFKNTQDSS

SEQ ID NO: 70304 - protein, 19 aa, Homo sapiens
MSKSKVDNQFYSVEVGDST

SEQ ID NO: 70305 - protein, 224 aa, Homo sapiens
MAKRSRGPGRRCLLALVLFCAWGTLAVVAQKPGAGCPSRCLCFRTTVRCMHLLLEAVPAVAPQTSILDLRFNRIREIQPGAFRRLRNLNTLLLNNNQIKRIPSGAFEDLENLKYLYLHFNQIETLDPDSFQHLPKLERLFLHNNRITHLVPGTFNHLESMKRLRLDSNTLHCDCEILWLADLLKTYAESGNAQAAAICEYPRRIQGRSVATITPEELNCERPRI

SEQ ID NO: 70306 - protein, 149 aa, Homo sapiens
MADDLEQQSQGWLSSWLPTWRPTSMSQLKNVEARILQCFGRSSRPAFPRDPEGAEDEFVTSIETWRETMGIPSMILLGHSLGGFLATSYSIKYPDRVKHLILVDPWGFPLRPTNPSEIRAPPAWVKAVASVLGRSNPLAVLRVAGPWGE

SEQ ID NO: 70307 - protein, 92 aa, Homo sapiens
MAEQDVENDLLDYDEEEEPQAPQESTPAPPKKDIKGSYVSIHSSGFRDFLLKPELLRAIVDCGFEHPSEVQHECIPQAILGMDVLCQAKSGM

SEQ ID NO: 70308 - protein, 51 aa, Homo sapiens
MVMAEGTAVLRRNRPGTKAQYIQQNIRADCSNIDKILEPPEGQDEGSSALS

SEQ ID NO: 70309 - protein, 39 aa, Homo sapiens
  MOD_RES (1)..(1): Any amino acid
XPCRCFLFTATLEQARHNNRVPLQDLLLVGNDTPDAVDK

SEQ ID NO: 70310 - protein, 38 aa, Homo sapiens
  MOD_RES (1)..(1): Any amino acid
XEPCTSPEAMGPSGHRRRCLVPASPEQHVEVDKMKDTM

SEQ ID NO: 70311 - protein, 213 aa, Homo sapiens
MDGAMGPRGLLLCMYLVSLLILQAMPALGSATGRSKSSEKRQAVDTAVDGVFIRSLKVNCKVTSRFAHYVVTSQVVNTANEAREVAFDLEIPKTAFISDFAVTADGNAFIGDIKDKVTAWKQYRKAAISGENAGLVRASGRTMEQFTIHLTVNPQSKVTFQLTYEEVLKRNHMQYEIVIKVKPKQLVHHFEVDHRSRGRGPAPLSVTMAPNTG

SEQ ID NO: 70312 - protein, 741 aa, Homo sapiens
MAFASWWYKTHVSEKTSESPSKPGEKKGSDEKKAASLGSSQSSRTYAGGTASATKVSASSGATSKSSSMNPTETKAVKTEPEKKSQSTKLSVVHEKKSQEGKPKEHTEPKSLPKQASDTGSNDAHNKKAVSRSAEQQPSEKSTEPKTKPQDMISAGGESVAGITAISGKPGDKKKEKKSLTPAVPVESKPDKPSGKSGMDAALDDLIDTLGGPEETEEENTTYTGPEVSDPMSSTYIEELGKREVTIPPKYRELLAKPIGPDDAIDALSSDFTCGSPTAAGKKTEKEESTEVLKAQSAGTVRSAAPPQEKKRKVEKDTMSDQALEALSASLGTRQAEPELDLRSIKEVDEAKAKEEKLEKCGEDDETIPSEYRLKPATDKDGKPLLPEPEEKPKPRSESELIDELSEDFDRSECKEKPSKPTEKTEESKAAAPAPVSEAVCRTSMCSIQSAPPEPATLKGTVPDDAVEALADSLGKKEADPEDGKPVMDKVKEKAKEEDREKLGEKEETIPPDYRLEEVKDKDGKPLLPKESKEQLPPMSEDFLLDALSEDFSGPQNASSLKFEDAKLAAAISEVVSQTPASTTQAGAPPRDTSQSDKDLDDALDKLSDSLGQRQPDPDENKPMEDKVKEKAKAEHRDKLGERDDTIPPEYRHLLDDNGQDKPVKPPTKKSEDSKKPADDQDPIDALSGDLDSCPSTTETSQNTAKDKCKKAASSSKAPKNGGKAKDSAKTTEETSKPKDD

SEQ ID NO: 70313 - protein, 800 aa, Homo sapiens
MLVGQGAGPLGPAVVTAAVVLLLSGVGPAHGSEDIVVGCGGFVKSDVEINYSLIEIKLYTKHGTLKYQTDCAPNNGYFMIPLYDKGDFILKIEPPLGWSFEPTTVELHVDGVSDICTKGGDINFVFTGFSVNGKVLSKGQPLGPAGVQVSLRNTGTEAKIQSTVTQPGGKFAFFKVLPGDYEILATHPTWALKEASTTVRVTNSNANAASPLIVAGYNVSGSVRSDGEPMKGVKFLLFSSLVTKEDVLGCNVSPVPGFQPQDESLVYLCYTVSREDGSFSFYSLPSGGYTVIPFYRGERITFDVAPSRLDFTVEHDSLKIEPVFHVMGFSVTGRVLNGPEGDGVPEAVVTLNNQIKVKTKADGSFRLENITTGTYTIHAQKEHLYFETVTIKIAPNTPQLADIVATGFSVCGQISIIRFPDTVKQMNKYKVVLSSQDKDKSLVTVETDAHGSFCFKANPGTYKVQVMVPEAETRAGLTLKPQTFPLTVTDRPVMDVAFVQFLASVSGKVSCLDTCGDLLVTLQSLSRQGEKRSLQLSGKVNAMTFTFDNVLPGKYKISIMHEDWCWKNKSLEVEVLEDDVSAVEFRQTGYMLRCSLSHAITLEFYQDGNGRENVGIYNLSKGVNRFCLSKPGVYKVTPRSCHRFEQAFYTYDTSSPSILTLTAIRHHVLGTITTDKMMDVTVTIKSSIDSEPALVLGPLKSVQELRREQQLAEIEARRQEREKNGNEEGEERMTKPPVQEMVDELQGPFSYDFSYWARSGEKITVTPSSKELLFYPPSMEAVVSGELCCASGLHTPQIPV

SEQ ID NO: 70314 - protein, 247 aa, Homo sapiens
MVKLANPLYTEWILEAIQKIKKQKQRPSEERICHAVSTSHGLDKKTVSEQLELSVQDGSVLKVTNKGLASYKDPDNPGRFSSVKPGTFPKSAKGSRGSCNDLRNVDWNKLLRRAIEGLEEPNGSSLKNIEKYLRSQSDLTSTTNNPAFQQRLRLGAKRAVNNGRLLKDGPQYRVNYGSLDGKGAPQYPSAFPSSLPPVSLLPHEKDQPRADPIPICSFCLGTKESNREKKPEELLSCADCGSSENRV

SEQ ID NO: 70315 - protein, 146 aa, Homo sapiens
MFSPPVSSGKNGPTSLASGHFTGSNVEDRSSSGSWGNGGHPSPSRNYGDGTPYDHMTSRDLGSHDNLSPPFVNSRIQSKTERGSYSSYGRESNLQGCHQSLLGGDMDMGNPGTLSPTKPGSQYYQYSSNNPRRRPLHSSAMEVQTK

SEQ ID NO: 70316 - protein, 190 aa, Homo sapiens
MSDILRELLCVSEKAANIARACRQQEALFQLLIEEKKEGEKNKKFAVDFKTLADVLVQEVIKQNMENKFPGLEKNIFGEESNEFTNDWGEKITLRLCSTEEETAELLSKVLNGNKVASEALARVVHQDVAFTDPTLDSTEINVPQDILGIWVDPIDSTYQYIKGSADIKSNQGIFPCGLQCVTILIGVYD

SEQ ID NO: 70317 - protein, 398 aa, Homo sapiens
  MOD_RES (1)..(1): Any amino acid
XRQCLMVSRNLGSVGYDPNEKTFDKILVANRGEIACRVIRTCKKMGIKTVAIHSDVDASSVHVKMADEAVCVGPAPTSKSYLNMDAIMEAIKKTRAQAVHPGYGFLSENKEFARCLAAEDVVFIGPDTHAIQAMGDKIESKLLAKKAEVNTIPGFDGVVKDAEEAVRIAREIGYPVMIKASAGGGGKGMRIAWDDEETRDGFRLSSQEAASSFGDDRLLIEKFIDNPRHIEIQVLGDKHGNALWLNERECSIQRRNQKVVEEAPSIFLDAETRRAMGEQAVALARAVKYSSAGTVEFLVDSKKNFYFLEMNTRLQVEHPVTECITGLDLVQEMIRVAKGYPLRHKQADIRINGWAVECRVYAEDPYKSFGLPSIGRLSQYQEPLHLPGPSGQWHPTRK

SEQ ID NO: 70318 - protein, 73 aa, Homo sapiens
MQEGLHRMTWDCIAIGSHENSVEEWSLLSEVQRCLYHDVMLENWVLISSLGCWCGSEDEEAPSKKSISIQRVS

SEQ ID NO: 70319 - protein, 1004 aa, Homo sapiens
  MOD_RES (1)..(1): Any amino acid
XSSGPNCAPGSSSSSSSDEAGDPNEAPSPDTLLGALARRQLNLGQLLEDTESYLQAFLAGAAGPLNGDHPGPGQSSSPDQAPPQLSKSKGLPKSAWGGGTPEAHRPGFGATSEGQGPLPFLSMFMGAGDAPLGSRPGHPHSSSQVKSKLQIGPPSPGEAQGPLLPSPARGLKFLKLPPTSEKSPSPGGPQLSPQLPRNSRIPCRNSGSDGSPSPLLARRGLGGGELSPEGAQGLPTSPSPCYTTPDSTQLRPPQSALSTTLSPGPVVSPCYENILDLSRSTFRGPSPEPPPSPLQVPTYPQLTLEVPQAPEVLRSPGVPPSPCLPESYPYGSPQEKSLDKAGSESPHPGRRTPGNSSKKPSQGSGRRPGDPGSTPLRDRLAALGKLKTGPEGALGSEKNGVPARPGTEKTRGPGKSGESAGDMVPSIHRPLEQLEAKGGIRGAVALGTNSLKQQEPGLMGDPGARVYSSHSMGARVDLEPVSPRSCLTKVELAKSRLAGALCPQVPRTPAKVPTSAPSLGKPNKSPHSSPTKLPSKSPTKVVPRPGAPLVTKESPKPDKGKGPPWADCGSTTAQSTPLVPGPTDPSQGPEGLAPHSAIEEKVMKGIEENVLRLQGQERAPGAEVKHRNTSSIASWFGLKKSKLPALNRRTEATKNKEGAGGGSPLRREVKMEARKLEAESLNISKLMAKAEDLRRALEEEKAYLSSRARPRPGGPAPGPNTGLGQVQGQLAGMYQGADTFMQQLLNRVDGKELPSKSWREPKPEYGDFQPVSSDPKSPWPACGPRNGLVGPLQGCGKPPGKPSSEPGRREEMPSEDSLAEPVPTSHFTACGSLTRTLDSGIGTFPPPDHGSSGTPSKNLPKTKPPRLDPPPGVPPARPPPLTKVPRRAHTLEREVPGIEELLVSGRHPSMPAFPALLPAAPGHRGHETCPDDPCEDPGPTPPVQLAKNWTFPNTRAAGSSSDPLMCPPRQLEGLPRTPMVRIAAEERERTREQEGVMWGDQFLQ

SEQ ID NO: 70320 - protein, 1605 aa, Homo sapiens
  MOD_RES (1)..(1): Any amino acid
XLPLMAEVSETALYCGIRPSNPESSEKWWHSYRLPPSDDAEFRPPELQGERCDAKMEVNSESTALQRLLAQPNKRFKIWQDKQPQLQPLHFLDPLPLSQQPGDSLGEVNDPYTFEDGDIKYIFTANKKCKQGTEKDSLKKNKSEDGFGTKDVTTPGHSTPVPDGKNAMSIFSSATKTDVRQDNAAGRAGSSSLTQVTDLAPSLHDLDNIFDNSDDDELGAVSPALRSSKMPAVGTEDRPLGKDGRAAVPYPPIADLQRMFPTPPSLEQHPAFSPVMNYKDGISSETVTALGMMESPMVSMVSTQLTEFKMEVEDGLGSPKPEEIKDFSYVHKVPSFQPFVGSSMFAPLKMLPSHCLLPLKIPDACLFRPSWAIPPKIEQLPMPPAATFIRDGYNNVPSVGSLADPDYLNTPQMNTPVTLNSAAPASNSGAGVLPSPATPRFSVPTPRTPRTPRTPRGGGTASGQGSVKYDSTDQGSPASTPSTTRPLNSVEPATMQPIPEAHSLYVTLILSDSVMNIFKDRNFDSCCICACNMNIKGADVGLYIPDSSNEDQYRCTCGFSAIMNRKLGYNSGLFLEDELDIFGKNSDIGQAAERRLMMCQSTFLPQVEGTKKPQEPPISLLLLLQNQHTQPFASLNFLDYISSNNRQTLPCVSWSYDRVQADNNDYWTECFNALEQGRQYVDNPTGGKVDEALVRSATVHSWPHSNVLDISMLSSQDVVRMLLSLQPFLQDAIQKKRTGRTWENIQHVQGPLTWQQFHKMAGRGTYGSEESPEPLPIPTLLVGYDKDFLTISPFSLPFWERLLLDPYGGHRDVAYIVVCPENEALLEGAKTFFRDLSAVYEMCRLGQHKPICKVLRDGIMRVGKTVAQKLTDELVSEWFNQPWSGEENDNHSRLKLYAQVCRHHLAPYLATLQLDSSLLIPPKYQTPPAAAQGQATPGNAGPLAPNGSAAPPAGSAFNPTSNSSSTNPAASSSASGSSVPPVSSSASAPGISQISTTSSSGFSGSVGGQNPSTGGISADRTQGNIGCGGDTDPGQSSSQPSQDGQESVTERERIGIPTEPDSADSHAHPPAVVIYMVDPFTYAAEEDSTSGNFWLLSLMRCYTEMLDNLPEHMRNSFILQIVPCQYMLQTMKDEQVFYIQYLKSMAFSVYCQCRRPLPTQIHIKSLTGFGPAASIEMTLKNPERPSPIQLYSPPFILAPIKDKQTELGETFGEASQKYNVLFVGYCLSHDQRWLLASCTDLHGELLETCVVNIALPNRSRRSKVSARKIGLQKLWEWCIGIVQMTSLPWRVVIGRLGRLGHGELKDWSILLGECSLQTISKKLKDVCRMCGISAADSPSILSACLVAMEPQGSFVVMPDAVTMGSVFGRSTALNMQSSQLNTPQDASCTHILVFPTSSTIQVAPANYPNEDGFSPNNDDMFVDLPFPDDMDNDIGILMTGNLHSSPNSSPVPSPGSPSGIGVGSHFQHSRSQGERLLSREAPEELKQQPLALGYFVSTAKAENLPQWFWSSCPQAQNQCPLFLKASLHHHISVAQTDELLPARNSQRVPHPLDSKTTSDVLRFVLEQYNALSWLTCNPATQDRTSCLPVHFVVLTQLYNAIMNIL

SEQ ID NO: 70321 - protein, 587 aa, Homo sapiens
MLGICRGRRKFLAASLSLLCIPAITWIYLFSGSFEDGKPVSLSPLESQAHSPRYTASSQRERESLEVRMREVEEENRALRRQLSLAQGRAPSHRRGNHSKTYSMEEGTGDSENLRAGIVAGNSSECGQQPVVEKCETIHVAIVCAGYNASRDVVTLVKSVLFHRRNPLHFHLIADSIAEQILATLFQTWMVPAVRVDFYNADELKSEVSWIPNKHYSGIYGLMKLVLTKTLPANLERVIVLDTDITFATDIAELWAVFHKFKGQQVLGLVENQSDWYLGNLWKNHRPWPALGRGYNTGVILLLLDKLRKMKWEQMWRLTAERELMGMLSTSLADQDIFNAVIKQNPFLVYQLPCFWNVQLSDHTRSEQCYRDVSDLKVIHWNSPKKLRVKNKHVEFFRNLYLTFLEYDGNLLRRELFGCPSEADVNSENLQKQLSELDEDDLCYEFRRERFTVHRTHLYFLHYEYEPAADSTDVTLVAQLSMDRLQMLEAICKHWEGPISLALYLSDAEAQQFLRYAQGSEVLMSRHNVGYHIVYKEGQFYPVNLLRNVAMKHISTPYMFLSDIDFLPMYGLYEYLRALQITWNTLS

SEQ ID NO: 70322 - protein, 284 aa, Homo sapiens
MPIRALCTICSDFFDHSRDVAAIHCGHTFHLQCLIQWFETAPSRTCPQCRIQVGKRTIINKLFFDLAQEEENVLDAEFLKLQTVYSELDQAKLELKSAQKDLQSADKEIMSLKKKLTMLQETLNLPPVASETVDRLVLESPAPVEVNLKLRRPSFRDDIDLNATFDVDTPPARPSSSQHGYYEKLCLEKSHSPIQDVPKKICKGPRKESQLSLGGQSCAGEPDEELVGAFPIFVRNAILGQKQPKRPRSESSCSKDVVRTGFDGLGGRTKFIQPVSFSCDVELS

SEQ ID NO: 70323 - protein, 42 aa, Homo sapiens
MAAAEPMGPAQVPMNSEVIVDPIQVVGMEWRMKRYLLSRAFL

SEQ ID NO: 70324 - protein, 271 aa, Homo sapiens
  MOD_RES (1)..(1): Any amino acid
XPGLGRRDLSSADPAVLGATMESRCYGCAVKFTLFKKEYGCKNCGRAFCSGCLSFSAAVPRTGNTQQKVCKQCHEVLTRRVAALEAKQKPSTSQSQGLTRQDQMIAERLARLRQENKPKLVPSQAEIEARLAALKDERQGSIPSTQEMEARLAALQGRVLPSQTPQPAHHTPDTRTQAQQTQDLLTQLAAEVAIDESWKGGGPAASLQNDLNQGGPGSTNSKRQANWSLEEEKSRLLAEAALELREENTRQERILALAKRLAMLRGQDPER

SEQ ID NO: 70325 - protein, 286 aa, Homo sapiens
  MOD_RES (1)..(1): Any amino acid
XPHGVSQRRGVRDSSLVVAFICKLHLKRGNFLVLKAKEMGLPVGTAAIAPIIAAVKDGKSITHEGREVLQILAEELCTPPDPGAAFVVVECPDESFIQPICENATFQRYQGKADAPVALVVHMAPASVLVDSRYQQWMERFGPDTQHLVLNENCASVHNLRSHKIQTQLNLIHPDIFPLLTSFRCKKEGPTLSVPMVQGECLLKYQLRPRREWQRDAIITCNPEEFIVEALQLPNFQQSVQEYRRSAQDGPAPAEKRSQYPEIIFLGTGSAIPMKIRNVSATLVNI

SEQ ID NO: 70326 - protein, 243 aa, Homo sapiens
MALSRVCWARSAVWGSAVTPGHFVTRRLQLGRSGLAWGAPRYLFPRQLLIRHFWTPKQQTDFLDIYHAFRKQSHPEIISYLEKVIPLISDAGLRWRLTDLCTKIQRGTHPAIHDILALRECFSNHPLGMNQLQALHVKALSRAMLLTSYLPPPLLRHRLKTHTTVIHQLDKALAKLGIGQLTAQEVKSACYLRGLNSTHIGEDRCRTWLGEWLQISCSLKEAELSLLLHNVVLLSTNYLGTRR

SEQ ID NO: 70327 - protein, 123 aa, Homo sapiens
MAEDEPDAKSPKTGGRAPPGGAEAGEPTTLLQRLRGTISKAVQNKVEGILQDVQKFSDNDKLYLYLQLPSGPTTGDKSSEPSTLSNEEYMYAYRWIRNHLEEHTDTCLPKQSVYDAYRKYCES

SEQ ID NO: 70328 - protein, 128 aa, Homo sapiens
MAEEEGPPVELRQRKKPKSSENKESAKEEKISDIPIPERAPKRVYELTHNNKTVSLKTINAVQQMSLYPELIASILYQATGSNEIIEPVYFYIGIVFGLQGIYVTALFVTSWLMSGTWLAGMLTVAWF

SEQ ID NO: 70329 - protein, 157 aa, Homo sapiens
MPPKCLILGGTPRQVHEIQSCMGRLETADKQSVHIVENEIQASIDQIFSRLERLEILSSKEPPNKRQNARLRVDQLKYDVQHLQTALRNFQHRRHAREQQERQREELLSRTFTTNDSDTTIPMDESLQFNSSLQKVHNGMDDLILDGHNILDGLRTQ

SEQ ID NO: 70330 - protein, 25 aa, Homo sapiens
MPNSEPASLLELFNSIATQGELVRS

SEQ ID NO: 70331 - protein, 582 aa, Homo sapiens
MQPSSLLPLALCLLAAPASALVRIPLHKFTSIRRTMSEVGGSVEDLIAKGPVSKYSQAVPAVTEGPIPEVLKNYMDAQYYGEIGIGTPPQCFTVVFDTGSSNLWVPSIHCKLLDIACWIHHKYNSDKSSTYVKNGTSFDIHYGSGSLSGYLSQDTVSVPCQSASSASALGGVKVERQVFGEATKQPGITFIAAKFDGILGMAYPRISVNNVLPVFDNLMQQKLVDQNIFSFYLSRDPDAQPGGELMLGGTDSKYYKGSLSYLNVTRKAYWQVHLDQVEVASGLTLCKEGCEAIVDTGTSLMVGPVDEVRELQKAIGAVPLIQGEYMIPCEKVSTLPAITLKLGGKGYKLSPEDYTLKAQGPGQCPAPLGDPASTTDGAQEARVPLDGAFWIPRPPAGSPKGCFACVSKPPALQAPAAPAPEPSASPPMAPTLFPMESKSSKTDSVRAAGAPPACKHLAEKKTMTNPTTVIEVYPDTTEVNDYYLWSIFNFVYLNFCCLGFIALAYSLKPRLEWPRPDVLHQCSCPAGWGRRQGMQGEKRLGRGWLGGRTPGQLRLCSILELEPHPARHRNCGRRSPPAPDSS

SEQ ID NO: 70332 - protein, 84 aa, Homo sapiens
MAVLAPLIALVYSVPRLSRWLAQPYYLLSALLSAAFLLVRKLPPLCHGLPTQREDGNPCDFDWREVEILMFLSAIVMMKNRRSS

SEQ ID NO: 70333 - protein, 215 aa, Homo sapiens
  MOD_RES (1)..(1): Any amino acid
XSTPTKREIMLTPVTVAYSPKRSPKENLSPGFSHLLSKNESSPIRFDILLDDLDTVPVSTLQRTNPRKQLQFLPLDDSEEKTYSEKATDNHVNHSSCPEPVPNGVKKVSVRTAWEKNKSVSYEQCKPVSVTPQGNDFEYTAKIRTLAETERFFDELTKEKDQIEAALSRMPSPGGRITLQTRLNQTPQICEESSHKCAFAGHYVPCHLYDYRFQG

SEQ ID NO: 70334 - protein, 76 aa, Homo sapiens
MAHESAEDLFHFNVGGWHFSVPRSKLSQFPDSLLWKEASALTSSESQRLFIDRDGSTFRHVHYYLYTSKLSFSSCA

SEQ ID NO: 70335 - protein, 146 aa, Homo sapiens
MTLHATRGAALLSWVNSLHVADPVEAVLQLQDCSIFIKIIDRIHGTEEGQQILKQPVSERLDFVCSFLQKNRKHPSSPECLVSAQKVLEGSELELAKMTMLLLYHSTMSSKSPRDWEQFEYKIQAELAVILKFVLDHEDGLNLNED

SEQ ID NO: 70336 - protein, 113 aa, Homo sapiens
MLLVVILLLGMFFTLSKTQSVTQLDGHITVSEEAPLELKCNYSYSGVPSLFWYVQYSSQSLQLLLKDLTKATQVKGIRGFEAEFKKSETSFYLRKPSTHVSDAAEYFCAVGDR

SEQ ID NO: 70337 - protein, 195 aa, Homo sapiens
QKRNLLSCLLVRILKAHGEKGLHIDQLVCLVLEAWQKGPNPPGTLGHTVAGGVACTSTDVLSCILHLLGQGYVKRRDDRPQILMYAAPEPMGPCRGQADVPFCGSQSETSKPSPEAVATLASLQLPAGRTMSPQEVEGLMKQTVRQVQETLNLEPDVAQHLLAHSHWGAEQLLQSYSEDPEPLLLAAGLLAGMST

SEQ ID NO: 70338 - protein, 232 aa, Homo sapiens
MAAAMPLALLVLLLLGPGGWCLAEPPRDSLREELVITPLPSGDVAATFQFRTRWDSELQREGVSHYRLFPKALGQLISKYSLRELHLSFTQGFWRTRYWGPPFLQAPSGAELWVWFQDTVTDVDKSWKELSNVLSGIFCASLNFIDSTNTVTPTASFKPLGLANDTDHYFLRYAVLPREVVCTENLTPWKKLLPCSSKAGLSVLLKADRLFHTSYHSQAVHIRPVCRVSHGE

SEQ ID NO: 70339 - protein, 449 aa, Homo sapiens
  MOD_RES (1)..(1): Any amino acid
XETLTLHSLTCYEDLVTFLQQSIHQFEVGPYGCILLTLSAILSRSTELIRQDFDVPTSHLIGAHGYCTQELVNLLLTGKAVSNVFNDVVELDSGDGNITLLRGIAARSDIGFLSLFEHYNMCQVGCFLKTPRFPIWVVCSESHFSILFSLQPGLLRDWRTERLFDLYYYDGLANQQEQIRLTIDTTQTISEDTDNDLVPPLELCIRTNIGSALGFKYPVGNNQTAVQDNVKVSLAFGLSIATLAQSVGHISGAHLNPAVTLGLLLSCQISIFRALMYIIAQCVGAIVATAILSGITSSLTGNSLGRNDLADGVNSGQGLGIEIIGTLQLVLCVLATTDRRRRDLGGSAPLAIGLSVALGHLLAIDYTGCGINPARSFGSAVITHNFSNHWIFWVGPFIGGALAVLIYDFILAPRSSDLTDRVKVWTSGQVEEYDLDADDINSRVEMKPK

SEQ ID NO: 70340 - protein, 68 aa, Homo sapiens
MKDEAGERDREVSSLNSKLLSLQLDIKNLHDVCKRQRKTLQDNQLCMEEAMNSSHDKKQAQALAFEES

SEQ ID NO: 70341 - protein, 507 aa, Homo sapiens
MHLPRQHGSAHLGHLYAYAKFSAHDWHLHAQGHAICNAHGKGKGHRMTPACPLLLSVILSLRLATAFDPAPSACSALASGVLYGAFSLQDLFPTIASGCSWTLENPDPTKYSLYLRFNRQEQVCAHFAPRLLPLDHYLVNFTCLRPSPEEAVAQAESEVGRPEEEEAEAAAGLELCSGSGPFTFLHFDKNFVQLCLSAEPSEAPRLLAPAALAFRFVEVLLINNNNSSQFTCGVLCRWSEECGRAAGRACGFAQPGCSCPGEAGAGSTTTTSPGPPAAHTLSNALVPGGPAPPAEADLHSGSSNDLFTTEMRYGEEPEEEPKVKTQWPRSADEPGLYMAQTVHGVWEEWGSWSLCSRSCGRGSRSRMRTCVPPQHGGKACEGPELQTKLCSMAACPVEGQWLEWGPWGPCSTSCANGTQQRSRKCSVAGPAWATCTGALTDTRECSNLECPATDSKWGPWNAWSLCSKTCDTGWQRRFRMCQATGTQGYPCEGTGEEVKPCSEKRCP

SEQ ID NO: 70342 - protein, 123 aa, Homo sapiens
MKRRLDDQESPVYAAQQRRIPGSTEAFPHQHRVLAPAPPVYEAVSETMQSATGIQYSVTPSYQVSAMPQSSGSHGPAIAAVHSSHHHPTAVQPHGGQVVQSHAHPAPPVAPVQGQQQFQRLKV

SEQ ID NO: 70343 - protein, 226 aa, Homo sapiens
MSLRCGDAARTLGPRVFGRYFCSPVRPLSSLPDKKKELLQNGPDLQDFVSGDLADRSTWDEYKGNLKRQKGERYVRKLDVPILESVGEVENMPPPQPRSCKVRDPRANFDQSLRVLKHAKKVQPDVISKTSIMLGLGENDEQVYATMKALREADVDCLTLGQYMQPTRRHLKVEEYITPEKFKYWEKVGNELGFHYTASGPLVRSSYKAGEFFLKNLVAKRKTKDL

SEQ ID NO: 70344 - protein, 1428 aa, Homo sapiens
MENEPDHENVEQSLCAKTSEEELNKSFNLEASLSKFSYIDMDKELEFKNDLIDDKEFDIPQVDTPPTLESILNETDDEDESFILEDPTLLNIDTIDSHSYDTSSVASSDSGDRTNLKRKKKLPDSFSLHGSVMRHSLLKGISAQIVSAADKVDAGLPTAIAVSSLIAVGTSHGLALIFGKYQNQALRLCLGSTSVGGQYGAISALSINNDCSRLLCGFAKGQITMWDLASGKLLRSITDAHPPGTAILHIKFTDDPTLAICNDSGGSVFELTFKRVMGVRTCESRCLFSGSKGEVCCIEPLHSKPELKDHPITQFSLLAMASLTKILVIGLKPSLKVWMTFPYGRMDPSSVPLLAWHFVAVQNYVNPMLAFCRGDVVHFLLVKRDESGAIHVTKQKHLHLYYDLINFTWINSRTVVLLDSVEKLHVIDRQTQEELETVEISEVQLVYNSSHFKSLATGGNVSQALALVGEKACYQSISSYGGQIFYLGTKSVYVMMLRSWRERVDHLLKQDCLTEALALAWSFHEGKAKAVVGLSGDASKRKAIVADRMVEILFHYADRALKKCPDQGKIQVMEQHFQDMVPVIVDYCLLLQRKDLLFSQMYDKLSENSVAKGVFLECLEPYILSDKLVGITPQVMKDLIVHFQDKKLMENVEALIVHMDITSLDIQQVVLMCWENRLYDAMIYVYNRGMNEFISPMEKLFRVIAPPLNAGKTLTDEQVVMGNKLLVYISCCLAGRAYPLGDIPEDLVPLVKNQVFEFLIRLHSAEASPEEEIYPYIRTLLHFDTREFLNVLALTFEDFKNDKQAVEYQQRIVDILLKVMVENSDFTPSQVGCLFTFLARQLAKPDNTLFVNRTLFDQVLEFLCSPDDDSRHSERQQVLLELLQAGGIVQFEESRLIRMAEKAEFYQICEFMYEREHQYDKIIDCYLRDPLREEEVFNYIHNILSIPGHSAEEKQSVWQKAMDHIEELVSLKPCKAAELVATHFSGHIETVIKKLQNQVLLFKFLRSLLDPREGIHVNQELLQISPCITEQFIELLCQFNPTQVIETLQVLECYRLEETIQITQKYQLHEVTAYLLEKKGDIHGAFLIMLERLQSKLQEVTHQGENTKEDPSLKDVEDTMVETIALCQRNSHNLNQQQREALWFPLLEAMMAPQKLSSSAIPHLHSEALKSLTMQVLNSMAAFIALPSILQRILQDPVYGKGKLGEIQGLILGMLDTFNYEQTLLETTTSLLNQDLHWSLCNLRASVTRGLNPKQDYCSICLQQYKRRQEMADEIIVFSCGHLYHSFCLQNKECTVEFEGQTRWTCYKCSSSNKVGKLSENSSEIKKGRITPSQVKMSPSYHQSKGDPTAKKGTSEPVLDPQQIQAFDQLCRLYRGSSRLALLTELSQNRSSESYRPFSGSQSAPAFNSIFQNENFQLQLIPPPVTED

SEQ ID NO: 70345 - protein, 9 aa, Homo sapiens
MSYYQRPFS

SEQ ID NO: 70346 - protein, 17 aa, Homo sapiens
MEMASSAGSWLSGCLIP

SEQ ID NO: 70347 - protein, 150 aa, Homo sapiens
MPSSGSVSRSRQRGRSMASRGFDGSRRGSLRRAGAREPPSEVIEAAAQASGSCWSSPFFSASTPSAAATGVPGPTDMAAVLQQVLERTELNKLPKSVQNKLEKFLADQQSEIDGLKGRHEKFKVESEQQYFEIEKRLSHSQERLVNETRE

SEQ ID NO: 70348 - protein, 679 aa, Homo sapiens
IDASGKGEFSRRWCVLGDGVLSYFENERAVTPNGEIRASEIVCLAVPPPDTHGFEHTFEVYTEGERLYLFGLESAEQAHEWVKCIAKAFVPPLAEDLLARDFERLGRLPYKAGLSLQRAQEGWFSLSGSELRAVFPEGPCEEPLQLRKLQELSIQGDSENQVLVLVERRRTLYIQGERRLDFMGWLGAIQKAAASMGDTLSEQQLGDSDIPVIVYRCVDYITQCGLTSEGIYRKCGQTSKTQRLLESLRQDARSVHLKEGEQHVDDVSSALKRFLRDLPDGLFTRAQRLTWLEASEIEDEEEKVSRYRELLVRLPPVNRATVKALISHLYCVQCFSDTNQMNVHNLAIVFGPTLFQTDGQDYKAGRVVEDLINHYVVVFSVDEEELRKQREEITAIVKMRVAGTASGTQHAGDFICTVYLEEKKAETEQHIKVPASMTAEELTLEILDRRNVGIREKDYWTCFEVNEREEAERPLHFAEKVLPILHGLGTDSHLVVKKHQAMEAMLLYLASRVGDTKHGMMKFREDRSLLGLGLPSGGFHDRYFILNSSCLRLYKEVRSHRPEKEWPIKSLKVYLGVKKKLRPPTCWGFTVVHETEKHEKQQWYLCCDTQMELREWFATFLFVQHDGLVWPSEPSRVSRAVPEVRLGSVSLIPLRGSENEMRRSVAAFTADPLSLLRNV

SEQ ID NO: 70349 - protein, 487 aa, Homo sapiens
MQLPRWWELGDPCAWTGQGRGTRRMSPATTGTFLLTVYSIFSKVHSDRNVYPSAGVLFVHVLEREYFKGEFPPYPKPGEISNDPITFNTNLMGYPDRPGWLRYIQRTPYSDGVLYGSPTAENVGKPTIIEITAYNRRTFETARHNLIINIMSAEDGVLLSSPRLECNGTISANCNLRLLGSDFPLPYQAEFFIKNMNVEEMLASEVLGDFLGAVKNVWQPERLNAINITSALDRGGRVPLPINDLKEGVYVMVGADVPFSSCLREVENPQNQLRCSQEMEPVITCDKKFRTQFYIDWCKISLVDKTKQVSTYQEVIRGEGILPDGGEYKPPSDSLKSRDYYTDFLITLAVPSAVALVLFLILAYIMCCRREGVEKRNMQTPDIQLVHHSAIQKSTKELRDMSKNREIAWPLSTLPVFHPVTGEIIPPLHTDNYDSTNMPLMQTQQNLPHQTQIPQQQTTGDFRLTTFQRFEVNGIPEERKLTEAMNL

SEQ ID NO: 70350 - protein, 435 aa, Homo sapiens
MDFRTACEETKTGICLLQDGNQEPFKVRLHLAKDILMIQEQDVICVSGEPFYSGERTVTIRRQTVGGFGLSIKGGAEHNIPVVVSKISKEQRAELSGLLFIGDAILQINGINVRKCRHEEVVQVLRNAGEEVTLTVSFLKRAPAFLKLPLNEDCACAPSDQSSGTSSPLCDSGLHLNYHPNNTDTLSCSSWPTSPGLRWEKRWCDLRLIPLLHSRFSQYVPGTDLSRQNAFQVIAVDGVCTGIIQCLSAEDCVDWLQAIATNISNLTKHNIKKINRNFPVNQQIVYMGWCEAREQDPLQDRVYSPTFLALRGSCLYKFLAPPVTTWDWTRAEKTFSVYEIMCKILKDSDLLDRRKQCFTVQSESGEDLYFSVELESDLAQWERAFQTATFLEVERIQCKTYACVLESHLMGLTIDFSTGFICFDAATKVMCSGQL

SEQ ID NO: 70351 - protein, 69 aa, Homo sapiens
MSGRGAGGFPLPPLSPGGGAVAAALGAPPPPAGPGMLPGPALRGPGPAGGVGGPGAAAFRPMGPAGPAA

SEQ ID NO: 70352 - protein, 28 aa, Homo sapiens
MSTEKVDQKEEAGEKEVCGDQIKGPDKE

SEQ ID NO: 70353 - protein, 454 aa, Homo sapiens
MLWVNQEDEVEEGPSDVQNGHLDPNSDCLCLGRPLQNRDQMRANVINEIMSTERHYIKHLKDICEGYLKQCRKRRDMFSDEQLKVIFGNIEDIYRFQMGFVRDLEKQYNNDDPHLSEIGPCFLEHQDGFWIYSEYCNNHLDACMELSKLMKDSRYQHFFEACRLLQQMIDIAIDGFLLTPVQKICKYPLQLAELLKYTAQDHSDYRYVAAALAVMRNVTQQINERKRRLENIDKIAQWQASVLDWEGEDILDRSSELIYTGEMAWIYQPYGRNQQRVFFLFDHQMVLCKKDLIRRDILYYKGRIDMDKYEVVDIEDGRDDDFNVSMKNAFKLHNKETEEIHLFFAKKLEEKIRWLRAFREERKMVQEDEKIGFEISENQKRQAAMTVRKVPKQKGVNSARSVPPSYPPPQDPLNHGQYLVPDGIAQSQVFEFTEPKRSQSPFWQNFSRLTPFKK

SEQ ID NO: 70354 - protein, 130 aa, Homo sapiens
MKVNRETKRLYVGGLSQDISEADLQNQFSRFGEVSDVEIITRKDDQGNPQKVFAYINISVAEADLKKCMSVLNKTKWKGGTLQIQLAKESFLHRMVIQRISQRTSSSVLTVNVKQRRHRLRSRAIQERNG

SEQ ID NO: 70355 - protein, 148 aa, Homo sapiens
MGEGWAAALQPRVLGPWCAMATLATFPGSSVCGRLCQALYVSCISSASSQLCEAEVEETLKRLQSQKGVQGIIVVNTEGIPIKSTMDNPTTTQYASLMHSFILKARSTVRDIDPQNDLTFLRIRSKKNEIMVAPDKDYFLIVIQNPTE

SEQ ID NO: 70356 - protein, 98 aa, Homo sapiens
MDKLIVDGRGKATISNDGATILKLLDVVHPAAKTLVDIAKSQDAEVGDGTTSVTLLAAEFLKQVKPYVEEGLHPQIIIRAFRTATQLAVNKIKEIAVT

SEQ ID NO: 70357 - protein, 535 aa, Homo sapiens
MVVSAGHWSSEKAEMNILEINETLRPQLPENKQQLRNLKEMFSNSTGRLPGQPTEEIQQYKVLVHSQERELTQLKEKLREGRDASRSLNEHLQALLTPDEPDKSQGQDLQEQLAEGCRLAQHLVQKLSPENDEDEDEDVQVEEDEKVLESSAPREVQKTEESKVPEDSLEECAITCSNSHGPCDSNQPHKNIKITFEEDEVNSTLVVDRESSHDECQDALNILPVPGPTSSATNVSMVVSAGPLSGEKAAINILEINEKLRPQLAEKKQQFRNLKEKCFLTQLAGFLANQQNKYKYEECKDLIKSMLRNERQFKEEKLAEQLKQAEELRQYKVLVHAQERELTQLREKLREGRDASRSLNEHLQALLTPDEPDKSQGQDLQEQLAEGCRLAQHLVQKLSPENDNDDDEDVQVEVAEKVQKSSAPREMQKAEEKEVPEDSLEECAITCSNSHGPYDCNQPHRKTKITFEEDKVDSTLIGSSSHVEWEDAVHIIPENESDDEEEEEKGPVSPRTSVGSSEKGGPRGNRSQAQQGAAG

SEQ ID NO: 70358 - protein, 104 aa, Homo sapiens
MGPLMVLFCLLFLYPGLADSAPSCPQNVNISGGTFTLSHGWAPGSLLTYSCPQGLYPSPASRLCKSSGQWQTPGATRSLSKAVCKREAPCGLCSGCALSSPCLL

SEQ ID NO: 70359 - protein, 120 aa, Homo sapiens
MAAPMELFCWSGGWGLPSVDLDSLAVLTYARFTGAPLKVHKISNPWQSPSGTQYPLGELCLPFGPVMERSSQFHTRSSPTFEKRSTMLIMICQLGKGQTPWPSCLSWRRSCSRCWYILFG

SEQ ID NO: 70360 - protein, 183 aa, Homo sapiens
  MOD_RES (1)..(1): Any amino acid
XKRCCHCCLLGRAAQAQGQSCEYSLMVGYQCGQVFQACCVKSQETGDLDVGGLQETDKIIEVEEEQEDPYLNDRCRGGGPCKQQCRDTGDEVVCSCFVGYQLLSDGVSCEDVNECITGSHSCRLGESCINTVGSFRCQRDSSCGTGYELTEDNSCKEYSGILPLPTQATVQEWLYTRCSRQLY

SEQ ID NO: 70361 - protein, 534 aa, Homo sapiens
MALIPDLAMETWLLLAVSLVLLYLYGTHSHGLFKKLGIPGPTPLPFLGNILSYHKGFCMFDMECHKKYGKVWGFYDGQQPVLAITDPDMIKTVLVKECYSVFTNRRPFGPVGFMKSAISIAEDEEWKRLRSLLSPTFTSGKLKEMVPIIAQYGDVLVRNLRREAETGKPVTLKDVFGAYSMDVITSTSFGVNIDSLNNPQDPFVENTKKLLRFDFLDPFFLSITVFPFLIPILEVLNICVFPREVTNFLRKSVKRMKESRLEDTQKHRVDFLQLMIDSQNSKETESHKALSDLELVAQSIIFIFAGYETTSSVLSFIMYELATHPDVQQKLQEEIDAVLPNKAPPTYDTVLQMEYLDMVVNETLRLFPIAMRLERVCKKDVEINGMFIPKGVVVMIPSYALHRDPKYWTEPEKFLPERLEKRKLQSSTIPTTYDEGHQLCPYGSSVSKIFSKKNKDNIDPYIYTPFGSGPRNCIGMRFALMNMKLALIRVLQNFSFKPCKETQIPLKLSLGGLLQPEKPVVLKVESRDGTVSGA

SEQ ID NO: 70362 - protein, 531 aa, Homo sapiens
MAEGKAGGAAGLFAKQVQKKFSRAQEKAEGHKLYKDLKNFLSAVKVMHESSKRVSETLQEIYSSEWDGHEELKAIVWNNDLLWEDYEEKLADQAVRTMEIYVAQFSEIKERIAKRGRKLVDYDSARHHLEAVQNAKKKDEAKTAKAEEEFNKAQTVFEDLNQELLEELPILYNSRIGCYVTIFQNISNLRDVFYREMSKLNHNLYEVMSKLEKQHSNKVFVVKGLSSSSRRSLVISPPVRTATVSSPLTSPTSPSTLSLKSESESVSATEDLAPDAAQGEDNSEIKELLEEEEIEKEGSEASSSEEDEPLPACNGPAQAQPSPTTERAKSQEEVLPSSTTPSPGGALSPSGQPSSSATEVVLRTRTASEGSEQPKKRASIQRTSAPPSRPPPPRATASPRPSSGNIPSSPTASGGGSPTSPRASLGTGTASPRTSLEVSPNPEPPEKPVRTPEAKENENIHNQNPEELCTSPTLMTSQTSFKSPWYQKTTTSQHLNLKKRYPQVKIHNSEEKLPRLLLPQTSPEKLFNQRV

SEQ ID NO: 70363 - protein, 596 aa, Homo sapiens
MASVWQRLGFYASLLKRQLNGGPDVIKWERRVIPGCTRSIYSATGKWTKEYTLQTRKDVEKWWHQRIKEQASKISEADKSKPKFYVLSMFPYPSGKLHMGHVRVYTISDTIARFQKMRGMQVINPMGWDAFGLPAENAAVERNLHPQSWTQSNIKHMRKQLDRLGLCFSWDREITTCLPDYYKWTQYLFIKLYEAGLAYQKEALVNWDPVDQTVLANEQVDEHGCSWRSGAKVEQKYLRQWFIKTTAYAKAMQDALADLPEWYGIKGMQAHWIGDCVGCHLDFTLKVHGQATGEKLTAYTATPEAIYGTSHVAISPSHRLLHGHSSLKEALRMALVPGKDCLTPVMAVNMLTQQEVPVVILAKADLEGSLDSKIGIPSTSSEDTILAQTLGLAYSEVIETLPDGTERLSSSAEFTGMTRQDAFLALTQKARGKRVGGDVTSDKLKDWLISRQRYWGTPIPIVHCPVCGPTPVPLEDLPVTLPNIASFTGKGGPPLAMASEWVNCSCPRCKGAAKRETDTMDTFVDSAWYYFRYTDPHNPHSPFNTAVADYWMPVDLYIGGKEHAVMHLFYARFFSHFCHDQKMVKHRPGFQVQQGP

SEQ ID NO: 70364 - protein, 134 aa, Homo sapiens
MMLTIGDVIKQLIEAHEQGKDIDLNKVKTKTAAKYGLSAQPRLVDIIAAVPPQYRKVLMPKLKAKPIRTASGIAVVAVMCKPHRCPHISFTGNICVYCPGGPDSDFEYSTQSYTGYEPTSMRAIRARYDPFLQT

SEQ ID NO: 70365 - protein, 50 aa, Homo sapiens
  MOD_RES (1)..(1): Any amino acid
XGRPPALLASALGLGGCVPWGAGRLRRGHGPEPDSPFRRSPPRGPASPQR

SEQ ID NO: 70366 - protein, 225 aa, Homo sapiens
MGDAPSPEEKLHLITRNLQEVLGEEKLKEILKERELKIYWGTATTGKPHVAYFVPMSKIADFLKAGCEVTILFADLHAYLDNMKAPWELLELRVSYYENVIKAMLESIGVPLEKLKFIKGTDYQLSKEYTLDVYRLSSVVTQHDSKKAGAEVVKQVEHPLLSGLLYPGLQALDEEYLKVDAQFGGIDQRKIFTFAEKMRTLRIEDKKLSNITHTSLHLAIQNGSI

SEQ ID NO: 70367 - protein, 592 aa, Homo sapiens
  MOD_RES (1)..(1): Any amino acid
XIRREQCKTEEKLDLLTSKCAHLCMDSVKTSDDEVGSPKEESRKFTNFQSPNIDPTEENDLDDSLSVKNGDSSNDFVTCNDINEDDFGDFGDFGSASGSTPPFVTGTQDSMSDATFEESSEHFPHFSEPGDDFGEFGDINAVSCQEETILTKSDLKQTSDNLSEECQLARKSSGTGTEPVAKLKNGQEGEIGHFDSVPNIQDDCNGFQDSDDFADFSSAGPSQVVDWNAFEDEQKDSCSWAAFGDQQATESHHRKEAWQSHRTDENIDTPGTPKTHSVPSATSKGAVASGHLQESATSVQTALLNRLERIFEACFPSILVPDAEEEVTSLKHLLETSTLPIKTREALPESGELLDVWTELQDIHDAHGLRYQWGGSHSNKKLLSSLGIDTRNILFTGNKKQPVIVPMYAAGLGMLEPTKEPLKPLSAAEKIASIGQTATMSPDMNTCTSDQFQESLPPVQFDWSSSGLTNPLDASGGSTLLNLDFFGPVDDSSSSSSTTIPGVDPELYELTTSKLEISTSSLKVTDAFARLMSTVEKTSTSTSRKPKREEHLSEEAIKVIAGLPDLTFMHAKVLMFPATLTPSTSSQEKADG

SEQ ID NO: 70368 - protein, 210 aa, Homo sapiens
  MOD_RES (1)..(1): Any amino acid
XATKTASYDEHFRPEKLREWPEPESVSLMEVLAREDIDEAVCAILFKENSIVKRLDMYFQHVDTFKERRKEMLHKKWVENVAEPLQQRIMEKVTVPPFVDPLFQRQQEVDEERRTGLQCETGKRHSIKELEEIEKARLHASSPYFTFTSHCVIPKEWHKASARARSKTYKYSPEKLIYADKKQKRKEKKTADLSQAAFERQFLSSKLSQK

SEQ ID NO: 70369 - protein, 143 aa, Homo sapiens
  MOD_RES (1)..(1): Any amino acid
XGPGTPRPLNRPKVSLSAPMTTNGLPESTDSKEANLQQNEEKNHSDSSTSESEVSSVSPLKNKHPDEDAVEAEGHEVKRLRFDKEGEVRETASQTTSSEISSVMVGETEASSSSQDKDKDSRCTRQHCTEEDEEEDEEEEEGI

SEQ ID NO: 70370 - protein, 127 aa, Homo sapiens
MAVPFVEDWDLVQTLGEGAYGEVQLAVNRVTEEAVAVKIVDMKRAVDCPENIKKEICINKMLNHENVVKFYGHRREGNIQYLFLEYCSGGELFDRIEPDIGMPEPDAQRFFHQLMAGVVYLHGIGIT

SEQ ID NO: 70371 - protein, 175 aa, Homo sapiens
AVASLRRGHIQRLNLRYTQVSRQELRDYASWNLSVNLYTVNAPWLFSLLWCAGVPSVTSDNSHALSQVPSPLWIMPPDEYCLMWVTADLVSFTLIVGIFVLQNYHLIRWRLGGIRSYNPEQIMLSAAVRRTSRDVSIMKEKLIFSEISDGVEVSDVLSVCSDNSYDTYANSTATP

SEQ ID NO: 70372 - protein, 416 aa, Homo sapiens
MQYSAMDEFHPFIEALLPHVRAIAYTWFNLQARKRKYFKKHEKRMSKDEERAVKDELLSEKPEIKQKWASRLLAKLRKDIRQEYREDFVLTVTGKKHPCCVLSNPDQKGKIRRIDCLRQADKVWRLDLVMVILFKGIPLESTDGERLMKSPHCTNPALCVQPHHITVSVKELDLFLAYYVQEQDSGQSGSPSHNDPAKNPPGYLEDSFVKSGVFNVSELVRVSRTPITQGTGVNFPIGEIPSQPYYHDMNSGVNLQRSLSSPPSSKRPKTISIDENMEPSPTGDFYPSPSSPAAGSRTWHERDQDMSSPTTMKKPEKPLFSSASPQDSSPRLSTFPQHHHPGIPGVAHSVISTRTPPPPSPLPFPTQAILPPAPSSYFSHPTIRYPPHLNPQDTLKNYVPSYDPSSPQTSQSWYLG

SEQ ID NO: 70373 - protein, 249 aa, Homo sapiens
MIEDSGKRGNTMAERRQLFAEMRAQDLDRIRLSTYRTACKLRFVQKKCNLHLVDIWNVIEALRENALNNLDPNTELNVSRLEAVLSTIFYQLNKRMPTTHQIHVEQSISLLLNFLLAAFDPEGHGKISVFAVKMALATLCGGKIMDKLRYIFSMISDSSGVMVYGRYDQFLREVLKLPTAVFEGPSFGYTEQSARSCFSQQKKVTLNGFLDTLMSDPPPQCLVWLPLLHRLANVENGMIEKGCKIPGMN

SEQ ID NO: 70374 - protein, 59 aa, Homo sapiens
MSQGRGKYDFYIGLGLAMSSSIFIGGSFILKKKGLLRLARKGSMRAGQGGHAYLKEWLW

SEQ ID NO: 70375 - protein, 93 aa, Homo sapiens
MLDFFDLLWIVGIADFVLKYITIALKCLIVALPKIILAVKSKIYWTPQSAETYARHGVLQTRSFTLKAHSPVGVLQARKQSLQGPLGKQRMDT

SEQ ID NO: 70376 - protein, 248 aa, Homo sapiens
  MOD_RES (1)..(1): Any amino acid
XDKERENEKEKSALARERSLKKRQSLPASPRARLSASTASELSPKSKARPSSPSTSWHRPASPCPSPGPGHTLPPKPPSPRGTTASPKGRVRRKEEAKESPSAAGPEDKSQSKRRASNEKESAAPASPAPSPAPSPTPAPPQKEQPPAETPTAPAPPVTPSKPMAGTTDREEATRLLAEKRRQAREQREREEQERRLQAERDKRMREEQLAREAEARAEREAEARRREEQEAREKAQAEQEEQERLQK

SEQ ID NO: 70377 - protein, 68 aa, Homo sapiens
MGNLLKVLTCTDLEQGPNFFLDFENAQPTESEKEIYNQVNVVLKDAEGILEDLQSYRGAGHEIREAIQ

SEQ ID NO: 70378 - protein, 172 aa, Homo sapiens
MSDSTWMSADPHLASSLSPSQDERMRSPQNLHSQEDDDSSSESGSGNGSSTLNPSTSSSTQGDPAFPEMNGNGAVAPMDFTTAAEDQPINLCDKLPPATALGTASYPSDGCGADGLRSRVKYGVKTTPEVLVLASAEETADTLLSAQQPREPVPPLQLWELRFHQDRGQRLP

SEQ ID NO: 70379 - protein, 99 aa, Homo sapiens
MEDPQSKEPAGEAVALALLESPRPEGGEEPPRPSPEETQQCKFDGQETKGSKFITSSASDFSDPVYKEIAITNGCINRMSKEELRAKLSEFKLETRYNL

SEQ ID NO: 70380 - protein, 168 aa, Homo sapiens
MDNVQPKIKHRPFCFSVKGHVKMLRLALTVTSMTFFIIAQAPEPYIVITGFEVTVILFFILLYVLRLDRLMKWLFWPLLDLTNSIITAVFLSVVAILAMQEKKRRHLLYVGGSLCLTAVIVCCIDAFVVTTKMRTNLKRFLGVEVERKLSPAKDAYPETGPDAPQRPA

SEQ ID NO: 70381 - protein, 429 aa, Homo sapiens
MMLGTEGGEGFVVKVRGLPWSCSADEVQRFFSDCKIQNGAQGIRFIYTREGRPSGEAFVELESEDEVKLALKKDRETMGHRYVEVFKSNNVEMDWVLKHTGPNSPDTANDGFVRLRGLPFGCSKEEIVQFFSGLEIVPNGITLPVDFQGRSTGEAFVQFASQEIAEKALKKHKERIGHRYIEIFKSSRAEVRTHYDPPRKLMAMQRPGPYDRPGAGRGYNSIGRGAGFERMRRGAYGGGYGGYDDYNGYNDGYGFGSDRFGRDLNYCFSGMSDHRYGDGGSTFQSTTGHCVHMRGLPYRATENDIYNFFSPLNPVRVHIEIGPDGRVTGEADVEFATHEDAVAAMSKDKANMQHRYVELFLNSTAGASGGAYGSQMLGGMGLSNQSSYGGPASQQLSGGYGGGYGGQSSMSGYDQVLQENSSDFQSNIA

SEQ ID NO: 70382 - protein, 101 aa, Homo sapiens
MKLWVSALLMAWFGVLSCVQAEFFTSIGHMTDLIYAEKELVQSLKEYILVEEAKLSKIKSWANKMEALTSKSAADAEGYLAHPVNAYKLVKRLNTDWPALE

SEQ ID NO: 70383 - protein, 504 aa, Homo sapiens
MAQRAVWLISHEPGTPLCGTVRFSRDWQEDSGYLSFTIRRYPTVEKRARVFNGASYVPVPEDGPFLKALLFELRLLDDDKDFVESRDSCSRINKTSIYGLLIGGEELWPVVAFLKNDMIYACVPLVEQTLSPRPPLISVSGVSQGFEFLFGIQDFLYSGQKNDSELNTKLSQLPDLLLQACPFGTLLDANLQNSLDNTNFASVTQPQKQPAWKTGTYKGKPQVSISITEKVKSMQYDKQGIADTWQVVGTVTCKCDLEGIMPNVTISLSLPTNGSPLQDILVHPCVTSLDSAILTSSSIDAMDDSAFSGPYKFPFTPPLESFNLCFYTSQVPVPPILGFYQMKEEEVQLRITINLKLHESVKNNFEFCEAHIPFYNRGPITHLEYKTSFGQLEVFREKSLLIWIIGQKFPKSMEISLSGTVTFGAKSHEKQPFDPICTGETAYLKLHFRILDYTLTGCYADQHSVQVFASGKPKISAHRKLISSDYYIWNSKAPAPVTYGSLLL

SEQ ID NO: 70384 - protein, 64 aa, Homo sapiens
MNQRKLDHEVKTLQVQAAQFAKQTGQWIGMVENFNQALKVGHTPYLTTPILGPHWLPPVRLPQV

SEQ ID NO: 70385 - protein, 129 aa, Homo sapiens
MQRADSEQPSKRPRCDDSPRTPSNTPSAEADWSPGLELHPDYKTWGPEQVCSFLRRGGFEEPVLLKNIRENEITGALLPCLDESRFENLGVSSLGERKKLLSYIQRLVQIHVDTMKGGVSSRMSSSRTG

SEQ ID NO: 70386 - protein, 469 aa, Homo sapiens
  MOD_RES (1)..(1): Any amino acid
XHYSCISELNSKLQDTLEQIEEQLDVALSKICKNFDINHYTKVQQAYRLLGKTQTAMDQLHMHFTQAIHNTVFQVVLGYVELCAGNTDTKFQKLQYKDLCTHVTPDSYIPCLADLCKALWEVMLSYYRTMEWHEKHDNEDTASASEGSNMIGTEETNFDRGYIKKKLEHGLTRIWQDVQLKVKTYLLGTDLSIFKYDDFIFVLDIISRLMQVGEEFCGSKSEVLQESIRKQSVNYFKNYHRTRLDELRMFLENETWELCPVKSNFSILQLHEFKFMEQSRSPSVSPSKQPVSTSSKTVTLFEQYCSGGNPFEIQANHKDEETEDVLASNGYESDEQEKSAYQEYDSDSDVPEELKRDYVDEQTGDGPVKSVSRETLKSRKKSDYSLNKVNAPILTNTTLNVIRLVDGVSLCCLGWSTVAHLHSLQAPPPGFKPFSCLSLPRSWDYRRPPPRPANFLYFLFFSRDGVSPC

SEQ ID NO: 70387 - protein, 190 aa, Homo sapiens
MFQVPDSEGGRAGSRAMKPPGGESSNLFGSPEEATPSSRPNRMASNIFGPTEEPQNIPKRTNPPGGKGSGIFDESTPVQTRQHLNPPGGKTSDIFGSPVTATSRLAHPNKPKDHVFLCEGEEPKSDLKAARSIPAGAEPEKSQLFRYTKEEEELWRPPSTKLYRTSGSNSQTSFQKRLETLGQEMKEFSS

SEQ ID NO: 70388 - protein, 102 aa, Homo sapiens
MASGGGGCSASERLPPPFPGLEPESEGAAGGSEPEAGDSDTEGEDIFTGAAVVSKHQSPKITTSLLPINNGSKENGIHEEQDQEPQDLFAGSHKFFEAPANL

SEQ ID NO: 70389 - protein, 245 aa, Homo sapiens
MPIVTIIYILTNVAYYTVLDMRDILASDAVAVTFADQIFGIFNWIIPLSVALSCFGGLNASIVAASRLFFVGSREGHLPDAICMIHVERFTPVPSLLFNGIMALIYLCVEDIFQLINYYSFSYWFFVGLSIVGQLYLRWKEPDRPRPLKLSVFFPIVFCLCTIFLVAVPLYSDTINSLIGIAIALSGLPFYFLIIRVPEHKRPLYLRRIVGSATRYLQVLCMSVAAEMDLEDGGEMPKQRDPKSN

SEQ ID NO: 70390 - protein, 233 aa, Homo sapiens
MVLLTAVLLLLAAYAGPAQSLGSFVHCEPCDEKALSMCPPSPLGCELVKEPGCGCCMTCALAEGQSCGVYTERCAQGLRCLPRQDEEKPLHALLHGRGVCLNEKSYREQVKIGCAPGGQRHICFSLYYSPHPKLPSPGLWPCAPWPTGADPPAPSPAERDSREHEEPTTSEMAEETYSPKIFRPKHTRISELKAEAVKKDRRKKLTQSKFVGGAENTAHPRIISAPEMRQESE

SEQ ID NO: 70391 - protein, 144 aa, Homo sapiens
  MOD_RES (1)..(1): Any amino acid
XLEKREKRREQALERISTAKTEVKTECKDTQIVSDAEVIQEQAKEENASKPTPAKVNRTKQRKSFSRSRTHIGQQRRRHRTVSMCSDIQPSSPDIEVTSQQNDIENTVLTIEPETETALAEIITETEVPALNKCPTKYPKTKKV

SEQ ID NO: 70392 - protein, 634 aa, Homo sapiens
MMQPLGHRPLSHHRTHGEVAMGLLVPSSEQLPAASLMSGYGAAHDRHLANGGEEEQALGARAPGSVAGAGSGLASSQASPQQACCLCSQASCGPESSGSELALATPVPQMLQGLLGSDDEEQEDPKDYCKGGYHPVKIGDVFNGRYHVVRKLGWGHFSTVWLCWDIQRKRFVALKVVKSAGHYTETAVDEIKLLKCVRDSDPSDPKRETIVQLIDDFRISGVNGVHVCMVLEVLGHQLLKWIIKSNYQGLPVPCVKSIVRQVLHGLDYLHTKCKIIHTDIKPENILLCVGDAYIRRLAAEATEWQQAGAPPPSRSIVSTAPQEVLQTGKLSKNKRKKMRRKRKQQKRLLEERLRDLQRLEAMEAATQAEDSGLRLDGGSGSTSSSGCHPGGARAGPSPASSSPAPGGGRSLSAGSQTSGFSGSLFSPASCSILSGSSNQRETGGLLSPSTPFGASNLLVNPLEPQNADKIKIKIADLGNACWVHKHFTEDIQTRQYRAVEVLIGAEYGPPADIWSTACMAFELATGDYLFEPHSGEDYSRDEDHIAHIVELLGDIPPAFALSGRYSREFFNRRGELRHIHNLKHWGLYEVLMEKYEWPLEQATQFSAFLLPMMEYIPEKRASAADCLQHPWLNP

SEQ ID NO: 70393 - protein, 215 aa, Homo sapiens
MCSLALQQLISMDLFWRLFFVCGQEGLRALEATGMMLRVLVGAVLPAMLLAAPPPINKLALFPDKSAWCEAKNITQIVGHSGCEAKSIQNRACLGQCFSYSVPNTFPQSTESLVHCDSCMPAQSMWEIVTLECPGHEEVPRVDKLVEKILHCSCQACGKEPSHEGLSVYVQGEDGPGSQPGTHPHPHPHPHPGGQTPEPEDPPGAPHTEEEGAED

SEQ ID NO: 70394 - protein, 50 aa, Homo sapiens
KYRCVSDSQCGPERLPGGGILTGRCVNYSSVLRTCEIQGWCPTEVDTVET

SEQ ID NO: 70395 - protein, 208 aa, Homo sapiens
  MOD_RES (1)..(1): Any amino acid
XEGAMAVRVTAAHTAEAQAEAGREAGEGAVAAVAAALAPSGFLGLPAPFSEEGLEEKPDGALAAQPPPSQALLTAGSLQMRTMCTDAAAARQSSPPWRILFSTRFRRPASGPLRRPCLPPLPPQRCWARRWCRQHQAQRSPSLWPTSWWRRPLWQQTSATHLTLLVVGTSKRSSWLLRRSWETVRWPRPRAAPASRGWGSQGRVSRPR

SEQ ID NO: 70396 - protein, 13 aa, Homo sapiens
MGLGPVFLLLAGI

SEQ ID NO: 70397 - protein, 51 aa, Homo sapiens
MAVAAVKWVMSKRTILKHLFPVQNSGVHVQVCYVDVLHILRFGLQLNPSPK

SEQ ID NO: 70398 - protein, 714 aa, Homo sapiens
MENLESRLKNAPYFRCEKGTDSIPLCRKCETRVLAWKIFSTKEWFCRINDISQRRFLVGILKQLNSLYLLHYFQNILQTTQGKDFIYNRSRIDLSKKEGKVVKSSLNQMLDKTVEQKMKEILYWFANSTQWTKANYTLLLLQMCNPKLLLTAANVIRVLFLREENNISGLNQDITDVCFSPEKDHSSKSATSQVYWTAKTQHTSLPLSKAPENEHFLGAASNPEEPWRNSLRCISEMNRLFSGKADITKPGYDPCNLLVDLDDIRDLSSGFSKYRDFIRYLPIHLSKYILRMLDRHTLNKCASVSQHWAAMAQQVKMDLSAHGFIQNQITFLQGSYTRGIDPNYANKVSIPVPKMVDDGKSMRVKHPKWKLRTKNEYNLWTAYQNEETQQVLMEERNVFCGTYNVRILSDTWDQNRVIHYSGGDLIAVSSNRKIHLLDIIQVKAIPVEFRGHAGSVRALFLCEEENFLLSGSYDLSIRYWDLKSGVCTRIFGGHQGTITCMDLCKNRLVSGGRDCQVKVWDVDTGKCLKTFRHKDPILATRINDTYIVSSCERGLVKVWHIAMAQLVKTLSGHEGAVKCLFFDQWHLLSGSTDGLVMAWSMVGKYERCLMAFKHPKEVLDVSLLFLRVISACADGKIRIYNFFNGNCMKVIKANGRGDPVLSFFIQGNSDHLRKTYLPVEWKTDGRRVRKKAEKSAGMCCNNPRKTDDGLKLKH

SEQ ID NO: 70399 - protein, 206 aa, Homo sapiens
MEKKLLIKSKELQDSQDKCHKMEQEMTRLHRRVSEVEAVLSQKEVELKASETQRSLLEQDLATYITECSSLKRSLEQARMEVSQEDDKALQLLHDIREQSRKLQEIKEQEYQAQVEEMRLMMNQLEEDLVSARRRSDLYESELRESRLAAEEFKRKATECQHKLLKAKDQGKPEVGEYAKLEKINAEQQLKIQELQEKLEKVSPRL

SEQ ID NO: 70400 - protein, 115 aa, Homo sapiens
MNSQLVTTEKRFLKDSLYNEGILIVWDPSVYHSDIPKWYQNPDYNFFNNYKTYRKLHPNQPFYILKPQMPWELWDILQEISPEEIQPNPPSSGMLGIIIMMTLCDQVDIYEFLPS

SEQ ID NO: 70401 - protein, 170 aa, Homo sapiens
  MOD_RES (1)..(1): Any amino acid
XGIKDGATMKTFCGTPEYLAPEVLEDNDYGRAVDWWGLGVVMYEMMCGRLPFYNQDHEKLFELILMEEIRFPRTLGPEAKSLLSGLLKKDPKQRLGGGSEDAKEIMQHRFFAGIVWQHVYEKKLSPPFKPQVTSETDTRYFDEEFTAQMITITPPDQVLGDCPTGSLPLR

SEQ ID NO: 70402 - protein, 280 aa, Homo sapiens
  MOD_RES (1)..(1): Any amino acid
XRGGLELGDAGAAGQLVLTNPWNIMIKHRQVQRRGRRSQMTTSFTDPAISMDLLRAVLQPSINEEIQTVFNKYMKAKLLFSDGEKVIPRLTHELPGIKRGRQAEEECAHRGSPLPKKRKGRPPGHILSSDRAAAGMVWKPKSCEPIRREGPKWDPARLNESTTFVLGSRANKALGMGGTRGRIYIKHPHLFKYAADPQDKHWLAEQHHMRATGGKMAYLLIEEDIRDLAASDDYRGCLDLKLEELKSFVLPSWMVEKMRKYMETLRTENEHRAVEAPPQT

SEQ ID NO: 70403 - protein, 82 aa, Homo sapiens
MVTVCLCHLLQLGANVLLFLCTNVIGICTHYPAEVSQRQAFQETRGYIQARLHLQHENRQQERLLLSVLPQHVAMEMKEDIN

SEQ ID NO: 70404 - protein, 72 aa, Homo sapiens
MEDDSMDLIDSDELLDPEDLKKPDPASLRAASCGEGKKRKACKNCTCGLAEELEKEKSREQMSSQPKSACGN

SEQ ID NO: 70405 - protein, 56 aa, Homo sapiens
VYMYQLFRSLAYIHSQGVCHRDIKPQNLLVDPDTAVLKLCDFGRCWEHQPGNKSER

SEQ ID NO: 70406 - protein, 52 aa, Homo sapiens
MPGEQQAEEEEEEEMQEEMVLLVKGEEDEGEEKYEVVKLKIPMDNKEEAECP

SEQ ID NO: 70407 - protein, 247 aa, Homo sapiens
MGWQRLLLLPRPPASTGASNATRRPKSCTETITTKSCQKPVDKYIEYDPVIILINAILCKAQAYRHILFNTQINIHGKLCIFCLLCEAYLRWWQLQDSNQNTAPDDLIRYAKEWDFYRMFAIAALEQTAYFIGIFTFLWVERPMTAKKKPNFILLLKALLLSSYGKLLLIPAVIWEHDYTSVCLKLIKVFVLTSNFQAIRVTLNINRKLSFLAVLSGLLLESIMVYFFQSMEWDVGSDYAIFKSQDF

SEQ ID NO: 70408 - protein, 128 aa, Homo sapiens
MSRPLEGPRGHAASPGLLWATRVTSTLAGLHELALSDETRHNWFASQMNKGSCLSPARLLSCCPRGFRSCGRRDAGAPRQGSPSVRPGARAPQSLRWNRSPWTSAELARDFGETSPAQRWTPQQTALA

SEQ ID NO: 70409 - protein, 148 aa, Homo sapiens
  MOD_RES (1)..(1): Any amino acid
XKDWEDIKKMPEHSTLMKDFRRNTYTNCSLIKYMEKHKVKPDSKAFHLLQKLLTMDPIKRITSEQAMQDPYFLEDPLPTSDVFAGCQIPYPKREFLTEEEPDDKGDKRSNPHAAYPNPGPSTSQPQSSMGYSATSQQPPQYSHQTHRY

SEQ ID NO: 70410 - protein, 169 aa, Homo sapiens
YCSIQAEGTSQNTSRKEDFNQTLTSNEQTSRADDLIETAKVFVNNLSTVCEKVWTLGLHQTFLLMLIIGRWLLPIGGGITRDQLSQLLLMFVGTAADILEFTSETLEEQNVRNSPALVYAILVIWTWSMLQFPLDLADPCIRTSEDIGAVKIVLIGGPWNPTGLTLIKT

SEQ ID NO: 70411 - protein, 964 aa, Homo sapiens
MPHKIGFVVVSSSGHEDGFSARELMIHAPTVSGWRSPRFCQFPQEIVLQMVERCRIRKLQLLAHQYMISSKIEFYISESLPEYFAPYQAERFRRLGYVSLCDNEKTGCKARELKSVYVDAVGQFLKLIFHQNHVNKYNIYNQVALVAINIIGDPADFSDESNTASREKLIDHYLGHNSEDPALEGTYARKSDYISPLDDLAFDMYQDPEVAQIIRKLDERKREAVQKERYDYAKKLKQAIADLQKVGERLGRYEVEKRCAVEKEDYDLAKEKKQQMEQYRAEVYEQLELHSLLDAELMRRPFDLPLQPLARSGSPCHQKPMPSLPQLEERGTENQFAEPFLQEKPSSYSLTISPQHSAVDPLLPATDPHPKINAESLPYDERPLPAIRKHYGEAVVEPEMSNADISDARRGGMLGEPEPLTEKALREASSAIDVLGETLVAEAYCKTWSYREDALLALSKKLMEMPVGTPKEDLKNTLRASVFLVRRAIKDIVTSVFQASLKLLKMIITQYIPKHKLSKLETAHCVERTIPVLLTRTGDSSARLRVTAANFIQEMALFKEVKSLQIIPSYLVQPLKANSSVHLAMSQMGLLARLLKDLGTGSSGFTIDNVMKFSVSALEHRVYEVRETAVRIILDMYRQHQASILEYLPPDDSNTRRNILYKTIFEGFAKIDGRATDAEMRARRKAATEEAEKQKKEEIKALQGQLAALKEIQAEVQEKESDAVKPKNQDIQGGKAAPAEALGIPDEHYLDNLCIFCGERSESFTEEGLDLHYWKHCLMLTRCDHCKQVVEISSLTEHLLTECDKKDGFGKCYRCSEAVFKEELPRHIKHKDCNRMESSPDGPSRLHDEPAQDTHSAEGPGTAAREKLSCGRIRPLGVKGRKQDPHPEGRTEQELQQDVRQALTRRSGSLVSVRDGAGLLILHHLSRTLWPWWPHALAAVPSSPPCTPLTRLCRQLSCKRYGCS

SEQ ID NO: 70412 - protein, 136 aa, Homo sapiens
MIGGLFIYNHKGEVLISRVYRDDIGSRQAADSAVFSSSGPFPGEWLEARNAVDAFRVNVIHARQQVRSPVTNIARTSFFHVKRSNIWLAAVTKQNVNAAMVFEFLYKMCDVMAAYFGKISEENIKNNFVLIYELLD

SEQ ID NO: 70413 - protein, 49 aa, Homo sapiens
MSKSESPKEPEQLRKLFIGGLSFETTDESLRSHFEQWGTLTDCVGGVCY

SEQ ID NO: 70414 - protein, 79 aa, Homo sapiens
MKMQRTIVIRRDYLHYIRKYNRFEKRHKNMSVHLSPCFRDVQIGDIVTVGECRPLSKTVRFNVLKVTKAAGTKKQFQKF

SEQ ID NO: 70415 - protein, 38 aa, Homo sapiens
VIRKFLNSSEFCSKKFCQGDKSRKIGLEQKAAEGSLLC

SEQ ID NO: 70416 - protein, 124 aa, Homo sapiens
MASAKSLDRWKARLLEGGSTALTYALVRAEVSFPAEVAPVRQQGSVAGARAGVVSLLGCRSSWTAAMELSAEYLREKLQRDLEAEHVEVEDTTLNRCSCSFRVLVVSAKFEGKPLLQRHRFCTE

SEQ ID NO: 70417 - protein, 152 aa, Homo sapiens
MWERMDEGCGETIYVIGQGSDGTEYGLSEADMEASYATVKSMAEQIEADVILLRERQEAGGRVRDYLVRKRVGDNDFLEVRVAVVGNVDAGKSTLLGVLTHGELDNGRGFARQKLFRHKHEIESGRTSSVGNDILGFDSEGNVVNKPDSHGG

SEQ ID NO: 70418 - protein, 50 aa, Homo sapiens
MFPKSNLTVTCWVWRSMRKLFLLLSLLLSHAAHLEGKKDNQFIWKPGLAK

SEQ ID NO: 70419 - protein, 175 aa, Homo sapiens
MTNCPTLIVMVGLPARGKTYISKKLTRYLNWIGVPTREFNVGQYRRDVVKTYKSFEFFLPDNEEGLKIRKQCALAALRDVRRFLSEEGGHVAVFDATNTTRERRATIFNFGEQNGYKTFFVESICVDPEVIAANIVQVKLGSPDYVNRDSDEATEDFMRRIECYENSYESLDEDL

SEQ ID NO: 70420 - protein, 149 aa, Homo sapiens
MAWQGLVLAACLLMFPSTTADCLSRCSLCAVKTQDGPKPINPLICSLQCQAALLPSEEWERCQSFLSFFTPSTLGLNDKEDLGSKSVGEGPYSELAKLSGSFLKELEKSKFLPSISTKENTLSKSLEEKLRGLSDGFREGAESELMRDA

SEQ ID NO: 70421 - protein, 18 aa, Homo sapiens
MPCTPCVLGDPVPTPTWA

SEQ ID NO: 70422 - protein, 393 aa, Homo sapiens
MWLKVGGLLRGTGGQLGQTVGWPCGALGPGPHRWGPCGGSWAQKFYQDGPGRGLGEEDIRRAREARPRKTPRPQLSDRSRERKVPASRISRLANFGGLAVGLGLGVLAEMAKKSMPGGRLQSEGGSGLDSSPFLSEANAERIVQTLCTVRGAALKVGQMLSIQDNSFISPQLQHIFERVRQSADFMPRWQMLRVLEEELGRDWQAKVASLEEVPFAAASIGQVHQGLLRDGTEVAVKIQYPGIAQSIQSDVQNLLAVLKMSAALPAGLFAEQSLQALQQELAWECDYRREAACAQNFRQLLANDPFFRVPAVVKELCTTRVLGMELAGGVPLDQCQGLSQDLRNQICFQLLTLCLRELFEFRFMQTDPNWANFLYDASSHQTESHSVAQAGVQ

SEQ ID NO: 70423 - protein, 594 aa, Homo sapiens
MYFPSWLSQLYRGLSRPIRRTTQPIWGSLYRSLLQSSQRRIPEFSSFVVRTNTCGELRSSHLGQEVTLCGWIQYRRQNTFLVLRDFDGLVQVIIPQDESAASVKKILCEAPVESVVQVSGTVISRPAGQENPKMPTGEIEIKVKTAELLNACKKLPFEIKNFVKKTEALRLQYRYLDLRSFQMQYNLRLRSQMVMKMREYLCNLHGFVDIETPTLFKRTPGGAKEFLVPSREPGKFYSLPQSPQQFKQLLMVGGLDRYFQVARCYRDEGSRPDRQPEFTQIDIEMSFVDQTGIQSLIEGLLQYSWPNDKDPVVVPFPTMTFAEVLATYGTDKPDTRFGMKIIDISDVFRNTEIGFLQDALSKPHGTVKAICIPEGAKYLKRKDIESIRNFAADHFNQCSLLGKLRLECADLLETRGVVLRDPTLFSFLWVVDFPLFLPKEENPRELESAHHPFTAPHPSDIHLLYTEPKKARSQHYDLVLNGNEIGGGSIRIHNAELQRYILATLLKEDVKMLSHLLQALDYGAPPHGGIALGLDRLICLVTGSPSIRDVIAFPKSFRGHDLMSNTPDSVPPEELKPYHIRVSKPTDSKAERAH

SEQ ID NO: 70424 - protein, 55 aa, Homo sapiens
MFEEKASSPSGKMGGEEKPIGAGEEKQKEGGKKKNKEGSGDGGRAERLTQRVSAE

SEQ ID NO: 70425 - protein, 1007 aa, Homo sapiens [sequence omitted]

SEQ ID NO: 70426 - protein, 120 aa, Homo sapiens
MKKCLLPVLITCMQTAICKDRMMMIMILLVNYRPDEFIECEDPVDHVGNATASQELGYGCLKFGGQAYSDVEHTSVQCHALDGIECASPRTFLRENKPCIKYTGHYFITTLLYSFFLGCF

SEQ ID NO: 70427 - protein, 246 aa, Homo sapiens
  MOD_RES (1)..(1): Any amino acid
XPSLNKTVSNGELPAGPQGDAAVLEQALQEEPEDDGDRDDSKLPPPPTLEPTGPAPSLSEQESPPEPPTLKPINDSKPPSRFLKPRKVEEDELLEKSPLQLGNEPLQRLLSDNGINRLSLMAPDTPAGTPLSGVGRRTSVLFKKAKNGVKLQRSPDRVLENGEDHGVAGSPASPASIEEERHSRKRPRSRSCSESEGERSPQQEEETGMTNGFGKHTESGSDSECSLGLSGGLAFEACRQKPPAAL

SEQ ID NO: 70428 - protein, 54 aa, Homo sapiens
  MOD_RES (1)..(1): Any amino acid
XKDLCLQPESLRLRWGPDHSRGKSPPRPGNSQPPDVFVSSVAETTSQVVTSKPA

SEQ ID NO: 70429 - protein, 3053 aa, Homo sapiens
VSDGMTGSNPVSPASSSSPASSGAGGISPQHIAQDSSLDGPPGPPDGATVPLEGFSLSQAADLANKGPKWEKSHAEIAEQAKHEAEIETRIAELRKEGFWSLKRLPKVPEPPRPKGHWDYLCEEMQWLSADFAQERRWKRGVARKVVRMVIRHHEEQRQKEERARREEQAKLRRIASTMAKDVRQFWSNVEKVVQFKQQSRLEEKRKKALDLHLDFIVGQTEKYSDLLSQSLNQPLTSSKAGSSPCLGSSSAASSPPPPASRLDDEDGDFQPQEDEEEDDEETIEVEEQQEGNDAEAQRREIELLRREGELPLEELLRSLPPQLLEGPSSPSQTPSSHDSDTRDGPEEGAEEEPPQVLEIKPPPSAVTQRNKQPWHPDEDDEEFTANEEEAEDEEDTIAAEEQLEGEVDHAMELSELAREGELSMEELLQQYAGAYAPGSGSSEDEDEDEVDANSSDCEPEGPVEAEEPPQEDSSSQSDSVEDRSEDEEDEHSEEEETSGSSASEESESEESEDAQSQSQADEEEEDDDFGVEYLLARDEEQSEADAGSGPPTPGPTTLGPKKEITDIAAAAESLQPKGYTLATTQVKTPIPLLLRGQLREYQHIGLDWLVTMYEKKLNGILADEMGLGKTIQTISLLAHLACEKGNWGPHLIIVPTSVMLNWEMELKRWCPSFKILTYYGAQKERKLKRQGWTKPNAFHVCITSYKLVLQDHQAFRRKNWRYLILDEAQNIKNFKSQRWQSLLNFNSQRRLLLTGTPLQNSLMELWSLMHFLMPHVFQSHREFKEWFSNPLTGMIEGSQEYNEGLVKRLHKVLRPFLLRRVKVDVEKQMPKKYEHVIRCRLSKRQRCLYDDFMAQTTTKETLATGHFMSVINILMQLRKVCNHPNLFDPRPVTSPFITPGICFSTASLVLRATDVHPLQRIDMGRFDLIGLEGRVSRYEADTFLPRHRLSRRVLLEVATAPDPPPRPKPVKMKVNRMLQPVPKQEGRTVVVVNNPRAPLGPVPVRPPPGPELSAQPTPGPVPQVLPASLMVSASPAGPPLIPASRPPGPVLLPPLQPNSGSLPQAGEVVSIGQLASLAQRPVANAGGSKPLTFQIQGNKLTLTGAQVRQLAVGQPRPLQMPPTMVNNTGVVKIVVRQAPRDGLTPVPPLAPAPRPPSSGLPAVLNPRPTLTPGRLPTPTLGTARAPMPTPTLVRPLLKLVHSPSPEVSASAPGAAPLTISSPLHVPSSLPGPASSPMPIPNSSPLASPVSSTVSVPLSSSLPISVPTTLPAPASAPLTIPISAPLTVSASGPALLTSVTPPLAPVVPAAPGPPSLAPSGASPSASALTLGLATAPSLSSSQTPGHPLLLAPTSSHVPGLNSTVAPACSPVLVPASALASPFPSAPNPAPAQASLLAPASSASQALATPLAPMAAPQTAILAPSPAPPLAPLPVLAPSPGAAPVLASSQTPVPVMAPSSTPGTSLASASPVPAPTPVLAPSSTQTMLPAPVPSPLPSPASTQTLALAPALAPTLGGSSPSQTLSLGTGNPQGPFPTQTLSLTPASSLVPTPAQTLSLAPGPPLGPTQTLSLAPAPPLAPASPVGPAPAHTLTLAPASSSASLLAPASVQTLTLSPAPVPTLGPAAAQTLALAPASTQSPASQASSLVVSASGAAPLPVTMVSRLPVSKDEPDTLTLRSGPPSPPSTATSFGGPRPRRQPPPPPRSPFYLDSLEEKRKRQRSERLERIFQLSEAHGALAPVYGTEVLDFCTLPQPVASPIGPRSPGPSHPTFWTYTEAAHRAVLFPQQRLDQLSEIIERFIFVMPPVEAPPPSLHACHPPPWLAPRQAAFQEQLASELWPRARPLHRIVCNMRTQFPDLRLIQYDCGKLQTLAVLLRQLKAEGHRVLIFTQMTRMLDVLEQFLTYHGHLYLRLDGSTRVEQRQALMERFNADKRIFCFILSTRSGGVGVNLTGADTVVFYDSDWNPTMDAQAQDRCHRIGQTRDVHIYRLISERTVEENILKKANQKRMLGDMAIEGGNFTTAYFKQQTIRELFDMPLEEPSSSSVPSAPEEEEETVASKQTHILEQALCRAEDEEDIRAATQAKAEQVAELAEFNENDGFPAGEGEEAGRPGAEDEEMSRAEQEIAALVEQLTPIERYAMKFLEASLEEVSREELKQAEEQVEAARKDLDQAKEEVFRLPQEEEEGPGAGDESSCGTGGGTHRRSKKAKAPERPGTRVSERLRGARAETQGANHTPVISAHQTRSTTTPPRCSPARERVPRPAPRPRPTPASAPAAIPALVPVPVSAPVPISAPNPITILPVHILPSPPPPSQIPPCSSPACTPPPACTPPPAHTPPPAQTCLVTPSSPLLLGPPSVPISASVTNLPLGLRPEAELCAQALASPESLELASVASSETSSLSLVPPKDLLPVAVEILPVSEKNLSLTPSAPSLTLEAGSIPNGQEQEAPDSAEGTTLTVLPEGEELPLCVSESNGLELPPSAASDEPLQEPLEADRTSEELTEAKTPTSSPEKPQELVTAEVAAPSTSSSATSSPEGPSPARPPRRRTSADVEIRGQGTGRPGQPPGPKVLRKLPGRLVTVVEEKELVRRRRQQRGAASTLVPGVSETSASPGSPSVRSMSGPESSPPIGGPCEAAPSSSLPTPPQQPFIARRHIELGVTGGGSPENGDGALLAITPPAVKRRRGRPPKKNRSPADAGRGVDEAPSSTLKGKTNGADPVPGPETLIVADPVLEPQLIPGPQPLGPQPVHRPNPLLSPVEKRRRGRPPKARDLPIPGTISSAGDGNSESRTQPPPHPSPLTPLPPLLVCPTATVANTVTTVTISTSPPKRKRGRPPKNPPSPRPSQLPVLDRDSTSVLESCGLGRRRQPQGQGESEGSSSDEDGSRPLTRLARLRLEAEGMRGRKSGGSMVVAVIQDDLDLADSGPGGLELTPPVVSLTPKLRSTRLRPGSLVPPLETEKLPRKRAGAPVGGSPGLAKRGRLQPPSPLGPEGSVEESEAEASGEEEEGDGTPRRRPGPRRLVGTTNQGDQRILRSSAPPSLAGPAVSHRGRKAKT

SEQ ID NO: 70430 - protein, 85 aa, Homo sapiens
MQKSEGSGGTQLKNRATGNYDQRTSSSTQLKHRNAVQGSKSSLSTSSPESARKLHPRPSDKLNPKTINPIGTWFSKTQITVGMSS

SEQ ID NO: 70431 - protein, 176 aa, Homo sapiens
MDEAWKRRWFVLRSGRLTGDPDVLEYYKNDHAKKPIRIIDLNLCQQVDAGLTFNKKEFENSYIFDINTIDRIFYLVADSEEEMNKWVRCICDICGFNPTEEDPVKPPGSSLQAPADLPLAINTAPPSTQADSSSATLPPPYQLINVPPHLETLGIQEDPQDYLLLINCQSKKPEPT

SEQ ID NO: 70432 - protein, 184 aa, Homo sapiens
MSGVSEPLSRVKLGTLRRPEGPAEPMVVVPVDVEKEDVRILKVCFYSNSFNPGKNFKLVKCTVQTEIREIITSILLSGRIGPNIRLAECYGLRLKHMKSDEIHWLHPQMTVGEVQDKYECLHVEAEWRYDLQIRYLPEDFMESLKEDRTTLLYFYQQLRNDYMQRYASKVSEGMALQLGCLELR

SEQ ID NO: 70433 - protein, 647 aa, Homo sapiens
  MOD_RES (1)..(1): Any amino acid
XLSKTKLQIKKQETSTEQPLTTPDKEPNENLILRHQDSMSKSEMQVKEQRTLKGQRIITHDEEPGKNLVLEHQDSVSKLEMQIEKTKKLPREKRHSTHDEESGENPMLKHQDSVSKIQVQLEIQETSEGEGRSIPDKNSMFVHQDSVSKLQMQEKKKITPGRERRNNSKSKLQMQEKKQINSGVERHKTFPLEIKKKDISLEHLLPEEKVLLSRSESQTKKLQAKVTSRKIKNEAASELPDTAENLPAMYPSISDLIIQFDLNKVVETDIESLRGALGRRLLNDEFKTQSKSFPGPDIEQLTDAFGRDILKDEFKTRSKSLPETDERLHSTTERGTINDAIKTQLKRKSYPETVLKHLKGVNGKDIIKHLINIQSKSHGETDKEHLADDTGRGIIKGSINAQLKGHQKTDKNFFAYATGRGLMKESTTTQLKSHPETDKEFLADAIGRGIIIGPITTQLKSHRETDKELLKDAIGRDIIKGPISAQLKSHQETDVEPLTNAIGSSKTIGEIKTQLRTHYDVNLFKNKDMSVQRQEGIFTRSITPSKFPTKVINLSPFENKEETYEYSSPYVTAPSKAIYRTYRAGPSFSKDIHLPLLNQLPSGHSKVVTLSQKTIEFTLPTVTNTVGKPTYKVLHAAARKSVPHPYF

SEQ ID NO: 70434 - protein, 133 aa, Homo sapiens
MLENLALISSLGCWCGSKDEEAPCKQRISVQRESQSRTPRAGVSPKKAHPCEMCGLILEDVFHFADHQETHHKQKLNRSGACGKNLDDTAYLHQHQKQHIGEKFYRKSVREASFVKKRKLRVSQEPFVFREFG

SEQ ID NO: 70435 - protein, 44 aa, Homo sapiens
MFPPSGHQDVSERRLDTQRPQVTMWERDVSSDRQEPGRRGSCPL

SEQ ID NO: 70436 - protein, 91 aa, Homo sapiens
MAVQISKKRKFVADGIFKAELNEFLTRELAEDGYSGVEVRVTPTRTEIIILATRTQNVLGEKGRRIRELTAVVQKRFGFPEGSVEHCGTQR

SEQ ID NO: 70437 - protein, 150 aa, Homo sapiens
MEFVKCLGHPEEFYNLVRFRIGGKRKVMPKMDQDSLSSSLKTCYKYLNQTSRSFAAVIQALDGEMRNAVCIFYLVLRALDTLEDDMTISVEKKVPLLHNFHSFLYQPDWRFMESKEKDRQVLEDFPTISLEFRNLAEKYQTVIADICRRM

SEQ ID NO: 70438 - protein, 107 aa, Homo sapiens
MEALILEPSLYTVKAILILDNDGDRLFAKYYDDTYPSVKEQKAFEKNIFNKTHRTDSEIALLEGLTVVYKSSIDLYFYVIGSSYENEEKCRKASTAGEHGGAVLGCG

SEQ ID NO: 70439 - protein, 85 aa, Homo sapiens
MADDLEQQSQGWLSSWLPTWRPTSMSQLKNVEARILQCLQNKFLARYVSLPNQNKIWTVTVSPEQNDRTPLVMLKASIPKGPGGG

SEQ ID NO: 70440 - protein, 118 aa, Homo sapiens
MLMVNPDRRATIEDIANHWWVNWGYKSSVCDCDALHDSESPLLARIIDWHHRSTGLQADTEAKMKGLAKPTTSEVMLERQRSLKKSKKENDFAQSGQDAVPESPSKLSSKRPKGILKK

SEQ ID NO: 70441 - protein, 111 aa, Homo sapiens
MFSTKALLLAGLISTALAGPWANICAGKSSNEIRTCDRHGCGQYSAQRSQRPHQGVDILCSAGSTVYAPFTGMIVGQEKPYQNKNAINNGVRISGRGKRGGVYTWGASWRC

SEQ ID NO: 70442 - protein, 142 aa, Homo sapiens
  MOD_RES (1)..(1): Any amino acid
XCCRRPPLGLYARMRRLPGPEVSGRSVAAASGPGAWGTDHYCLELLRKRDYEGYLCSLLLPAESRSSVFALRAFNVELAQVKDSVSEKTIGLMRMQFWKKTVEDIYCDNPPHQPVAIELWKVCTPAEAGPVSGPQIDFTEPQ

SEQ ID NO: 70443 - protein, 559 aa, Homo sapiens
MLVCGQPPFQEANDSETLTMIMDCKYTVPSHVSKECKDLITRMLQRDPKRRASLEEIENHPWLQGVDPSPATKYNIPLVSYKNLSEEEHNSIIQRMVLGDIADRDAIVEALETNRYNHITATYFLLAERILREKQEKEIQTRSASPSNIKAQFRQSWPTKIDVPQDLEDDLTATPLSHATVPQSPARAADSVLNGHRSKGLCDSAKKDDLPELAGPALSTVPPASLKPTASGRKCLFRVEEDEEEDEEDKKPMSLSTQVVLRRKPSVTNRLTSRKSAPVLNQIFEEGESDDEFDMDENLPPKLSRLKMNIASPGTVHKRYHRRKSQGRGSSCSSSETSDDDSESRRRLDKDSGFTYSWHRRDSSEGPPGSEGDGGGQSKPSNASGGVDKASPSENNAGGGSPSSGSGGNPTNTSGTTRRCAGPSNSMQLASRSAGELVESLKLMSLCLGSQLHGSTKYIIDPQNGLSFSSVKVQEKSTWKMCISSTGNAGQVPAVGGIKFFSDHMADTTTELERIKSKNLKNNVLQLPLCEKTISVNIQRNPKEGLLCASSPASCCHVI

SEQ ID NO: 70444 - protein, 97 aa, Homo sapiens
MKAQGETEESEKLSKMSSLLERLHAKFNQNRPWSETIKLVRQVMEKRVVMSSGGHQHLVSCLETLQKALKVTSLPAMTDRLESIARQNGAVRSLYSS

SEQ ID NO: 70445 - protein, 540 aa, Homo sapiens
MTSSRLWFSLLLAAAFAGRATALWPWPQNFQTSDQRYVLYPNNFQFQYDVSSAAQPGCSVLDEAFQRYRDLLFGSGSWPRPYLTGWPHQAYPVFLGKRHTLEKNVLVVSVVTPGCNQLPTLESVENYTLTINDDQCLLLSETVWGALRGLETFSQLVWKSAEGTFFINKTEIEDFPRFPHRGLLLDTSRHYLPLSSILDTLDVMAYNKLNVFHWHLVDDPSFPYESFTFPELMRKGSYNPVTHIYTAQDVKEVIEYARLRGIRVLAEFDTPGHTLSWGPGIPGLLTPCYSGSEPSGTFGPVNPSLNNTYEFMSTFFLEVSSVFPDFYLHLGGDEVDFTCWKSNPEIQDFMRKKGFGEDFKQLESFYIQTLLDIVSSYGKGYVVWQEVFDNKVKIQPDTIIQVWREDIPVNYMKELELVTKAGFRALLSAPWYLNRISYGPDWKDFYIVEPLAFEGTPEQKALVIGGEACMWGEYVDNTNLVPRLWPRAGAVAERLWSNKLTSDLTFAYERLSHFRCELLRRGVQAQPLNVGFCEQEFEQT

SEQ ID NO: 70446 - protein, 89 aa, Homo sapiens
MLIKRKICRNFLKMWMKSSRECYKKILEINPKLQTQVKGYLNQVDLQEKADLQEKEAHELLDSGKNTAVTTKNLLETLSKPDQIPLFYA

SEQ ID NO: 70447 - protein, 158 aa, Homo sapiens
  MOD_RES (1)..(1): Any amino acid
XLVGAPCPRASPAPPKAEAKAKALKAKKAVLKGVHSHKKKKIRTSPTFRRPKTLRLRRQPKYPRKSAPRRNKLDHYAIIKFPLTTESAMKKIEDNNTLVFIVDVKANKHQIKQAVKKLYDIDVAKVNTLIRPDGEKKAYVRLAPDYDALDVANKIGII

SEQ ID NO: 70448 - protein, 725 aa, Homo sapiens
MTVMSLSRDLKDDFHSDTVLSILNEQRIRGILCDVTIIVEDTKFKAHSNVLAASSLYFKNIFWSHTICISSHVLELDDLKAEVFTEILNYIYSSTVVVKRQETVTDLAAAGKKLGISFLEDLTDRNFSNSPGPYVFCITEKGVVKEEKNEKRHEEPAITNGPRITNAFSIIETENSNNMFSPLDLRASFKKVSDSMRTASLCLERTDVCHEAEPVRTLAEHSYAVSSVAEAYRSQPVREHDGSSPGNTGKENCEALAAKPKTCRKPKTFSIPQDSDSATENIPPPPVSNLEVNQERSPQPAAVLTRSKSPNNEGDVHFSREDENQSSDVPGPPAAEVPPLVYNCSCCSKAFDSSTLLSAHMQLHKPTQEPLVCKYCNKQFTTLNRLDRHEQICMRSSHMPIPGGNQRFLENYPTIGQNGGSFTGPEPLLSENRIGEFSSTGSTLPDTDHMVKFVNGQMLYSCVVCKRSYVTLSSLRRHANVHSWRRTYPCHYCNKVFALAEYRTRHEIWHTGERRYQCIFCLETFMTYYILKNHQKSFHAIDHRLSISKKTANGGLKPSVYPYKLYRLLPMKCKRAPYKSYRNSSYENARENSQMNESAPGTYVVQNPHSSELPTLNFQDTVNTLTNSPAIPLETSACQDIPTSANVQNAEGTKWGEEALKMDLDNNFYSTEVSVSSTENAVSSDLRAGDVPVLSLSNSSENAASVISYSGSAPSVIVHSSQFSS

SEQ ID NO: 70449 - protein, 313 aa, Homo sapiens
MAALTIATGTGNWFSALALGVTLLKCLLIPTYHSTDFEVHRNWLAITHSLPISQWYYEATSEWTLDYPPFFAWFEYILSHVAKYFDQEMLNVHNLNYSSSRTLLFQRFSVIFMDVLFVYAVRECCKCIDGKKVGKELTEKPKFILSVLLLWNFGLLIVDHIHFQYNGFLFGLMLLSIARLFQKRHMEGAFLFAVLLHFKHIYLYVAPAYGVYLLRSYCFTANKPDGSIRWKSFSFVRVISLGLVVFLVSALSLGPFLALNQLPQVFSRLFPFKRGLCHAYWAPNFWALYNALDKVLSVIAFCLWEKQETLRFF

SEQ ID NO: 70450 - protein, 412 aa, Homo sapiens
  MOD_RES (1)..(1): Any amino acid
XSLEGFTRYMDSRECLLFKNECRKVYQDMTHPLNDYFISSSHNTYLVSDQLLGPSDLWGYVSALVKGCRCLEIDCWDGAQNEPVVYHGYTLTSKLLFKTVIQAIHKYAFMTSDYPVVLSLENHCSTAQQEVMADNLQATFGESLLSDMLDDFPDTLPSPEALKFKILVKNKKIGTLKETHERKGSDKRGDNQDKETGVKKLPGVMLFKKKKTRKLKIALALSDLVIYTKAEKFKSFQHSRLYQQFNENNSIGETQARKLSKLRVHEFIFHTRKFITRIYPKATRADSSNFNPQEFWNIGCQMVALNFQTPGLPMDLQNGKFLDNGGSGYILKPHFLRESKSYFNPSNIKEGMPITLTIRLISGIQLPLTHSSSNKGDSLVIIEVFGVPNDQMKQQTRVIKKNGQGNMVIIPA

SEQ ID NO: 70451 - protein, 425 aa, Homo sapiens
MAAVATCGSVAASTGSAVATASKSNVTSFQRRGPRASVTNDSGPRLVSIAGTRPSVRNGQLLVSTGLPALDQLLGGGLAVGTVLLIEEDKYNIYSPLLFKYFLAEGIVNGHTLLVASAKEDPANILQELPAPLLDDKCKKEFDEDVYNHKTPESNIKMKIAWRYQLLPKMEQIGPVSSSRFGHYYDASKRMPQELIEASNWHGFFLPEKISSTLKVEPCSLTPGYTKLLQFIQNIIYEEGFDGSNPQKKQRNILRIGIQNLGSPLWGDDICCAENGGNSHSLTKFLYVLRGLLRTSLSACIITMPTHLIQNKAIIARVTTLSDVVVGLESFIGSERETNPLYKDYHGLIHIRQIPRLNNLICDESDVKDLAFKLKRKLFTIECITKLRSYDLRRQRYFLSRHLQRKFSIKKNPYFKKPHTLKKIY

SEQ ID NO: 70452 - protein, 615 aa, Homo sapiens
MATSRGASRCPRDIANVMQRLQDEQEIVQKRTFTKWINSHLAKRKPPMVVDDLFEDMKDGVKLLALLEVLSGQKLPCEQGRRMKRIHAVANIGTALKFLEGRKIKLVNINSTDIADGRPSIVLGLMWTIILYFQIEELTSNLPQLQSLSSSASSVDSIVSSETPSPPSKRKVTTKIQGNAKKALLKWVQYTAGKQTGIEVKDFGKSWRSGVAFHSVIHAIRPELVDLETVKGRSNRENLEDAFTIAETELGIPRLLDPEDVDVDKPDEKSIMTYVAQFLKHYPDIHNASTDGQEDDREDRVIFKEMKVWIEQFERDLTRAQMVESNLQDKYQSFKHFRVQYEMKRKQIEHLIQPLHRDGKLSLDQALVKQSWDRVTSRLFDWHIQLDKSLPAPLGTIGAWLYRAEVALREEITVQQVHEETANTIQRKLEQHKDLLQNTDAHKRAFHEIYRTRSVNGIPVPPDQLEDMAERFHFVSSTSELHLMKMEFLELKYRLLSLLVLAESKLKSWIIKYGRRESVEQLLQNYVSFIENSKFFEQYEVTYQILKQTAEMYVKADGSVEEAENVMKFMNETTAQWRNLSVEVRSVRSMLEEVISNWDRYGNTVASLQAWLEDA

SEQ ID NO: 70453 - protein, 468 aa, Homo sapiens
IAAMASLLWGGDAGAAESERLNSHFSNLSQPRKNLWGIKSTAVRNIDGSINNINEDDEEDVVDLAANSLLNKLIHQSLVESSHRVEVLQKDPSSPLYSVKTFEELRLKEELLKGIYAMGFNRPSKIQEMALPMMLAHPPQNLIAQSQSGTGKTAAFVLAMLSRVNALELFPQCLCLAPTYELALQTGRVVEQMGKFCVDVQVMYAIRGNRIPRGTDITKQIIIGTPGTVLDWCFKLKLIDLTKIRVFVLDEADVMIDTQGFSDHSIRIQRALPSECQMLLFSATFEDSVWHFAERIIPDPNVIKLRKEELTLNNIRQYYVLCEHRKDKYQALCNIYGSITIGQAIIFCQTRRNAKWLTVEMIQDGHQVSLLSGELTVEQRASIIQRFRDGKEKVLITTNVCARGIDVKQVTIVVNFDLPVKQGEEPDYETYLHRIGRTGRFGKKGLAFNMIEVDELPSLMKIQDHFSK

SEQ ID NO: 70454 - protein, 906 aa, Homo sapiens
MAHESERSSRLGVPCGEPAELGGDASEEDHPQVCAKCCAQFTDPTEFLAHQNACSTDPPVMVIIGGQENPNNSSASSEPRPEGHNNPQVMDTEHSNPPDSGSSVPTDPTWGPERRGEESSGHFLVAATGAETPKQAFFHLYHPLGSQHPFSAGGVGRSHKPTPAPSPALPGSTDQLIASPHLAFPSTTGLLAAQCLGAARGLEATASPGLLKPKNGSGELSYGEVMGPLEKPGGRHKCRFCAKVFGSDSALQIHLRSHTGERPYKCNVCGNRFTTRGNLKVHFHRHREKYPHVQMNPHPVPEHLDYVITSSGLPYGMSVPPEKAEEEAATPGGGVERKPLVASTTALSATESLTLLSTSAGTATAPGLPAFNKFVLMKAVEPKNKADENTPPGSEGSAISGVAESSTATRMQLSKLVTSLPSWALLTNHFKSTGSFPFPYVLEPLGASPSETSKLQQLVEKIDRQGAVAVTSAASGAPTTSAPAPSSSASSGPNQCVICLRVLSCPRALRLHYGQHGGERPFKCKVCGRAFSTRGNLRAHFVGHKASPAARAQNSCPICQKKFTNAVTLQQHVRMHLGGQIPNGGTALPEGGGAAQENGSEQSTVSGARSFPQQQSQQPSPEEELSEEEEEEDEEEEEDVTDEDSLAGRGSESGGEKAISVRGDSEEASGAEEEVGTVAAAATAGKEMDSNEKTTQQSSLPPPPPPDSLDQPQPMEQGSSGVLGGKEEGGKPERSSSPASALTPEGEATSVTLVEELSLQEAMRKEPGESSSRKACEVCGQAFPSQAALEEHQKTHPKEGPLFTCVFCRQGFLERATLKKHMLLAHHQNQYVAFLSNGLPMKPWNSSSTSTTTPSLAPPVLFGLGTVAGKVPPTMGSREAKEKTAPLLFQPPAPKAVPEKPIIDKK

SEQ ID NO: 70455 - protein, 148 aa, Homo sapiens
MNLCQSPFQEGCQSLLASWPEQAKEPRREGHTDKQQTEDVLAAGLRCLPHLPAICARRMSPAFRAMDVEPRAKGVLLEPFVHQVGGHSCVLRFNETTLCKPLVPREHQFYETLPAEMRKFTPQYKGQSQRPLVSWPSLPHFFPWSFPL

SEQ ID NO: 70456 - protein, 232 aa, Homo sapiens
  MOD_RES (1)..(1): Any amino acid
XFPELYFNVDNGYLEGLVRGLKAGVLSQADYLNLVQCETLEAAFFQDCISEQDLDEMNIEIIRNTLYKAYLESFYKFCTLLGGTTADAMCPILEFEADRRAFIITINSFGTELSKEDRAKLFPHCGRLYPEGLAQLARADDYEQVKNVADYYPEYKLLFEGAGSNPGDKTLEDRFFEHEVKLNKLAFLNQFHFGVFYAFVKLKEQECRNIVWIAECIAQRHRAKIDNYIPIF

SEQ ID NO: 70457 - protein, 37 aa, Homo sapiens
MVKYFLGQSVLRSSWDQVFAAFWQRYPNPYSLLGASF

SEQ ID NO: 70458 - protein, 78 aa, Homo sapiens
TCPLLLRVFTTNNGRHHRMDEFSRGNVPSSELQIYTWMDATLKELTSLVKEVYPEARKKGTHFNFAIVFTDVKRPGYR

SEQ ID NO: 70459 - protein, 110 aa, Homo sapiens
VDIFNKELLLIPIHLEVHWSLISVDVRRRTITYFDSQRTLNRRCPKHIAKYLQAEAVKKDRLDFHQGWKGYFKMYCKHLALSQPFSFTQQDMPKLRRQIYKELCHCKLTV

SEQ ID NO: 70460 - protein, 1001 aa, Homo sapiens
MAFYSCCWVLLALTWHTSAYGPDQRAQKKGDIILGGLFPIHFGVAAKDQDLKSRPESVECIRYNFRGFRWLQAMIFAIEEINSSPALLPNLTLGYRIFDTCNTVSKALEATLSFVAQNKIDSLNLDEFCNCSEHIPSTIAVVGATGSGVSTAVANLLGLFYIPQVSYASSSRLLSNKNQFKSFLRTIPNDEHQATAMADIIEYFRWNWVGTIAADDDYGRPGIEKFREEAEERDICIDFSELISQYSDEEEIQHVVEVIQNSTAKVIVVFSSGPDLEPLIKEIVRRNITGKIWLASEAWASSSLIAMPQYFHVVGGTIGFALKAGQIPGFREFLKKVHPRKSVHNGFAKEFWEETFNCHLQEGAKGPLPVDTFLRGHEESGDRFSNSSTAFRPLCTGDENISSVETPYIDYTHLRISYNVYLAVYSIAHALQDIYTCLPGRGLFTNGSCADIKKVEAWQVPFSNCSRDCLAGTRKGIIEGEPTCCFECVECPDGEYSDETDASACNKCPDDFWSNENHTSCIAKEIEFLSWTEPFGIALTLFAVLGIFLTAFVLGVFIKFRNTPIVKATNRELSYLLLFSLLCCFSSSLFFIGEPQDWTCRLRQPAFGISFVLCISCILVKTNRVLLVFEAKIPTSFHRKWWGLNLQFLLVFLCTFMQIVICVIWLYTAPPSSYRNQELEDEIIFITCHEGSLMALGFLIGYTCLLAAICFFFAFKSRKLPENFNEAKFITFSMLIFFIVWISFIPAYASTYGKFVSAVEVIAILAASFGLLACIFFNKIYIILFKPSRNTIEEVRCSTAAHAFKVAARATLRRSNVSRKRSSSLGGSTGSTPSSSISSKSNSEDPFPQPERQKQQQPLALTQQEQQQQPLTLPQQQRSQQQPRCKQKVIFGSGTVTFSLSFDEPQKNAMAHRNSTHQNSLEAQKSSDTLTRHEPLLPLQCGETDLDLTVQETGLQGPVGGDQRPEVEDPEELSPALVVSSSQSFVISGGGSTVTENVVNS

SEQ ID NO: 70461 - protein, 89 aa, Homo sapiens
MDAANFEQFLQERIKVNGKAGNLGGGVVTIERSKSKITVTSEVPFSKRYLKYLTKKYLKKNNLRDWLRVVANSKESYELRYFQINQDEE

SEQ ID NO: 70462 - protein, 36 aa, Homo sapiens
MLPLGMRDAAVAGLASSLSHLLVLGLYLGPQPDSRP

SEQ ID NO: 70463 - protein, 491 aa, Homo sapiens
MQPLLCLGNLEDARERTGTLLAQHPAWGRTRAKPGSPLNTKKEGDLIAAQARLKDLEALLNSKEAALSTALSEKRTLEGELHDLRGQVAKLEAALGEAKKQLQDEMLRRVDAENRLQTMKEELDFQKNIYSEELRETKRRHETRLVEIDNGKQREFESRLADALQELRAQHEDQVEQYKKELEKTYSAKLDNARQSAERNSNLVGAAHEELQQSRIRIDSLSAQLSQLQKQLAAKEAKLRDLEDSLARERDTSRRLLAEKEREMAEMRARMQQQLDEYQELLDIKLALDMEIHAYRKLLEGEEERLRLSPSPTSQRSRGRASSHSSQTQGGGSVTKKRKLESTESRSSFSQHARTSGRVAVEEVDEEGKFVRLRNKSNEDQSMGNWQIKRQNGDDPLLTYRFPPKFTLKAGQVVTIWAAGAGATHSPPTDLVWKAQNTWGCGNSLRTALINSTGEEVAMRKLVRSVTVVEDDEDEDGDDLLHHHHVSGSRR

SEQ ID NO: 70464 - protein, 151 aa, Homo sapiens
MLKYPDSHQPRIFGGVLESDARSESPQPAPDWGSQRPFHRFDDVWPMDPHPRTREDNDLDSQVSQEGLGPVLQPQPKSYFKSISVTKITKPDGIVEERRTVVDSEGRTETTVTRHEADSSPRGDPESPRPPALDDAFSILDLFLGRWFRSR

SEQ ID NO: 70465 - protein, 45 aa, Homo sapiens
MLDDNNHLIQCIMDSQNKGKTSECSHWRLPIHCLLYMLCPDRWVV

SEQ ID NO: 70466 - protein, 318 aa, Homo sapiens
MKNVTEVTLFVLKGFTDNLELQTIFFFLFLAIYLFTLMGNLGLILVVIRDSQLHKPMYYFLSMLSSVDACYSSVITPNMLVDFTTKNKVISFLGCVAQVFLACSFGTTECFLLAAMAYDRYVAIYNPLLYSVSMSPRVYMPLINASYVAGILHATIHTVATFSLSFCGANEIRRVFCDIPPLLAISYSDTHTNQLLLFYFVGSIELVTILIVLISYGLILLAILKMYSAEGRRKVFSTCGAHLTGVSIYYGTILFMYVRPSSSYASDHDMIVSIFYTIVIPLLNPVIYSLRNKDVKDSMKKMFGKNQVINKVYFHTKK

SEQ ID NO: 70467 - protein, 191 aa, Homo sapiens
MGSTDSKLNFRKAVIQLTTKTQPVEATDDAFWDQFWADTATSVQDVFALVPAAEIRAVREESPSNLATLCYKAVEKLVQGAESGCHSEKEKQIVLNCSRLLTRVLPYIFEDPDWRGFFCREKRMMSMPGPWPSPCSWPLLTCSSARTSRFRATGGALWTRQRTSTPWTAVNTSGRLVWASLTPPSLTTSTI

SEQ ID NO: 70468 - protein, 32 aa, Homo sapiens
MLAKDELMTILEKCFKVFKSYCENHLGSTAKR

SEQ ID NO: 70469 - protein, 242 aa, Homo sapiens
MGSDAWVGLWRPHRPRGPIAAHYGGPGPKYKLPPNTADDVRPRARPPGARSHDRARHRRRPRLLHLRPPTPLSALPHSGTWQVLPGASGERDVPQCASAHHCSPKLGCPGGTAEPRSRGLYGALALGSARHRQSLRPNLLHLRPQSGWQFLRGPQQDPGPLRLSGRESRGLQVPGPPVHDSGADFAPPRQHSEARARGLQRGSAPEAPRLEFRDPALGLPGPAGDRRGQLTRQAGAAPHVFA

SEQ ID NO: 70470 - protein, 50 aa, Homo sapiens
MGNIFGNLLKSLIGKKEMRILMVGLDAAGKTTILYKLKLGEIVTTIPTIG

SEQ ID NO: 70471 - protein, 124 aa, Homo sapiens
EFIREQLELLQTTGGIQGTLPLTVQKVLASQACHGAIKFNDGLSLQESCRLIEALSSCQLPFQCAHGRPSMLPLADIDHLEQEKQIKPNLTKLRKMAQAWRLFGKAECDTRQSLQQSMPPCEPP

SEQ ID NO: 70472 - protein, 293 aa, Homo sapiens
MVCEGKRSASCPCFFLLTAKFYWILTMMQRTHSQEYAHSIRVDGDIILGGLFPVHAKGERGVPCGELKKEKGIHRLEAMLYAIDQINKDPDLLSNITLGVRILDTCSRDTYALEQSLTFVQALIEKDASDVKCANGDPPIFTKPDKISGVIGAAASSVSIMVANILRLFKIPQISYASTAPELSDNTRYDFFSRVVPPDSYQAQAMVDIVTALGWNYVSTLASEGNYGESGVEAFTQISREIGGVCIAQSQKIPREPRPGEFEKIIKRLLETPNARAVIMFANEDDIRRILEA

SEQ ID NO: 70473 - protein, 56 aa, Homo sapiens
  MOD_RES (1)..(1): Any amino acid
XIKAVFILDNDGRRLLAKYYDDTFPSMKEQMVFEKNVFNKTSRTETDAHVCSHLPV

SEQ ID NO: 70474 - protein, 405 aa, Homo sapiens
MADPQAGSAAGDWEIDATEDKKGLSGKQNNFERKAVYQRQVRAPSLLAKSILEGYRPIPAETYVGGTFPLPPPVSDRMRKRRAFADKELENIMLEREYKEREMLETSQAAALFLPNRMVPGPDYNSYKSAYSPSPVEPPSKDFCNFLPTCLDLTMQYSGSGNMELISSNVSVATTYRQYPLSSRFLVWPKCGPISDTLLYQQCLLNATTSVQALKPGASWDLKGARVQDGLSAEQDMMPSKLEGSLVLPHTPEIQTTRSDLQGHQAVPERSAFSPPRRNFSPIVDTDSLAAQGHVLTKISKENTRHPLPLRHNPFHSLFQQTLTDKSGPELKTPFVKEAFEETPKKHRECLVKDNQKYTFTIDRCAKDLFVAKQVGTKLSVNEPLSFSVESILKRPSSAITRVSQ

SEQ ID NO: 70475 - protein, 860 aa, Homo sapiens
GKLHDPQLMGIIPRIAHDIFDHIYSMDENLEFHIKVSYFEIYLDKIRDLLDVSKTNLAVHEDKNRVPYVKGCTERFVSSPEEVMDVIDEGKANRHVAVTNMNEHSSRSHSIFLINIKQENVETEKKLSGKLYLVDLAGSEKVSKTGAEGAVLDEAKNINKSLSALGNVISALAEGTKTHVPYRDSKMTRILQDSLGGNCRTTIVICCSPSVFNEAETKSTLMFGQRAKTIKNTVSVNLELTAEEWKKKYEKEKEKNKTLKNVIQHLEMELNRWRNGEAVPEDEQISAKDQKNLEPCDNTPIIDNIAPVVAGISTEEKEKYDEEISSLYRQLDDKDDEINQQSQLAEKLKQQMLDQDELLASTRRDYEKIQEELTRLQIENEAAKDEVKEVLQALEELAVNYDQKSQEVEDKTRANEQLTDELAQKTTTLTTTQRELSQLQELSNHQKKRATEILNLLLKDLGEIGGIIGTNDVKTLADVNGVIEEEFTMARLYISKMKSEVKSLVNRSKQLESAQMDSNRKMNASERELAACQLLISQHEAKIKSLTDYMQNMEQKRRQLEESQDSLSEELAKLRAQEKMHEVSFQDKEKEHLTRLQDAEEMKKALEQQMESHREAHQKQLSRLRDEIEEKQKIIDEIRDLNQKLQLEQEKLSSDYNKLKIEDQEREMKLEKLLLLNDKREQAREDLKGLEETVSRELQTLHNLRKLFVQDLTTRVKKSVELDNDDGGGSAAQKQKISFLENNLEQLTKVHKQLVRDNADLRCELPKLEKRLRATAERVKALESALKEAKENAMRDRKRYQQEVDRIKEAVRAKNMARRAHSAQIAKPIRPGHYPASSPTAVHAIRGGGGSSSNSTHYQK

SEQ ID NO: 70476 - protein, 90 aa, Homo sapiens
MRPGLAPEPLSAPPGSPPPSAAPTSATSNSSNGGGPSKSGPPKCGPGTNSTLTKQIFPWMKESRQTSKLKNNSPGTAEGCGGGGGGGGGG

SEQ ID NO: 70477 - protein, 433 aa, Homo sapiens
MLQQILHDMYIDPELLAELSDVQKHILFYKMREEQLRRWKERETWEALAQDEGLRPPKTKRAASDKHIQWLLGADGEVWVWIMGEGPGDKPYEEISEELIAERARLQAQREAEELWRQKEAEITKKFRDALANEKARILAEKWKVEMEDRKAAKVLEERIHEEFKRKEEEERKRGEEQIRLQEEQRAKELYWTLKQAQLHCQASEKEEREWEEQLRRSKAADEERSRRAQRARDEYRHHSLRAIQKGTVAGLSSMFRELGQSHEQEARLYHHLPDPGLPQPLALPVSRTWERPLRPVSRDVIVRWFKEEQLPRRAGFERNTKFIAPWFHGIISREDAEALLENMTEGAFLVRVSEKIWGYTLSYRLQKGFKHFLVDASGDFYSFLGVDPNRHATLTDLVDFHKEEIITVSGGELLQEPCGQRDSPPDYHLLFE

SEQ ID NO: 70478 - protein, 193 aa, Homo sapiens
MKGSNRNKDHSAEGEGVGKRPKRKCLQWHPLLAKKLLDFSEEEEEEDEEEDIDKVQLLGADGLEQDVGETEDDESPEQRARRPMNAFLLFCKRHRSLVRQEHPRLDNRGATKILADWWAVLDPKEKQKYTDMAKEYKDAFMKANPGYKWCPTTNKPVKSPTPTVNPRKKLWAFPSDSSRDLPSPKKAKTEEMP

SEQ ID NO: 70479 - protein, 10 aa, Homo sapiens
MATAVEPEDQ

SEQ ID NO: 70480 - protein, 36 aa, Homo sapiens
MAEKFDCHYCRDPLQGKKYVQKDGHHCCLKCFDKFC

SEQ ID NO: 70481 - protein, 60 aa, Homo sapiens
MPTAAAPIISSVQKLVLYETRARYFLVGSNNAETKYRVLKIDRTEPKDLVIIDDRVLSGS

SEQ ID NO: 70482 - protein, 162 aa, Homo sapiens
MTSTGQDSTTTRQRRSRQNPQSPPQDSSVTSKRNIKKGAVPRSIPNLAEVKKKGKLILSLEGGYNLRALAEGVSASLHTLLGDPCPMLESPGAPCRSAQASVSCALEALEPFWEVLVRSTETVERDNMEEDNVEESEEEGPWEPPVLPILTWPVLQSRTGLV

SEQ ID NO: 70483 - protein, 422 aa, Homo sapiens
MAPNGTASSFCLDSTACKITITVVLAVLILITVAGNVVVCLAVGLNRRLRNLTNCFIVSLAITDLLLGLLVLPFSAIYQLSCKWSFGKVFCNIYTSLDVMLCTASILNLFMISLDRYCAVMDPLRYPVLVTPVRVAISLVLIWVISITLSFLSIHLGWNSRNETSKGNHTTSKCKVQVNEVYGLVDGLVTFYLPLLIMCITYYRIFKVARDQAKRINHISSWKAATIREHKATVTLAAVMGAFIICWFPYFTAFVYRGLRGDDAINEVLEAIVLWLGYANSALNPILYAALNRDFRTGYQQLFCCRLANRNSHKTSLRSNASQLSRTQSREPRQQEEKPLKLQVWSGTEVTAPQGATDRKPALSCTTCSSNLLSCCKSLWGLRFLQRHMGGPSEELSGEPLSEEPQKRPPQKAVRTLPSEAV

SEQ ID NO: 70484 - protein, 279 aa, Homo sapiens
MSEETVPEAASPPPPQGQPYFDRFSEDDPEYMRLRNRAADLRQDFNLMEQKKRVTMILQSPSFREELEGLIQEQMKKGNNSSNIWALRQIADFMASTSHAVFPTSSMNVSMMTPINDLHTADSLNLAKGERLMRCKISSVYRLLDLYGWAQLSDTYVTLRVSKEQDHFLISPKGVSCSEVTASSLIKEVLEMRNKIREQNRQDVKSAGPQSQLLASVIAEKSRSPSTESQLMSKGDEDTKDDSEETVPNPFSQLTDQELEEYKKEVERKKLELDETGQE

SEQ ID NO: 70485 - protein, 124 aa, Homo sapiens
MALLVRVLRNQTSISQWVPVCSRLIPVSPTQGQGDRALSRTSQWPQMSQSRACGGSEQIPGIDIQLNRKYHTTRKLSTTKDSPQPVEEKVGAFTKIIEAMGFTGPLKYSKWGVRCLIHSIHGFL

SEQ ID NO: 70486 - protein, 107 aa, Homo sapiens
MAIKSIASRLRGSRRFLSGFVAGAVVGAAGAGLAALQFFRSQGAEGALTGKQPDGSAEKAVLEQFGFPLTGTEARCYTNHALSYDQAKRVPRWVLEHISKSKIMGWS

SEQ ID NO: 70487 - protein, 1537 aa, Homo sapiens
MKQRKGQGSGGSRGRKKRGLSDISPSTSLPPLVEGQLRCFLKLTVNRVIWKIAKPPTCVLVRVRWWGETSDGTLFCPRDALQTEPKAVRTTTRYAIRCGPKQFTSYLTDMAVLVLEVITKLDGLPIGRVQINGLAQLSPTHQINGFFTIVSSTSKKLGELQVSLALEPLSETYDSYHPLPTTDMTENVLLSKQGFRENTEPSSTQFQVPSRPRDIHTIKIDGKELAANSSRSTTPRGKDHVCFAENPDTIKDSSFGLQHSLNSGQSLESVTLKGRAPRKQMSLLNSSEFQPQIRTVAKSHSDSCILSSNNLPTKDLLSALLEQGNKLRNAMVISAMKSSPETSMLLDQVHPPINEDSLRASTQIRAFSRNRFKDHIEDHLLPSTENTFWRHDTKADTRAIQLLLGSAELSQGNFWDGLGSPPDSPSPGSDVYCISELNDPQYDQSLLENLFYTAPKSDTSISDFLSEEDDIVPSKKISQSTALARSSKVLESSDHKLKKRSAGKRNRNLVEQQMLSETPEDAQTMTLSVDRLALLGRTHSVRIIIETMGVPPDSPQMTPGKKSYAGPPPKVTTAKKRTFFVEYHFPVGFSESGLGKTALITEVVRLASSKITDGKVKFQQRFVFPVQFGGPMIEHWWNSNLTFQIYVKKTPQKKPEVIGSVSLSLRAVIQSELLSFSDQLPVQQENGQSPFGPLKVTMELITDNKDFTGINTKLSGNTHYTPLCAPTSPNKALPELNQDMTCTKNPQNLNQIHEETAKKAQNLVLPNRKSPSPVAPHPSTFVATPASHNLVNQTNGTTKESALLLHVLLMVPDGKDFISGESEKQSPCNVYLNCKLFSTEEVTRSVIAWGTTQPVFNFSQVIPVSLSSKYLERLKNNVMVIETWNKVRSPGQDKLLGLVKLPLHQFYMSFKDAKISRLLLDAQYPVVAVDSYMPVIDVFSGHQNGSLRVFLAMGSSNQIMALQRLKNEEGTLPPFSPRPAHFLDQPTAASVAMAEDRGNGLMEHCFEIHIEMVKGLAPLQATVWGEADCYVQYYFPVQHSQSSVLKGPEFLENGITLKPFRTATTLCVPDPIFNSEHHHSLLLPAEVPVQRLLLSAFSAQGLVPGGGVQFEIWCRYYYPNVRDQKVAKGTLPLSRICAMVTTQHREDVGIQTFNLPLTPRIENRKELRNQSSGLLDVGLRYRRSPRTAEGVLAARTVSISVQIIRACGLQAAAKALAEREPALQFSATVGVNASVTTHLSFLPQGEQRRTHPVACSFCPEFSHHVEFTCNLVTQHCSGEACFLAELLEFAEVIFAVYHENTKSASDIISIESCKEYLLGVVKVPTKELLIKRSGITGWYPIILPEDGGLPHGLELMQKIVGGLELSISFTHRGDRERVLEAAEHLGWSFENSLKDFVRMDEGEPATVTISTPRLWLPIHCVLLAGHNHIHKNTYCYLRYKFYDHEAFWTPLKKPKESVNKKQIMVTFKASKRAEVTRGPSLLWYFREERLEIQVWRAYGNDSVERPHQTDSWIGSAYVDLARLGERSARTLTVSAHS

SEQ ID NO: 70488 - protein, 83 aa, Homo sapiens
MPVERMRMRPWLEEQINSNTIPGLKWLNKRQGLTIWPTLECSGAVITHCSLDLLGSSDPPTSASRVAGTTGKEDFSDPLDACG

SEQ ID NO: 70489 - protein, 71 aa, Homo sapiens
MAGARAAAAAASAGSSASSGNQPPQELGLGELLEEFSRTQYRAKDGSGTGGSKSSYRQTWRASCQLRPSPP

SEQ ID NO: 70490 - protein, 122 aa, Homo sapiens
MGKRDRADRDKKKSRKRHYEDEEDDEEDAPGNDPQEAVPSAAGKQVDESGTKVDEYGAKDYRLQMPLKDDHTSRPLWVLSALGCKPVTSPSTSGSSARLESLMELCSLLSCVLSAMEKSSWS

SEQ ID NO: 70491 - protein, 433 aa, Homo sapiens
  MOD_RES (1)..(1): Any amino acid
XRGTFGTRWEAMKAKATELRVCCARRKREAREFKPPQMRGSTRLNISDDLKIGFFSTDHATQTDSSEILSVKELSSSTQKLAQMMKSLQVDFGFLKQLLQLKFEDRLKEESLSLFTILHDRILEIEKHYQQNEDKMRKSFNQQLADAIAVIKGMYQQFFEVEEENVSLQDASTVKTNILLRKLKEKEEVIKELKEELDQYKDFGFHKMESFAKETSSPKSNLEKENLEYKVENERLLQIISELEEEIQINLKENSGLEDELISMKEMAEKDHKTIQKLMDSRDRLREELHYEKSLVQDVINKQKEDKEMRKKYGSLSVKVARSAKGREASLSPWPKSPPSTTALRPHSATMSVSSAGAQKAKMPKKALKEDQAVVEDKHGLESQIEALKANLENEKKKVERFRKEADRLNKSWEKRFFILRNRYESKTLISAV

SEQ ID NO: 70492 - protein, 796 aa, Homo sapiens
MRALWVLGLCCVLLTFGSVRADDEVDVDGTVEEDLGKSREGSRTDDEVVQREEEAIQLDGLNASQIRELREKSEKFAFQAEVNRMMKLIINSLYKNKEIFLRELISNASDALDKIRLISLTDENALSGNEELTVKIKCDKEKNLLHVTDTGVGMTREELVKNLGTIAKSGTSEFLNKMTEAQEDGQSTSELIGQFGVGFYSAFLVADKVIVTSKHNNDTQHIWESDSNEFSVIADPRGNTLGRGTTITLVLKEEASDYLELDTIKNLVKKYSQFINFPIYVWSSKTETVEEPMEEEEAAKEEKEESDDEAAVEEEEEEKKPKTKKVEKTVWDWELMNDIKPIWQRPSKEVEEDEYKAFYKSFSKESDDPMAYIHFTAEGEVTFKSILFVPTSAPRGLFDEYGSKKSDYIKLYVRRVFITDDFHDMMPKYLNFVKGVVDSDDLPLNVSRETLQQHKLLKVIRKKLVRKTLDMIKKIADDKYNDTFWKEFGTNIKLGVIEDHSNRTRLAKLLRFQSSHHPTDITSLDQYVERMKEKQDKIYFMAGSSRKEAESSPFVERLLKKGYEVIYLTEPVDEYCIQALPEFDGKRFQNVAKEGVKFDESEKTKESREAVEKEFEPLLNWMKDKALKDKIEKAVVSQRLTESPCALVASQYGWSGNMERIMKAQAYQTGKDISTNYYASQKKTFEINPRHPLIRDMLRRIKEDEDDKTVLDLAVVLFETATLRSGYLLPDTKAYGDRIERMLRLSLNIDPDAKVEEEPEEEPEETAEDTTEDTEQDEDEEMDVGTDEEEETAKMS

SEQ ID NO: 70493 - protein, 143 aa, Homo sapiens
MRHSKRTHCPDWDSRESWGHESYRGSHKRKRRSHSSTQENRHCKPHHQFKESDCHYLEARSLNERDYRDRRYVDEYRNDYCEGYVPRHYHRDIESGYRIHCSKSSVRSRRSSPKRKRNRHCSSHQSRSMKSWTLWVKEPLAKL

SEQ ID NO: 70494 - protein, 135 aa, Homo sapiens
MLVDGPSERPALCFLLLAVAMSFFGSALSIDETRAHLLLKEKMMRLGGRLVLNTKEELANERLMTLKIAEMKEAMRTLIFPPSMHFFQAKHLIERSQVFNILRMMPKGAALHLHDIGIVTMDWLVRNVTYRPHCH

SEQ ID NO: 70495 - protein, 546 aa, Homo sapiens
MPGFLVRILPLLLVLLLLGPTRGLRNATQRMFEIDYSRDSFLKDGQPFRYISGSIHYSRVPRFYWKDRLLKMKMAGLNAIQTLPGSCGQVVGSPSAQDEASPLSEWRASYNSAGSNITDAFLSQRKCEPKGPLINSEFYTGWLDHWGQPHSTIKTEAVASSLYDILARGASVNLYMFIGGTNFAYWNGANSPYAAQPTSYDYDAPLSEAGDLTEKYFALRNIIQKFEKVPEGPIPPSTPKFAYGKVTLEKLKTVGAALDILCPSGPIKSLYPLTFIQVKQHYGFVLYRTTLPQDCSNPAPLSSPLNGVHDRAYVAVDGIPQGVLERNNVITLNITGKAGATLDLLVENMGRVNYGAYINDFKGLVSNLTLSSNILTDWTIFPLDTEDAVCSHLGGWGHRDSGHHDEAWAHNSSNYTLPAFYMGNFSIPSGIPDLPQDTFIQFPGWTKGQVWINGFNLGRYWPARGPQLTLFVPQHILMTSAPNTITVLELEWAPCSSDDPELCAVTFVDRPVIGSSVTYDHPSKPVEKRLMPPPPQKNKDSWLDHV

SEQ ID NO: 70496 - protein, 208 aa, Homo sapiens
EKTWFDMPCDATHVSVSESVSSLSTNDFSIPWETWQNEFAGIEMTYETYERLNSEFKRRNNIRHKMLSYFTTQSWKTAQQHLRTMNHQSQDSRIKKLDKFQFIIIEELENFEKDSQSLKDLEKEFVDFWEKIFQKFSAYQKSEQQRLHLLKTSLAKSVFCNTDSEETVFTSEMCLMKEDMKVLQDRLLKDMLEEELLNVRRELMSVFM

SEQ ID NO: 70497 - protein, 165 aa, Homo sapiens
MLLLLLSIIVLHVAVLVLLFVSTIVSQWIVGNGHATDLWQNCSTSSSGNVHHCFSSSPNEWLQSVQATMILSIIFSILSLFLFFCQLFTLTKGGRFYITGIFQILAGSVSFCLKMTYAPRLRPLPGSPGHCQRAEHLPVPQGLTYPCHRDLVIHLHLLVAEKVCA

SEQ ID NO: 70498 - protein, 129 aa, Homo sapiens
MSNYVNDMWPGSPQEKDSPSTSRSGGSSRLSSRSRSRSFSRSSRSHSRVSSRFSSRSRRSKSRSRSRRRHQRKYRRYSRSYSRSRSRSRSRRYRERRYGFTRRYYRSPSRYRSRSRSRSRSRGRSYCGR

SEQ ID NO: 70499 - protein, 455 aa, Homo sapiens
  MOD_RES (1)..(1): Any amino acid
XILSQSEAKNPRINQLSARWQQVWLLALERQRKLNDALDRLEELKEFANFDFDVWRKKYMRWMNHKKSRVMDFFRRIDKDQDGKITRQEFIDGILASKFPTTKLEMTAVADIFDRDGDGYIDYYEFVAALHPNKDAYRPTTDADKIEDEVTRQVAQCKCAKRFQVEQIGENKYRFFLGNQFGDSQQLRLVRILRSTVMVRVGGGWMALDEFLVKNDPCRARGRTNIELREKFILPEGASQGMTPFRSRGRRSKPSSRAASPTRSSSSASQSNHSCTSMPSSPATPASGTKTSLQFSRCYDKPWLVNSKAGTPIRDSHSPDLQLPTPEVIPSSGSKLKRPTPTFHSSRTSLAGDTSNSSSPASTGAKTNRADPKKSASRPGSRAGSRAGSRASSRRGSDASDFDLLETQSACSDTSESSAAGGQGNSRRGLNKPSKIPTMSKKTTTASPRTPGPKR

SEQ ID NO: 70500 - protein, 554 aa, Homo sapiens
MAARPAATLAWSLLLLSSALLREGCRARFVAERDSEDDGEEPVVFPESPLQSPTVLVAVLARNAAHTLPHFLGCLERLDYPKSRMAIWAATDHNVDNTTEIFREWLKNVQRLYHYVEWRPMDEPESYPDEIGPKHWPTSRFAHVMKLRQAALRTAREKWSDYILFIDVDNFLTNPQTLNLLIAENKTIVAPMLESRGLYSNFWCGITPKGFYKRTPDYVQIREWKRTGCFPVPMVHSTFLIDLRKEASDKLTFYPPHQDYTWTFDDIIVFAFSSRQAGIQMYLCNREHYGYLPIPLKPHQTLQEDIENLIHVQIEAMIDRPPMEPSQYVSVVPKYPDKMGFDEIFMINLKRRKDRRDRMLRTLYEQEIEVKIVEAVDGKALNTSQLKALNIEMLPGYRDPYSSRPLTRGEIGCFLSHYSVWKEVIDRELEKTLVIEDDVRFEHQFKKKLMKLMDNIDQAQLDWELIYIGRKRMQVKEPEKAVPNVANLVEADYSYWTLGYVISLEGAQKLVGANPFGKMLPVDEFLPVMYNKHPVLLSSPHCHLFQTLSDDCQR

SEQ ID NO: 70501 - protein, 239 aa, Homo sapiens
MSYYLSSENHLDPGPIYMRENGQLHMVNLALDGVRSSLQKPRPFRLFPKGFSVELCMNREDDTARKEKTDHFIFTYTREGNLRYSAKSLFSLVLGFISDNVDHIDSLIGFPEQIAEKLFSAAEARQKFTEPGAGLRALQKFTEAYGSLVLCSLCLRNRYLVISEKLEEIKSFRELTCLDLSCCKLGDEHELLEHLTNEALSSVTQLHLKDNCLSDAGVRKMTAPVRVMKRGLENLTLLD

SEQ ID NO: 70502 - protein, 1299 aa, Homo sapiens
MAAAGARLSPGPGSGLRGRPRLCFHPGPPPLLPLLLLFLLLLPPPPLLAGATAAASREPDSPCRLKTVTVSTLPALRESDIGWSGARAGAGAGTGAGAAAAAASPGSPGSAGTAAESRLLLFVRNELPGRIAVQDDLDNTELPFFTLEMSGTAADISLVHWRQQWLENGTLYFHVSMSSSGQLAQATAPTLQEPSEIVEEQMHILHISVMGGLIALLLLLLVFTVALYAQRRWQKRRRIPQKSASTEATHEIHYIPSVLLGPQARESFRSSRLQTHNSVIGVPIRETPILDDYDCEEDEEPPRRANHVSREDEFGSQVTHTLDSLGHPGEEKVDFEKKGGISFGRAKGTSGSEADDETQLTFYTEQYRSRRRSKGLLKSPVNKTALTLIAVSSCILAMVCGSQMSCPLTVKVTLHVPEHFIADGSSFVVSEGSYLDISDWLNPAKLSLYYQINATSPWVRDLCGQRTTDACEQLCDPETGECSCHEGYAPDPVHRHLCVRSDWGQSEGPWPYTTLERGYDLVTGEQAPEKILRSTFSLGQGLWLPVSKSFVVPPVELSINPLASCKTDVLVTEDPADVREEAMLSTYFETINDLLSSFGPVRDCSRNNGGCTRNFKCVSDRQVDSSGCVCPEELKPMKDGSGCYDHSKGIDCSDGFNGGCEQLCLQQTLPLPYDATSSTIFMFCGCVEEYKLAPDGKSCLMLSDVCEGPKCLKPDSKFNDTLFGEMLHGYNNRTQHVNQGQVFQMTFRENNFIKDFPQLADGLLVIPLPVEEQCRGVLSEPLPDLQLLTGDIRYDEAMGYPMVQQWRVRSNLYRVKLSTITLAAGFTNVLKILTKESSREELLSFIQHYGSHYIAEALYGSELTCIIHFPSKKVQQQLWLQYQKETTELGSKKELKSMPFITYLSGLLTAQMLSDDQLISGVEIRCEEKGRCPSTCHLCRRPGKEQLSPTPVLLEINRVVPLYTLIQDNGTKEAFKSALMSSYWCSGKGDVIDDWCRCDLSAFDANGLPNCSPLLQPVLRLSPTVEPSSTVVSLEWVDVQPAIGTKVSDYILQHKKVDEYTDTDLYTGEFLSFADDLLSGLGTSCVAAGRSHGEVPEVSIYSVIFKCLEPDGLYKFTLYAVDTRGRHSELSTVTLRTACPLVDDNKAEEIADKIYNLYNGYTSGKEQQMAYNTLMEVSASMLFRVQHHYNSHYEKFGDFVWRSEDELGPRKAHLILRRLERVSSHCSSLLRSAYIQSRVETVPYLFCRSEEVRPAGMVWYSILKDTKITCEEKMVSMARNTYGESKGRYYLTLSKVSPF

SEQ ID NO: 70503 - protein, 133 aa, Homo sapiens
MAPFTHDFRKAQQRMPAIPVNIHSMNFTWQAAGQAEYFYEFLSLRSLDKGIMADPTVNVPLLGTVPHKASVVQVGFPCLGKQDGVAAFEVDVIVMNSEGNTILQTPQNAIFFKTCQQAECPGGCRNGGFCNER

SEQ ID NO: 70504 - protein, 41 aa, Homo sapiens
ILKCTLLVFGVWILYILKLNYTTEECDMKKMHYVDPDHVKS

SEQ ID NO: 70505 - protein, 310 aa, Homo sapiens
MLRLPTVFRQMRPVSRVLAPHLTRAYAKDVKFGADARALMLQGVDLLADAVAVTMGPKGRTVIIEQSWGSPKVTKDGVTVAKSIDLKDKYKNIGAKLVQDVANNTNEEAGDGTTTATVLARSIAKEGFEKISKGANPVEIRRGVMLAVDAVIAELKKQSKPVTTPEEIAQVATISANGDKEIGNIISDAMKKVGRKGVITVKDGKTLNDELEIIEGMKFDRGYISPYFINTSKGQKCEFQDAYVLLSEKKISSIQSIVPALEIANAHRKPLVIIAEDVDGEALSTLVLNRPAVLKFERCFCFTICSQMDI

SEQ ID NO: 70506 - protein, 277 aa, Homo sapiens
MESGQPARRIAMAPLLEYERQLVLELLDTDGLVVCARGLGADRLLYHFLQLHCHPACLVLVLNTQPAEEEYFINQLKIEGVEHLPRRVTNEITSNSRYEVYTQGGVIFATSRILVVDFLTDRIPSDLITGILVYRAHRIIESCQEAFILRLFRQKNKRGFIKAFTDNAVAFDTGFCHVERVMRNLFVRKLYLWPRFHVAVNSFLEQHKPEVVEIHVSMTPTMLAIQTAILDILNACLKELKCHNPSLEVEDLSLENAIGKPFDKVEEFYIRMLHNCT

SEQ ID NO: 70507 - protein, 173 aa, Homo sapiens
MLLFLKDVGIEDNQLGAFLTKNHAIFSEDLENLKTRVAYLHSKNFSKADVAQMVRKAPFLLNFSVERLDNRLGFFQKELELSVKKTRDLVVRLPRLLTGSLEPVKENMKVFNTRLFKVKERHLFLTYLGRAQYDPAKPNYISLDKLVSIPDEIFCEEIAKASVQDFEKFLKTL

SEQ ID NO: 70508 - protein, 70 aa, Homo sapiens
  MOD_RES (1)..(1): Any amino acid
XRNTARRRLRSESSYDIDNIVIPMSLVAPAKLEKLQYKEILTPSWRMVVLQPLDEYNLGKEEIFGFWNCR

SEQ ID NO: 70509 - protein, 88 aa, Homo sapiens
  MOD_RES (1)..(1): Any amino acid
XSLNQPFGSGLITPSGILLNSQMLDFSWPNRTANHSAPSLENSVQPGKRPLSFLLPTVVRPAEGLCGTYLALGANGAARGLSGLTQGC

SEQ ID NO: 70510 - protein, 934 aa, Homo sapiens
MVPWVRTMGQKLKQRLRLDVGREICRQYPLFCFLLLCLSAASLLLNRYIHILMIFWSFVAGVVTFYCSLGPDSLLPNIFFTIKYKPKLGLQELFPQGHSCAVCGKVKCKRHRPSLLLENYQPWLDLKISSKVDASLSEVLELVLENFVYPWYRDVTDDESFVDELRITLRFFASVLIRRIHKVDIPSIITKKLLKAAMKHIEVIVKARQKVKNTEFLQQAALEEYGPELHVALRSRRDELHYLRKLTELLFPYILPPKATDCRSLTLLIREILSGSVFLPSLDFLADPDTVNHLLIIFIDDSPPEKATEPASPLVPFLQKFAEPRNKKPSVLKLELKQIREQQDLLFRFMNFLKQEGAVHVLQFCLTVEEFNDRILRPELSNDEMLSLHEELQKIYKTYCLDESIDKIRFDPFIVEEIQRIAEGPYIDVVKLQTMRCLFEAYEHVLSLLENVFTPMFCHSDEYFRQLLRGAESPTRNSKLNRGSLSLDDFRNTQKRGESFGISRIGSKIKGVFKSTTMEGAMLPNYGVAEGEDDFIEEGIVVMEDDSPVEAVSTPNTPRNLAAWKISIPYVDFFEDPSSERKEKKERIPVFCIDVERNDRRAVGHEPEHWSVYRRYLEFYVLESKLTEFHGAFPDAQLPSKRIIGPKNYEFLKSKREEFQEYLQKLLQHPELSNSQLLADFLSPNGGETQFLDKILPDVNLGKIIKSVPGKLMKEKGQHLEPFIMNFINSCESPKPKPSRPELTILSPTSENNKKLFNDLFKNNANRAENTERKQNQNYFMEVMTVEGVYDYLMYVGRVVFQVPDWLHHLLMGTRILFKNTLEMYTDYYLQCKLEQLFQEHRLVSLITLLRDAIFCENTEPRSLQDKQKGAKQTFEEMMNYIPDLLVKCIGEETKYESIRLLFDGLQQPVLNKQELFPELNKVQKEVTSVTSWM

SEQ ID NO: 70511 - protein, 220 aa, Homo sapiens
  MOD_RES (1)..(1): Any amino acid
XLDDCLQQYIKNFEREKISGDQLLRITHQELEDLGVSRIGHQELILEAVDLLCALNYGLETENLKTLSHKLNASAKNLQNFITGRRRSGHYDGRTSRKLPNDFLTSVVDLIGAAKSLLAWLDRSPFAAVTDYSVTRNNVIQLCLELTTIVQQISNQPFSKKAWKCGFKTIKSGKCIITRIVLYMKQRIKFFTCVKLFLESVTTSYPCRQILWFHSLLTWK

SEQ ID NO: 70512 - protein, 299 aa, Homo sapiens
MKKLWVKKRFQKTGHSRRAFGRLTHVFRSCRKQSYDSETAEDDISDVQGTQRLELRDDGAFSTPTGGSDTLVGTSLDTPPTSVTGTSEEQVSWWGSGQTVLEQEAGSGGGTRRLPGSPSSVPQSGLRREEPDLQPQLASEAPRRPAQPPPSKSALLPPPSPRVGKRSPPGPPAQPAATPTSPHRRTQEPVLPEDTTTEEKRGKKSKSSGPSLAGTAESRPQTPLSEASGRLSALGRSPRLVRAGSRILDKLQFFEERRRSLERSDSPPAPLRPWVPLRKARSLEQPKSERGAPWGTPGA

SEQ ID NO: 70513 - protein, 122 aa, Homo sapiens
MGIILVYDITDEKSFENIQNWMKSIKENASAGVERLLLGNKCDMEAKRKVQKEQADKLAREHGIRFFETSAKSSMNVDEAFSSLARDILLKSGGRRSGNGNKPPSTDLKTCDKKNTNKCSLG

SEQ ID NO: 70514 - protein, 93 aa, Homo sapiens
MWASPAPTLIDSGDSVVAKYINRFRQAQPTSREERQPAGPTPADFWWLQSDSPDPSSQSAAGANKPEGRPHTAVPTAVNVTSASHAVAPLQEI

SEQ ID NO: 70515 - protein, 705 aa, Homo sapiens
MSVLTSPRGKVEVVHCRRTESQDVYCIKSLIRKFTCKLFGKLNIIYLLEKANLAVTLCNDKEEIMAQATFLDYPNWNVAKQDDWVSVFRELDSDIPCTPLNTLFMHLFVAVDEYSVGCCKEILRTVYKAVPELHFIFLIVPSYMSLGSTLITVFDQVGNIPCLTYEEDFAVHICHRHSHYPQLHVRKARVEDHDDLMPIFMRYDTILKETYGEYFLAELIEAQDEENHAVVCEVEGTAVGFMSVCSRVNMQLLHECFDLGPFHGLCFPHPDDVLESPQDLSVRRSQDAELRSSSQGSQKIVEELQEPVSPDTMENIQGNIAREAASEEALTAVQSGNVSEPEDIEKLSDISTGYAQYHHVSSRSLASLVLPEEPVHFRPIYRGASAAFCIQLFCIDEKYEARSLDFMNFVFSLFSDKNFCVISLPHLTPEFFLIQNFVKMVPFNTCTLEQDLYVFHRAGLLKSINIRFATLLDTPGVENLVSTLMLNKSILEDLDRYNKARKDPDIEYIRSHYNIEDFIYFSHHQREEHGHMHHFALNPIFRHYTKFFLKEILRLGFKSCLYYRVYPKSREGKMSYALNHTNRKLTLEPKITVNAKIIVVGASSVGISFLETLVFCSHMKFNNLTLISTHGLPGKKLLDTEQRKFLASDHCFNDKDYALMSLCSWVNVVVGRMTGIDRAAKHVVLSTDEIVPYDHLILCTGQQYQ

SEQ ID NO: 70516 - protein, 613 aa, Homo sapiens
MIQSDKGADPPDKKDMKLSTATNPQNGLSQILRLVLQELSLFYGRDVNGVCLLYDLLHSPWLQALLKIYDCLQEFKEKKLVPATPHAQVLSYEVVELLRETPTSPEIQELRQMLQAPHFKALLSAHDTIAQKDFEPLLPPLPDNIPESEEAMRIVCLVKNQQPLGATIKRHEMTGDILVARIIHGGLAERSGLLYAGDKLVEVNGVSVEGLDPEQVIHILAMSRGTIMFKVVPVSDPPVNSQQMVYVRAMTEYWPQEDPDIPCMDAGLPFQKGDILQIVDQNDALWWQARKISDPATCAGLVPSNHLLKRKQREFWWSQPYQPHTCLKSTLYEETFESDKEEFVGYGQKFFIAGFRRSMRLCRRKSHLSPLHASVCCTGSCYSAVGAPYEEVVRYQRRPSDKYRLIVLMGPSGVGVNELRRQLIEFNPSHFQSAVPHTTRTKKSYEMNGREYHYVSKETFENLIYSHRMLEYGEYKGHLYGTSVDAVQTVLVEGKICVMDLEPQDIQGVRTHELKPYVIFIKPSNMRCMKQSRKNAKVITDYYVDMKFKDEDLQEMENLAQRMETQFGQFFDHVIVNDSLHDACAQLLSAIQKAQEEPQWVPATWISSDTESQ

SEQ ID NO: 70517 - protein, 190 aa, Homo sapiens
MKHINLSFAACGFLGIYHLGAASALCRHGKKLVKDVKAFAGASAGSLVASVLLTAPEKIEECNQFTYKFAEEIRRQSFGAVTPGYDFMARLRSGMESILPPSAHELAQNRLHVSITNAKTRENHLVSTFSSREDLIKVLLASSFVPIYAGLKLVEYKGQKWVDGGLTNALPILPVGRTVTISPFSGRLDI

SEQ ID NO: 70518 - protein, 55 aa, Homo sapiens
MVWLEARPQILFVCTKQGHQKPLDSKDDNTEKHCPVTVNPWHMKKAFKVMNELRR

SEQ ID NO: 70519 - protein, 545 aa, Homo sapiens
MAKERGLISPSDFAQLQKYMEYSTKKGGRPEDKLEFTFKLYDTDRNGILDSSEVDKIILQMMRVAEYLDWDVSELRPILQEMMKEIDYDGSGSVSQAEWVRAGATTVPLLVLLGLEMTLKDDGQHMWRPKRFPRPVYCNLCESSIGLGKQGLSCNLCKYTVHDQCAMKALPCEVSTYAKSRKDIGVQSHVWVRGGCESGRCDRCQKKIRIYHSLTGLHCVWCHLEIHDDCLQAVGHECDCGLLRDHILPPSSIYPSVLASGPDRKNSKTSQKTMDDLNLSTSEALRIDPVPNTHPLLVFVNPKSGGKQGQRVLWKFQYILNPRQVFNLLKDGPEIGLRLFKDVPDSRILVCGGDGTVGWILETIDKANLPVLPPVAVLPLGTGNDLARCLRWGGGYEGQNLAKILKDLEMSKVVHMDRWSVEVIPQQTEEKSDPVPFQIINNYFSIGVDASIAHRFHIMREKYPEKFNSRMKNKLWYFEFATSESIFSTCKKLEESLTVEICGKPLDLSNLSLEGIAVLNIPSMHGGSNLWGDTRRPHGDIYGIN

SEQ ID NO: 70520 - protein, 49 aa, Homo sapiens
MVAGMLGLREEKSEDQDLQGLKDKPLKFKKVKKDKKEEKEGKHEPVQPS

SEQ ID NO: 70521 - protein, 62 aa, Homo sapiens
MAAEIQPKPLTRKPILLQRMEGSQEVVNMAVIVPKEEGVISVSEDRSNGKHCKHTPVASILQ

SEQ ID NO: 70522 - protein, 193 aa, Homo sapiens
  MOD_RES (1)..(1): Any amino acid
XSSQLPVGGLGTGSLTGIGTGALGLPAVNNDPFVQRKLGTSGLNQPTFQQSKMKPSDLSQVWPEANQHFSKEIDDEANSYFQRIYNHPPHPTMSVDEYPDKELHITACLFGGIIEKGLVTYMALGLALRYVLEALRKPFGSKMYYFGIAALDRFKNRLKDYPQYCQHLASISHFMQFPHHLQEYIEYGQQSRD

SEQ ID NO: 70523 - protein, 102 aa, Homo sapiens
MPPDDVTSLLHLGGGDDSDGADMIAIGLQEVNSMLNKRLKDALFTDQWSELFMDALGPFNFVLVSSVRMQGVILLLFAKYYHLPFLRDVQTDCTRTGLGGYW

SEQ ID NO: 70524 - protein, 547 aa, Homo sapiens
  MOD_RES (1)..(1): Any amino acid
XQPVQIQSLETLGVLARAVGEPMRPLAEECCQLGLGLCDQVDDPDLRRCTYSLFAALSGLMGEGLAPHLEQITTLMLLSLRSTEGIVPQYDGSSSFLLFDDESDGEEEEELMDEDVEEEDDSEISGYSVENAFFDEKEDTCAAVGEISVNTSVAFLPYMESVFEEVFKLLECPHLNVRKAAHEALGQFCCALHKACQSCPSEPNTAALQAALARVVPSYMQAVNRERERQVVMAVLEALTGVLRSCGTLTLKPPGRLAELCGVLKAVLQRKTACQDTDEEEEEEDDDQAEYDAMLLEHAGEAIPALAAAAGGDSFAPFFAGFLPLLVCKTKQGCTVAEKSFAVGTLAETIQGLGAASAQFVSRLLPVLLSTAQEADPEVRSNAIFGMGVLAEHGGHPAQEHFPKLLGLLFPLLARERHDRVRDNICGALARLLMASPTRKPEPQVLAALLHALPLKEDLEEWVTIGRLFSFLYQSSPDQVIDVAPELLRICSLILADNKIPPGEDTKAALLLLLTFLAKQHTDSFQAALGSLPVDKAQELQAVLGLS

SEQ ID NO: 70525 - protein, 1969 aa, Homo sapiens
MAAEEGVASAASAGGSWGTAAMGRVLPMLLVPVPAEAMGQLGSRAQLRTQPEALGSLTAAGSLQVLSLTPGSRGGGRCCLEGPFWHFLWEDSRNSSTPTEKPKLLALGENYELLIYEFNLKDGRCDATILYSCSREALQKLIDDQDISISLLSLRILSFHNNTSLLFINKCVILHIIFPERDAAIRVLNCFTLPLPAQAVDMIIDTQLCRGILFVLSSLGWIYIFDVVDGTYVAHVDLALHKEDMCNEQQQEPAKISSFTSLKVSQDLDVAVIVSSSNSAVALNLNLYFRQHPGHLLCERILEDLPIQGPKGVDEDDPVNSAYNMKLAKFSFQIDRSWKAQLSSLNETIKNSKLEVSCCAPWFQDILHLESPESGNHSTSVQSWAFIPQDIMHGQYNVLQKDHAKTSDPGRSWKIMHISEQEEPIELKCVSVTGFTALFTWEVERMGYTITLWDLETQGMQCFSLGTKCIPVDSSGDQQLCFVLTENGLSLILFGLTQEEFLNRLMIHGSASTVDTLCHLNGWGRCSIPIHALEAGIENRQLDTVNFFLKSKENLFNPSSKSSVSDQFDHLSSHLYLRNVEELIPALDLLCSAIRESYSEPQSKHFSEQLLNLTLSFLNNQIKELFIHTEELDEHLQKGVNILTSYINELRTFMIKFPWKLTDAIDEYDVHENVPKVKESNIWKKLSFEEVIASAILNNKIPEAQTFFRIDSHSAQKLEELIGIGLNLVFDNLKKNNIKEASELLKNMGFDVKGQLLKICFYTTNKNIRDFLVEILKEKNYFSEKEKRTIDFVHQVEKLYLGHFQENMQIQSFPRYWIKEQDFFKHKSVLDSFLKYDCKDEFNKQDHRIVLNWALWWDQLTQESILLPRISPEEYKSYSPEALWRYLTARHDWLNIILWIGEFQTQHSYASLQQNKWPLLTVDVINQNTSCNNYMRNEILDKLARNGVFLASELEDFECFLLRLSRIGGVIQDTLPVQNYKTKEGWDFHSQFILYCLEHSLQHLLYVYLDCYKLSPENCPFLEKKELHEAHPWFEFLVQCRQVASNLTDPKLIFQASLANAQILIPTNQASVSSMLLEGHTLLALATTMYSPGGVSQVVQNEENENCLKKVDPQLLKMALTPYPKLKTALFPQCTPPSVLPSDITIYHLIQSLSPFDPSRLFGWQSANTLAIGDAWSHLPHFSSPDLVNKYAIVERLNFAYYLHNGRPSFAFGTFLVQELIKSKTPKQLIQQVGNEAYVIGLSSFHIPSIGAACVCFLELLGLDSLKLRVDMKVANIILSYKCRNEDAQYSFIRESVAEKLSKLADGEKTTTEELLVLLEEGTWNSIQQQEIKRLSSESSSQWALVVQFCRLHNMKLSISYLRECAKANDWLQFIIHSQLHNYHPAEVKSLIQYFSPVIQDHLRLAFENLPSVPTSKMDSDQVCNKCPQELQGSKQEMTDLFEILLQCSEEPDSWHWLLVEAVKQQAPILSVLASCLQGASAISCLCVWIITSVEDNVATEAMGHIQDSTEDHTWNLEDLSVIWRTLLTRQKSKTLIRGFQLFFKDSPLLLVMEMYELCMFFRNYKEAEAKLLEFQKSLETLNTAATKVHPVIPAMWLEDQVCFLLKLMLQQCKTQYELGKLLQLFVEREHLFSDGPDVKKLCILCQILKDTSIAINHTIITSYSIENLQHECRSILERLQTDGQFALARRVAELAELPVDNLVIKEITQEMQTLKHIEQWSLKQARIDFWKKCHENFKKNSISSKAASSFFSTQAHVACEHPTGWSSMEERHLLLTLAGHWLAQEDVVPLDKLEELEKQIWLCRITQHTLGRNQEETEPRFSRQISTSGELSFDSLASEFSFSKLAALNTSKYLELNSLPSKETCENRLDWKEQESLNFLIGRLLDDGCVHEASRVCRYFHFYNPDVALVLHCRALASGEASMEDLHPEIHALLQSAELLEEEAPDIPLRRVHSRVGLFLHRCCCSGW

SEQ ID NO: 70526 - protein, 69 aa, Homo sapiens
  MOD_RES (1)..(1): Any amino acid
XPSTQTLSLWAPTGVLLPSLVELEYPFQAGRGASLQQELTEPTLALSAESHRPPELQDSVEGLSERPSR

SEQ ID NO: 70527 - protein, 153 aa, Homo sapiens
MLGAALRRCAVAATTRADPRGLLHSARTPGPAVAIQSVRCYSHGSQETDEEFDARWVTYFNKPDIDAWELRKGINTLVTYDMVPEPKIIDAALRACRRLNDFASTVRILEVVKMGFPKDLLTLLLECEQLPGNTDDNILPYLNKFSFIEYQAM

SEQ ID NO: 70528 - protein, 81 aa, Homo sapiens
MSVMLAKPRLDTEQLAQRGAGLCFTFVSAQQNSPSSTGSGNTEHSCSSQKQISIQHRQTQSDLTIEKISALENSKNSDLEK

SEQ ID NO: 70529 - protein, 156 aa, Homo sapiens
  MOD_RES (1)..(1): Any amino acid
XTLFKIGYDYKLEQIKKGYDAPLCNLLLFKKVKALLGGNVRMMLSGGAPLSPQTHRFMNVCFCCPIGQGYGLTESCGAGTVTEVTDYTTGRVGAPLICCEIKLKDWQEGGYTINDKPNPRGEIVIGGQNISMGYFKNEEKTAEDYSVDENGQRNLG

SEQ ID NO: 70530 - protein, 283 aa, Homo sapiens
MALLCLDGVFLSSAENDFVHRIQEELDRFLLQKQLSKVLLFPPLSSRLRYLIHRTAENFDLLSSFSVGEGWKRRTVICHQDIRVPSSDGLSGPCRAPASCPSRYHGPRPISNQGAAAVPRGARAGRWYRGRKPDQPLYVPRVLRRQEEWGLTSTSVLKREAPAGRDPEEPGDVGAGDPNSDQGLPVLMTQGTEDLKGPGQRCENEPLLDPVGPEPLGPESQSGKGDMVEMATRFGSTLQLDLEKGKESLLEKRLVAEEEEDEEEVEEDGPSSCSEDDYSELLQ

SEQ ID NO: 70531 - protein, 314 aa, Homo sapiens
MDVRALPWLPWLLWLLCRGGGDADSRAPFTPTWPRSREREAAAFRESLNRHRYLNSLFPSENSTAFYGINQFSYLFPEEFKAIYLRSKPSKFPRYSAEVHMSIPNVSLPLRFDWRDKQVVTQVRNQQMCGGCWAFSVVGAVESAYAIKGKPLEDLSVQQVIDCSYNNYGCNGGSTLNALNWLNKMQVKLVKDSEYPFKAQNGLCHYFSGSHSGFSIKGYSAYDFSDQEDEMAKALLTFGPLVVIVDAVSWQDYLGGIIQHHCSSGEANHAVLITGFDKTGSTPYWIVRNSWGSSWGVDGYAHVKMGSNVCGVLK

SEQ ID NO: 70532 - protein, 19 aa, Homo sapiens
MEEGNNNEEVIHLNNFHCH

SEQ ID NO: 70533 - protein, 72 aa, Homo sapiens
MVRWFHRDLSGLDAETLLKGRGVHGSFLARPSRKNQGDFSLSVRTSADPCPPASTPAPTGLTAWCPAGWGIR

SEQ ID NO: 70534 - protein, 468 aa, Homo sapiens
MAALTIATGTGNWFSALALGVTLLKCLLIPTYHSTDFEVHRNWLAITHSLPISQWYYEATSEWTLDYPPFFAWFEYILSHVAKYFDQEMLNVHNLNYSSSRTLLFQRFSVIFMDVLFVYAVRECCKCIDGKKVGKELTEKPKFILSVLLLWNFGLLIVDHIHFQYNGFLFGLMLLSIARLFQKRHMEGAFLFAVLLHFKHIYLYVAPAYGVYLLRSYCFTANKPDGSIRWKSFSFVRVISLGLVVFLVSALSLGPFLALNQLPQVFSRLFPFKRGLCHAYWAPNFWALYNALDKVLSVIGPRGFLRCLTLCALSSFMFGWHVHEKAILLAILPMSLLSVGKAGDASIFLILTTTGHYSLFPLLFTAPELPIKILLMLLFTIYSISSLKTLFRKEKPLFNWMETFYLLGLGPLEVCCEFVFPFTSWKVKYPFIPLLLTSVYCAVGITYAWFKLYVSVLIDSAIGKTKKQ

SEQ ID NO: 70535 - protein, 123 aa, Homo sapiens
MDTQNVSKALAVGTYLTVREDSHKDSVMVAWKHGAPDVTAGSTQSLGHPVLVEVNAGQDVGAKTAPGTKTLYLPGVGGGEGAGTGSNVAGPQAVPPGTPSGLHHPVSLALACQPNPRPDPGPL

SEQ ID NO: 70536 - protein, 673 aa, Homo sapiens
MNPTETKAVKTEPEKKSQSTKLSVVHEKKSQEGKPKEHTEPKSLPKQASDTGSNDAHNKKAVSRSAEQQPSEKSTEPKTKPQDMISAGGESVAGITAISGKPGDKKKEKKSLTPAVPVESKPDKPSGKSGMDAALDDLIDTLGGPEETEEENTTYTGPEVSDPMSSTYIEELGKREVTIPPKYRELLAKPIGPDDAIDALSSDFTCGSPTAAGKKTEKEESTEVLKAQSAGTVRSAAPPQEKKRKVEKDTMSDQALEALSASLGTRQAEPELDLRSIKEVDEAKAKEEKLEKCGEDDETIPSEYRLKPATDKDGKPLLPEPEEKPKPRSESELIDELSEDFDRSECKEKPSKPTEKTEESKAAAPAPVSEAVCRTSMCSIQSAPPEPATLKGTVPDDAVEALADSLGKKEADPEDGKPVMDKVKEKAKEEDREKLGEKEETIPPDYRLEEVKDKDGKPLLPKESKEQLPPMSEDFLLDALSEDFSGPQNASSLKFEDAKLAAAISEVVSQTPASTTQAGAPPRDTSQSDKDLDDALDKLSDSLGQRQPDPDENKPMEDKVKEKAKAEHRDKLGERDDTIPPEYRHLLDDNGQDKPVKPPTKKSEDSKKPADDQDPIDALSGDLDSCPSTTETSQNTAKDKCKKAASSSKAPKNGGKAKDSAKTTEETSKPKDD

SEQ ID NO: 70537 - protein, 85 aa, Homo sapiens
GVGSSGMGAYHGKHSFDTFSHQRPCLLKSLKREGANKLRYPPNSQSKVDWGKFFLLKRFNKEKLGLLLLTFLGIVAAVLVKAEYY

SEQ ID NO: 70538 - protein, 191 aa, Homo sapiens
MDPMELRNVNIEPDDESSSGESAPDSYIGIGNSEKAAMSSQFANEDTESQKFLTNGFLGKKKLADYADEHHPGTTSFGMSSFNLSNAIMGSGILGLSYAMANTGIILFIIMLLAVAILSLYSVHLLLKTAKEGGSLIYEKLGEKAFGWPGKIGAFVSITMQNIGAMSSYLFIIKYELPEVIRAFMGLEENT

SEQ ID NO: 70539 - protein, 403 aa, Homo sapiens
MSFLVSKPERIRRWVSEKFIVEGLRDLELFGEQPPGDTRRKTNDASSESIASFSKQEVMSSFLPEGGCYELLTVIGKGFEDLMTVNLARYKPTGEYVTVRRINLEACSNEMVTFLQGELHVSKLFNHPNIVPYRATFIADNELWVVTSFMAYGSAKDLICTHFMDGMNELAIAYILQGVLKALDYIHHMGYVHRSVKASHILISVDGKVYLSGLRSNLSMISHGQRQRVVHDFPKYSVKVLPWLSPEVLQQNLQGYDAKSDIYSVGITACELANGHVPFKDMPATQMLLEKLNGTVPCLLDTSTIPAEELTMSPSRSVANSGLSDSLTTSTPRPSNGDSPSHPYHRTFSPHFHHFVEQCLQRNPDARSSDVPQRLCPNCFVLSPPSPILRAASLRTTVESLAW

SEQ ID NO: 70540 - protein, 294 aa, Homo sapiens
MYIKMATLANGQADNASLSTNGLGSSPGSAGHMNGLSHSPGNPSTIPMKDHDAIKLFIGQIPRNLDEKDLKPLFEEFGKIYELTVLKDRFTGMHKGCAFLTYCERESALKAQSALHEQKTLPGMNRPIQVKPADSESRGEDRKLFVGMLNKQQSEDDVRRLFEAFGNIEECTILRGPDGNSKGCAFVKYSSHAEAQAAINALHGSQTMPGASSSLVVKFADTDKERTMRRMQQMAGQMGMFNPMAIPFGAYGAYAQALMQQQAALMASVAQGGYLNPMAAFAAAQMQQMAALNM

SEQ ID NO: 70541 - protein, 233 aa, Homo sapiens
MAEKGDCIASVYGYDLGGRFVDFQPLGFGVNGLVLSAVDSRACRKVAVKKIALSDARSMKHALREIKIIRRLDHDNIVKVYEVLGPKGTDLQGELFKFSVAYIVQEYMETDLARLLEQGTLAEEHAKLFMYQLLRGLKYIHSANVLHRDLKPANIFISTEDLVLKIGDFGLARIVDQHYSHKGYLSEGLVTKWYRSPRLLLSPNNYTKAIDMWAAGCILAEMLTGRMLFAGTL

SEQ ID NO: 70542 - protein, 110 aa, Homo sapiens
  MOD_RES (1)..(1): Any amino acid
XHRFAAFGESSSSGTEMNNKNFSKLCKDCGIMDGKTVTSTDVDIVFSKVKAKNARTITFQQFKEAVKELGQKRFKGKSPDEVLENIYGLMEGKDPATTGATFPWLPMQET

SEQ ID NO: 70543 - protein, 273 aa, Homo sapiens
MGHALCVCSRGTVIIDNKRYLFIQKLGEGGFSYVDLVEGLHDGHFYALKRILCHEQQDREEAQREADMHRLFNHPNILRLVAYCLRERGAKHEAWLLLPFFKRGTLWNEIERLKDKGNFLTEDQILWLLLGICRGLEAIHAKGYAHRDLKPTNILLGDEGQPVLMDLGSMNQACIHVEGSRQALTLQSLGCVLYAMMFGEGPYDMVFQKGDSVALAVQNQLSIPQSPRHSSALRQLLNSMMTVDPHQRPHIPLLLSQLEALQPPAPGQHTTQI

SEQ ID NO: 70544 - protein, 186 aa, Homo sapiens
  MOD_RES (1)..(1): Any amino acid
XNWYEGRITGTGRQGIFPASYVQVSREPRLRLCDDGPQLPTSPRLTAAARSARHPSSPSALRSPADPIDLGGQTSPRRTGFSFPTQEPRPQTQNLGTPGPALSHSRGPSHPLDLGTSSPNTSQIHWTPYRAMYQYRPQNEDELELREGDRVDVMQQCDDGWFVGVSRRTQKFGTFPGNYVAPVGLL

SEQ ID NO: 70545 - protein, 483 aa, Homo sapiens
  MOD_RES (1)..(1): Any amino acid
XELMEPLLEPGQELGETALHLAVRTADQTSLHLVDFLVQNCGNLDKQTALGNTVLHYCSMYSKPECLKLLLRSKPTVDIVNQAGETALDIAKRLKATQCEDLLSQAKSGKFNPHVHVEYEWNLRQEEIDESDDDLDDKPSPIKKERSPRPQSFCHSSSISPQDKLALPGFSTPRDKQRLSYGAFTNQIFVSTSTDSPTSPTTEAPPLPPRNAGKGNDGGPSSSSKTTNKFEGLSQQSSTSSAKTALGPRVLPKLPQKVALRKTDHLSLDKATIPPEIFQKSSQLAELPQKPPPGDLPPKPTELAPKPQIGDLPPKPGELPPKPQLGDLPPKPQLSDLPPKPQMKDLPPKPQLGDLLAKSQTGDVSPKAQQPSEVTLKSHPLDLSPNVQSRDAIQKQASEDSNDLTPTLPETPVPLPRKINTGKNKVRRVKTIYDCQADNDDELTFIEGEVIIVTGEEDQEWWIGHIEGQPERKGVFPVSFVHI

SEQ ID NO: 70546 - protein, 412 aa, Homo sapiens
GDGQNLFTKDVTVIEGEVATISCQVNKSDDSVIQLLNPNRQTIYFRDFRPLKDSRFQLLNFSSSELKVSLTNVSISDEGRYFCQLYTDPPQESYTTITVLVPPRNLMIDIQKDTAVEGEEIEVNCTAMASKPATTIRWFKGNTELKGKSEVEEWSDMYTVTSQLMLKVHKEDDGVPVICQVEHPAVTGNLQTQRYLEVQYKPQVHIQMTYPLQGLTREGDALELTCEAIGKPQPVMVTWVRVDDEMPQHAVLSGPNLFINNLNKTDNGTYRCEASNIVGKAHSDYMLYVYDPPTTIPPPTTTTTTTTTTTTTILTIITDTTATTEPAVHDSRAGEEGSIRAVDHAVIGGVVAVVVFAMLCLLIILGRYFARHKGTYFTHEAKGADDAADADTAIINAEGGQNNSEEKKEYFI

SEQ ID NO: 70547 - protein, 63 aa, Homo sapiens
MKNQNGTFKDWANANVSRQIEDTVLYGYYTLYSVILFCVFFWIPFVYFYYEEKDDDDTSKCTQ

SEQ ID NO: 70548 - protein, 65 aa, Homo sapiens
  MOD_RES (1)..(1): Any amino acid
XHVFGLEKSQLLKEAFDKAGPVPKGREDVKRLLKLHKDRFRGDLRWILFCADLPSLIQEGPQYVP

SEQ ID NO: 70549 - protein, 172 aa, Homo sapiens
  MOD_RES (1)..(1): Any amino acid
XSSSSSSTKATLYPPGLGSGCMLSRMALETHISPTPFGKLHVGLGCRQWHLWKILNPPPSPATDPSLYNMDMFYSSNIPATARPYRPYIIRGMAPPTTPCSTDVCDSDYSASRWKASKYYLDLNSDSDPYPPPPTPHSQYLSAEDSCPPSPATERSYFHLFPPPPSPCTDSS

SEQ ID NO: 70550 - protein, 145 aa, Homo sapiens
MQPPLDLKQILPFPLEPAPTLGLFSNYSTMDPVQKAVLSHTFGGPLLKTKRPVISCNICQIRFNSQSQAEAHYKGNRHARRVKGIEAAKTRGREPGVREPGDPAPPGSTPTNGDGVAPRPVSMENGLGPAPGSPEKQPGSPSPPS

SEQ ID NO: 70551 - protein, 509 aa, Homo sapiens
MRKKMAKLGREKDELEQELQKYKSLYGDVDSPLPTGEAGGPPSTREAELKLRLKLVEEEANILGRKIVELEVENRGLKAEMEDMRGQQEREGPGRDHAPSIPTSPFGDSLESSTELRRHLQFVEEEAELLRRSISEIEDHNRQLTHELSKFKFEPPREPGWLGEGASPGAGGGAPLQEELKSARLQISELSGKVLKLQHENHALLSNIQRCDLAAHLGLRAPSPRDSDAESDAGKKESDGEESRLPQPKREGPVGGESDSEEMFEKTSGFGSGKPSEASEPCPTELLKAREDSEYLVTLKHEAQRLERTVERLITDTDSFLHDAGLRGGAPLPGPGLQGEEEQGEGDQQEPQLLGTINAKMKAFKKELQAFLEQVNRIGDGLSPLPHLTESSSFLSTVTSVSRDSPIGNLGKELGPDLQMCPPAPLLILILVQTERAAGVAARAGPRGRAGEPAPPSRAGAAPPRRRGHREPRAGRPDLLQPGDGGGAPLCLEVERTGNAQPGFAKHPP

SEQ ID NO: 70552 - protein, 187 aa, Homo sapiens
  MOD_RES (1)..(1): Any amino acid
XNGKIQSTYDQDHTVPAYVPRKLIPITIIKQVIQNVTHKDSAKSPEKAPLGGVILVHLIIPGLNETTVKLPASLMFEISDALKTQLAKNETLALPAESKTPEVEKISARPTTVTPETVPRSTKPTTSSALDVSETTLVLSKRTPETLQTILIPQFELPLSTLASSEKPWIVPTAKISEDSKVLQPQT

SEQ ID NO: 70553 - protein, 84 aa, Homo sapiens
MKVKVIPVLEDNYMYLVIEELTREAVAVDVAVPKRGPRAGKPGAGAASSRAGGAGRGRAHLLADAQAGARRGAAEGVLRPRAHA

SEQ ID NO: 70554 - protein, 127 aa, Homo sapiens
MTNETLNIWTHLLPFWFFAWRFVTALYMTDIKNDSYSWPMLVYMCTSCVYPLVSSCAHTFSSMSKNARHICYFLDYGAVNLFSLGSAIAYSAYTFPDALMCTTFHDYYVALAVLNTILSTGLSCYSR

SEQ ID NO: 70555 - protein, 113 aa, Homo sapiens
MKSRIPVVLLACGSFNPITNMHLRMFEVARDHLHQTGMYQVIQGIISPVNDTYGKKDLAASHHRVAMARLALQTSDWIRVDPWESEQAQWMETVKVLRHHHSKLLRSPPQMEG

SEQ ID NO: 70556 - protein, 384 aa, Homo sapiens
MSKSKVDNQFYSVEVGDSTFTVLKRYQNLKPIGSGAQGIVCAAYDAVLDRNVAIKKLSRPFQNQTHAKRAYRELVLMKCVNHKNIISLLNVFTPQKTLEEFQDVYLVMELMDANLCQVIQMELDHERMSYLLYQMLCGIKHLHSAGIIHRDLKPSNIVVKSDCTLKILDFGLARTAGTSFMMTPYVVTRYYRAPEVILGMGYKENVDIWSVGCIMGEMVRHKILFPGRDYIDQWNKVIEQLGTPCPEFMKKLQPTVRNYVENRPKYAGLTFPKLFPDSLFPADSEHNKLKASQARDLLSKMLVIDPAKRISVDDALQHPYINVWYDPAEVEAPPPQIYDKQLDEREHTIEEWKELIYKEVMNSEEKTKNGVVKGQPSPSGTHSP

SEQ ID NO: 70557 - protein, 181 aa, Homo sapiens
MAHVGSRKRSRSRSRSRGRGSEKRKKKSRKDTSRNCSASTSQGRKASTAPGAEERSKQKARRRTRSSSSSSSSSSSSSSSSSSSSSSSSSDGRKKRGKYKDKRRKKKKKRKKLKKKGKEKAEAQQSIIRKVVDPETGRTRLIKGDGEVLEEIVTKERHREINKQATRGDCLAFQMRAGLLP

SEQ ID NO: 70558 - protein, 125 aa, Homo sapiens
MVAMQEAAQHLLGTHDFSAFQSAGSPVPSPVRTLRRVSVSPGQASPLVTPEESRKLRFWNLEFESQSFLYRQVRRMTAVLVAVGLGALAPAQVKTILESQDPLGKHQTRVAPAHGLFLKSVLYGN

SEQ ID NO: 70559 - protein, 110 aa, Homo sapiens
  MOD_RES (1)..(1): Any amino acid
XYVEDLAKIPRSFLQEANVTLIVIGQSSYHHIEPFCKLTGYSHEIYVDPEREIYKRLGMKRGEEIASSGNNIHFIHRDRNRLDHKPINSVLQLVGVQHVNFTNRPSVIHV

SEQ ID NO: 70560 - protein, 89 aa, Homo sapiens
MVDAFLGTWKLVDSKNFDDYMKSLGVGFATRQVASMTKPTTIIEKNGDILTLKTHSTFKNTEISFKLGVEFDETTADDRKVKHRARMFF

SEQ ID NO: 70561 - protein, 503 aa, Homo sapiens
MWPQDPSRKEVLRFAVSCRILTLMLQALFNAIIPDHHAEAFSPPRLAPSGFVDQLVEGLLGGLSHWDAEHFLFIAEHGYLYEHNFAFFPGFPLALLVGTELLRPLRGLLSLRSCLLISVASLNFLFFMLAAVALHDLGCLVLHCPHQSFYAALLFCLSPANVFLAAGYSEALFALLTFSAMGQLERGRVWTSVLLFAFATGVRSNGLVSVGFLMHSQCQGFFSSLTMLNPLRQLFKLMASLFLSVFTLGLPFALFQYYAYTQFCLPGSARPIPEPLVQLAVDKGYRIAEGNEPPWCFWDVPLIYSYIQDVYWNVGFLKYYELKQVPNFLLAAPVAILVAWATWTYVTTHPWLCLTLGLQRSKNNKTLEKPDLGFLSPQVFVYVVHAAVLLLFGGSHQVFGLLHSYYVLVSSSLASGSRAAVEILKDCALEASCRGLPTRTKGPQKSYHGTFVSLENLFSSHTIHSRLLPDLLAPGTTPTLQLPALDMTWTLQGQVGSQLNPGV

SEQ ID NO: 70562 - protein, 187 aa, Homo sapiens
  MOD_RES (1)..(1): Any amino acid
XEDRMTLLLRLRAQTKQQLLEYKSMVDASEEKTPEQIMQEKQIEAMRLSTALKKNLEKISRQSSVLMDNMKHLLELNKLIMKSQQESWDLEEKLLDIRKKRLQLKQASESKLLEIQTEKNKQKIDLDSMENSERIKIIRQNLQMEIKITTVIQHVFQNLILGSKVNWAEDPALKEIVLQLEKNVDMM

SEQ ID NO: 70563 - protein, 74 aa, Homo sapiens
MAEEVRREEASGVGRARTPTPGALRAPQLVTEAPPLHPGEHPDEGHGPDAAAWAGAGDRGRPPQGRRRPVTGDF

SEQ ID NO: 70564 - protein, 192 aa, Homo sapiens
MLRGMYLTRNGNLQRRHTMKEAKDMKNKLGIFRRRNESPGAPPAGKADKMMKSFKPTSEEALKWGESLEKLLVHKYGLAVFQAFLRTEFSEENLEFWLACEDFKKVKSQSKMASKAKKIFAEYIAIQACKEVNLDSYTREHTKDNLQSVTRGCFDLAQKRIFGLMEKDSYPRFLRSDLYLDLINQKKMSPPL

SEQ ID NO: 70565 - protein, 69 aa, Homo sapiens
MHVIKRDGRQERVMFDKITSRIQKLCYGLNMDFVDPGLTLPPRLECSGIITAHCSLSFPSSWDHRLRSP

SEQ ID NO: 70566 - protein, 166 aa, Homo sapiens
MNMAEANNAFFAASEQTFHTPSLGDEEFEIPPITPPPESDPALGMPDVLLPFQALSDPLPSQGSEFTPQFPPQSLDLPSITISRNLVEQDGVLHSSGLHMDQSHTQVSQYRQDPSLIMRSIVHMTDAARSGVMPPAQLTTINQSQLSAQLGLNLGGASMPHTSPSP

SEQ ID NO: 70567 - protein, 259 aa, Homo sapiens
MRPAVLGSPDRAPPEDEGPVMVKLEDSEEEGEAALWDPGPEAARLRFRCFRYEEATGPQEALAQLRELCRQWLRPEVRSKEQMLELLVLEQFLGALPPEIQARVQGQRPGSPEEAAALVDGLRREPGGPRRWVTVQVQGQEVLSEKMEPSSFQPLPETEPPTPEPGPKTPPRTMQESPLGLQVKEESEVTEDSDFLESGPLAATQESVPTLLPEEAQRCGTVLDQIFPHSKTGPEGPSWREHPRALWHEEAGGIFSPGK

SEQ ID NO: 70568 - protein, 448 aa, Homo sapiens
MTGWGQWRAIILHSPDPPWGQPHMIDVSQAVCWRSMRRGCAVLGALGLLAGAGVGSWLLVLYLCPAASQPISGTLQDEEITLSCSEASAEEALLPALPKTVSFRINSEDFLLEAQVRDQPRWLLVCHEGWSPALGLQICWSLGHLRLTHHKGVNLTDIKLNSSQEFAQLSPRLGGFLEEAWQPRNNCTSGQVVSLRCSECGARPLASRIVGGQSVAPGRWPWQASVALGFRHTCGGSVLAPRWVVTAAHCMHSFRLARLSSWRVHAGLVSHSAVRPHQGALVERIIPHPLYSAQNHDYDVALLRLQTALNFSDTVGAVCLPAKEQHFPKGSRCWVSGWGHTHPSHTYSSDMLQDTVVPLFSTQLCNSSCVYSGALTPRMLCAGYLDGRADACQGDSGGPLVCPDGDTWRLVGVVSWGRGCAEPNHPGVYAKVAEFLDWIHDTAQDSLL

SEQ ID NO: 70569 - protein, 426 aa, Homo sapiens
  MOD_RES (1)..(1): Any amino acid
XTLPLHPNQGLPESVKFHFTVSDGEHTSPEMVLTIHLLPSDQQLPVFQVTAPRLAVSPGGSTSVGLQVVVRDAETAPKELFFELRRPPQHGVLLKHTAEFRRPMATGDTFTYEDVEKNALQYIHDGSSTREDSMEISVTDGLTVTMLEVRVEVSLSEDRGPRLAAGSSLSITVASKSTAIITRSHLAYVDDSSPDPEIWIQLNYLPSYGTLLRISGSEVEELSEVSNFTMEDINNKKIRYSAVFETDGHLVTDSFYFSVSDMDHNHLDNQIFTIMITPAENPPPVIAFADLITVDEGGRAPLSFHHFFATDDDDNLQRDAIIKLSALPKYGCIENTGTGDRFGPETASDLEASFPIQDVLENYIYYFQSVHESIEPTHDIFSFYVSDGTSRSEIHSINITIEVKTLEVGKVEPLTTIFHTIRELSL

SEQ ID NO: 70570 - protein, 151 aa, Homo sapiens
MDTEGFGELLQQAEQLAAETEGISELPHVERNLQEIQQAGERLRSRTLTRTSQETADVKASVLLGSRGLDISHISQRLESLSAATTFEPLEPVKDTDIQGFLKNEKDNALLSAIEESRKRTFGMAEEYHRESMLVEWEQVKQRILHTLLAS

SEQ ID NO: 70571 - protein, 83 aa, Homo sapiens
  MOD_RES (1)..(1): Any amino acid
XPEPGFKRLAWGQPVGLRHTGYVIELQHVVKGPSGCVESLEVTCRRADAGEKPKAFIHWVSQPLMCEVRLYERLHHYTWWMQH

SEQ ID NO: 70572 - protein, 118 aa, Homo sapiens
MGPASPAARGLSRRPGQPPLPLLLPLLLLLLRAQPAIGSLAGGSPGAAETHSALDAVSGTRSACWSTADRCTRSCRLHVWSRLRRPSPWSAGAGVPGAAAAPTPTTRLCPSAACLVNL

SEQ ID NO: 70573 - protein, 299 aa, Homo sapiens
MAVMAPRTLLLLLLGALALTQTWAGSHSMRYFFTSVSRPGRGEPRFIAVGYVDDTQFVRFDSDAASQRMEPRAPWIEQEGPEYWDQETRNVKAHSQTDRESLRIALRYYNQSEAGSHTIQMMYGCDVGPDGRLLRGYQQDAYDGKDYIALNEDLRSWTAADMAAQITQRKWEAARVAEQLRAYLEGTCVEWLRRYLENGKETLQRTDAPKTHMTHHAVSDHEATLRCWALSFYPAEITLTWQRDGEDQTQDTELVETRPAGDGTFQKWASVVVPSGQEQRYTCHVQHEGLPKPLTLRWV

SEQ ID NO: 70574 - protein, 341 aa, Homo sapiens
MAEAAAAAGGTGLGAGASYGSAADRDRDPDPDRAGRRLRVLSGHLLGRPREALSTNECKARRAASAATAAPTATPAAQESGTIPKKRQEVMKWNGWGYNDSKFIFNKKGQIELTGKRYPLSGMGLPTFKEWIQNTLGVNVEHKTTSKASLNPSDTPPSVVNEDFLHDLKETNISYSQEADDRVFRAHGHCLHEIFLLREGMFERIPDIVLWPTCHDDVVKIVNLACKYNLCIIPIGGGTSVSYGLMCPADETRTIISLDTSQMNRILWVDENNLTAHVEAGITGQELERQLKESGYCTGHEPDSLEFSTVGGWVSTRASGMKKNIYGNIEDLCYRAEAHRY

SEQ ID NO: 70575 - protein, 884 aa, Homo sapiens
MTRHADRIISLFTFAVGVNICLGFTAHRIKRAEGWEEGPPTVLSDSPWTNISGSCKGRCFELQEAGPPDCRCDNLCKSYTSCCHDFDELCLKTARGWECTKDRCGEVRNEENACHCSEDCLARGDCCTNYQVVCKGESHWVDDDCEEIKAAECPAGFVRPPLIIFSVDGFRASYMKKGSKVMPNIEKLRSCGTHSPYMRPVYPTKTFPNLYTLATGLYPESHGIVGNSMYDPVFDATFHLRGREKFNHRWWGGQPLWITATKQGVKAGTFFWSVVIPHERRILTILQWLTLPDHERPSVYAFYSEQPDFSGHKYGPFGPEMTNPLREIDKIVGQLMDGLKQLKLHRCVNVIFVGDHGMEDVTCDRTEFLSNYLTNVDDITLVPGTLGRIRSKFSNNAKYDPKAIIANLTCKKPDQHFKPYLKQHLPKRLHYANNRRIEDIHLLVERRWHVARKPLDVYKKPSGKCFFQGDHGFDNKVNSMQTVFVGYGSTFKYKTKVPPFENIELYNVMCDLLGLKPAPNNGTHGSLNHLLRTNTFRPTMPEEVTRPNYPGIMYLQSDFDLGCTCDDKVEPKNKLDELNKRLHTKGSTEAETRKFRGSRNENKENINGNFEPRKERHLLYGRPAVLYRTRYDILYHTDFESGYSEIFLMPLWTSYTVSKQAEVSSVPDHLTSCVRPDVRVSPSFSQNCLAYKNDKQMSYGFLFPPYLSSSPEAKYDAFLVTNMVPMYPAFKRVWNYFQRVLVKKYASERNGVNVISGPIFDYDYDGLHDTEDKIKQYVEGSSIPVPTHYYSIITSCLDFTQPADKCDGPLSVSSFILPHRPDNEESCNSSEDESKWVEELMKMHTARVRDIEHLTSLDFFRKTSRSYPEILTLKTYLHTYESEI

SEQ ID NO: 70576 - protein, 174 aa, Homo sapiens
MPAANMMENRPLPALQVPEPQGAPEGSPVWSSSSTPTLRRRRFKMRRMKNVQEQSLEAGLARDLPAVLAPGKEFLQLPSIEITPSSDEDTPWSNCSTPSASPRRKRFLLRKWLRVRERKECSESRVLSLNGFVFLCGATESLITFPGIPSPNLFNYIDFNSLKLADFHCTKLKI

SEQ ID NO: 70577 - protein, 71 aa, Homo sapiens
MWSLTASEGESTTAHFFLGAGDEGLGTRGIGMRPEESDSELLEDEEDEVPPEPQIIVGICAMTKKSKSKPM

SEQ ID NO: 70578 - protein, 242 aa, Homo sapiens
  MOD_RES (1)..(1): Any amino acid
XWSGSFPLENTELANVGANQVTVRKGEKDHTTHCHASDHANQLSIHIPGWSYRAGDYTCCDLVVKIKECKKSEDPTTPEPSPAAPSPAPRDGAGSPGLSEDCSESQQTPARSLTLQEALEVRKPQFISRSQERLKKLEHMVQQRKAQRKEDLRQKQSLLPIRTSKKQFTIPHPLSDNLFKPKERCISEKEMHMRSKRIYDNLPEVKKKKEEQRKRVILQSNRLRAEVFKKQLLDQLLQRNAV

SEQ ID NO: 70579 - protein, 146 aa, Homo sapiens
MLLWPLLLLLLLLPTLALLRQQRSQDARLSWLAGLQHRVAWGALVWAATWQRRRLEQSTLHVHQSQQQALRWCLQGAQRPHCSLRRSTDISTFRNHLPLTKASQTQQEDSGEQPLPPTSNQDLGEASLQATLLGLAALNKAYPEVL

SEQ ID NO: 70580 - protein, 128 aa, Homo sapiens
  MOD_RES (1)..(1): Any amino acid
XPILTTTCEVGTAMMDAHFTDVETEVLTGKVTWPKSHRDEVSLDLNAVDARTNGQARGGGGDDASRTPAGHASLDRDWNTDPHTRSLDRRYTDRGTYGYSQAPPRQVPHHLLWGKAALTWAAPGGFYP

SEQ ID NO: 70581 - protein, 122 aa, Homo sapiens
MATVVVEATEPEPSGSIANPAASTSPSLSHRFLDSKFYLLVVVGEIVTEEHLRRAIGNIELGIRSWDTNLIECNLDQELKLFVSRHSARFSPEVPGQKILHHRSDVLETVVLINPSDEAVST

SEQ ID NO: 70582 - protein, 44 aa, Homo sapiens
KHAHFSSRKLCASDKILEFDRDFRIRHYAGDVVSSWNLLSYPQH

SEQ ID NO: 70583 - protein, 159 aa, Homo sapiens
MSVKEGAQRKWAALKEKLGPQDSDPTEANLESADPELCIRLLQMPSVVNYSGLRKRLEGSDGGWMVQFLEQSGLDLLLEALARLSGRGVARISDALLQLTCVSCVRAVMNSRQGIEYILSNQGYVRQLSQDGVQPAVPLQHCHERALRQRQRALRGHPA

SEQ ID NO: 70584 - protein, 189 aa, Homo sapiens
  MOD_RES (1)..(1): Any amino acid
XGGSQQNQLLKMVCPEFLPSDVSRVSSFWWVHGPADFKNEAADLHGMTDFPKIFCETSQKLVSVEAFALAAKYYSVQNLGICTPFEQLLVALRGNQNQRIGENQKAVEFMNMKKSHEVQAMSELISSIADYYGIKQVIDLGSGKGYLSSFLSLKYGLKVYGIDSSNTNTHGAEERNRKLKKHWKLCHAQ

SEQ ID NO: 70585 - protein, 96 aa, Homo sapiens
MEVLPCSRVAHIERTRKPYNNDIDYYAKRNALRAAEVWMDDFKSHVYMAWNIPMSNPGVDFGDVSERLALRQRLKCRSFKWYLENVYPEMRVYNNT

SEQ ID NO: 70586 - protein, 41 aa, Homo sapiens
MRAILGSYDSELTPAEYSPQLTRRMREAEDMVQKVHSHSAE

SEQ ID NO: 70587 - protein, 74 aa, Homo sapiens
MGLEEIAPCTSKRKTQCRCQPGMFCAAWALECTHCELLSDCPPGTEAELKGVRTKVWWRQLQALPSPTQPAKIH

SEQ ID NO: 70588 - protein, 73 aa, Homo sapiens
MTCAFASNWEKIEQFHSRPDDIVIATYPKSGTTWVSEIIDMILNDGDIEKCKRGFITEKVPMLEMTLPGLRTS

SEQ ID NO: 70589 - protein, 80 aa, Homo sapiens
LSLTQSDISHIGSMRVEGIVHPTTAEIDLKEDIAAVIPVWTKHPCHLRDMRAGCAGAHRQGSCGVRGGVLSSPRGSTWPV

SEQ ID NO: 70590 - protein, 48 aa, Homo sapiens
MSIYFPIHCPDYLRSAKMTEVMMNTQPMEEIGLSPRKDGLSYQDCEEP

SEQ ID NO: 70591 - protein, 533 aa, Homo sapiens
MLRRALLCLAVAALVRADAPEEEDHVLVLRKSNFAEALAAHKYLLVEFYRLILTLSNSGSVCTDVHLILTASADAPWCGHCKALAPEYAKAAGKLKAEGSEIRLAKVDATEESDLAQQYGVRGYPTIKFFRNGDTASPKEYTAGREADDIVNWLKKRTGPAATTLPDGAAAESLVESSEVAVIGFFKDVESDSAKQFLQAAEAIDDIPFGITSNSDVFSKYQLDKDGVVLFKKFDEGRNNFEGEVTKENLLDFIKHNQLPLVIEFTEQTAPKIFGGEIKTHILLFLPKSVSDYDGKLSNFKTAAESFKGKILFIFIDSDHTDNQRILEFFGLKKEECPAVRLITLEEEMTKYKPESEELTAERITEFCHRFLEGKIKPHLMSQELPEDWDKQPVKVLVGKNFEDVAFDEKKNVFVEFYAPWCGHCKQLAPIWDKLGETYKDHENIVIAKMDSTANEVEAVKVHSFPTLKFFPASADRTVIDYNGERTLDGFKKFLESGGQDGAGDDDDLEDLEEAEEPDMEEDDDQKAVKDEL

SEQ ID NO: 70592 - protein, 53 aa, Homo sapiens
MGGYYCNVCDCVVKDSINFLDHINGKKHQRNLGMSMRVERSTLDQVKKRFEVN

SEQ ID NO: 70593 - protein, 484 aa, Homo sapiens
MTPGTQSPFFLLLLLTVLTATTAPKPATVVTGSGHASSTPGGEKETSATQRSSVPSSTEKNAVSMTSSVLSSHSPGSGSSTTQGQDVTLAPATEPASGSAATWGQDVTSVPVTRPALGSTTPPAHDVTSAPDNKPAPGSTAPPAHGVTSAPDTRPAPGSTAPPAHGVTSAPDNRPALGSTAPPVHNVTSASGSASGSASTLVHNGTSARATTTPASKSTPFSIPSHHSDTPTTLASHSTKTDASSTHHSTVPPLTSSNHSTSPQLSTGVSFFFLSFHISNLQFNSSLEDPSTDYYQELQRDISEMFLQIYKQGGFLGLSNIKFRPGSVVVQLTLAFREGTINVHDVETQFNQYKTEAASRYNLTISDVSVSDVPFPFSAQSGAGVPGWGIALLVLVCVLVALAIVYLIALAVCQCRRKNYGQLDIFPARDTYHPMSEYPTYHTHGRYVPPSSTDRSPYEKVSAGNGGSSLSYTNPAVAATSANL

SEQ ID NO: 70594 - protein, 724 aa, Homo sapiens
MDLYSTPAAALDRFVARRLQPRKEFVEKARRALGALAAALRERGGRLGAAAPRVLKTVKGGSSGRGTALKGGCDSELVIFLDCFKSYVDQRARRAEILSEMRASLESWWQNPVPGLRLTFPEQSVPGALQFRLTSVDLEDWMDVSLVPAFNVLGQAGSGVKPKPQVYSTLLNSGCQGGEHAACFTELRRNFVNIRPAKLKNLILLVKHWYHQVCLQGLWKETLPPVYALELLTIFAWEQGCKKDAFSLAEGLRTVLGLIQQHQHLCVFWTVNYGFEDPAVGQFLQRQLKRPRPVILDPADPTWDLGNGAAWHWDLLAQEAASCYDHPCFLRGMGDPVQSWKGPGLPRAGCSGLGHPIQLDPNQKTPENSKSLNAVYPRAGSKPPSCPAPGPTGAASIVPSVPGMALDLSQIPTKELDRFIQDHLKPSPQFQEQVKKAIDIILRCLHENCVHKASRVSKGGSFGRGTDLRDGCDVELIIFLNCFTDYKDQGPRRAEILDEMRAQLESWWQDQVPSLSLQFPEQNVPEALQFQLVSTALKSWTDVSLLPAFDAVGQLSSGTKPNPQVYSRLLTSGCQEGEHKACFAELRRNFMNIRPVKLKNLILLVKHWYRQVAAQNKGKGPAPASLPPAYALELLTIFAWEQGCRQDCFNMAQGFRTVLGLVQQHQQLCVYWTVNYSTEDPAMRMHLLGQLRKPSQPSFTKPQLGTLTSSSVNFSSPTASSWPR

SEQ ID NO: 70595 - protein, 265 aa, Homo sapiens
  MOD_RES (1)..(1): Any amino acid
XPEEDSSKKSLKTKKPQQILLPEKINEQLALLETHLLKLTKQYVTSELSGGEDPIFLYPVVLNWSVKGAVKEVMKFKQKPRFLEFFTQVMLKCMNEEKFHLMVEVTTPVHDFLKRRNESLLGLIKVKYKDSALNKKANKSLKFKAAVMEIGRSAEMQQRIRSKKKETLRDFIFKNPAISEMVAHERNRRTSVRKAAQRYLMDYLNPLILSYVKRKRFHRLSLEEMPWRAQMNLYLAGAHFNLVLQKLWECTKMKFGTSHMMVRHF

SEQ ID NO: 70596 - protein, 83 aa, Homo sapiens
MAFEALASISHVAHVTITTKTADGKCAYRASYSDGKLKAPPKPCAGNQGTQITVEDLFYNIATRRKALKNPSEEYGKILEVVG

SEQ ID NO: 70597 - protein, 220 aa, Homo sapiens
MKRLVCVLLVCSSAVAQLHKDPTLDHHWHLWKKTYGKQYKEKNEEAVRRLIWEKNLKFVMLHNLEHSMGMHSYDLGMNHLGDMTSEEVMSLMSSLRVPSQWQRNITYKSNPNRILPDSVDWREKGCVTEVKYQGSCGACWAFSAVGALEAQLKLKTGKLVSLSAQNLVDCSTEKYGNKGCNGGFMTTAFQYIIDNKGIDSDASYPYKAMVRLKQTFCAAP

SEQ ID NO: 70598 - protein, 2507 aa, Homo sapiens
MARFGDEMPARYGGGGSGAAAGVVVGSGGGRGAGGSRQGGQPGAQRMYKQSMAQRARTMALYNPIPVRQNCLTVNRSLFLFSEDNVVRKYAKKITEWPPFEYMILATIIANCIVLALEQHLPDDDKTPMSERLDDTEPYFIGIFCFEAGIKIIALGFAFHKGSYLRNGWNVMDFVVVLTGILATVGTEFDLRTLRAVRVLRPLKLVSGIPSLQVVLKSIMKAMIPLLQIGLLLFFAILIFAIIGLEFYMGKFHTTCFEEGTDDIQGESPAPCGTEEPARTCPNGTKCQPYWEGPNNGITQFDNILFAVLTVFQCITMEGWTDLLYNSNDASGNTWNWLYFIPLIIIGSFFMLNLVLGVLSGEFAKERERVENRRAFLKLRRQQQIERELNGYMEWISKAEEVILAEDETDGEQRHPFDGALRRTTIKKSKTDLLNPEEAEDQLADIASVGSPFARASIKSAKLENSTFFHKKERRMRFYIRRMVKTQAFYWTVLSLVALNTLCVAIVHYNQPEWLSDFLYYAEFIFLGLFMSEMFIKMYGLGTRPYFHSSFNCFDCGVIIGSIFEVIWAVIKPGTSFGISVLRALRLLRIFKVTKYWASLRNLVVSLLNSMKSIISLLFLLFLFIVVFALLGMQLFGGQFNFDEGTPPTNFDTFPAAIMTVFQILTGEDWNEVMYDGIKSQGGVQGGMVFSIYFIVLTLFGNYTLLNVFLAIAVDNLANAQELTKDEQEEEEAANQKLALQKAKEVAEVSPLSAANMSIAVKEQQKNQKPAKSVWEQRTSEMRKQNLLASREALYNEMDPDERWKAAYTRHLRPDMKTHLDRPLVVDPQENRNNNTNKSRAAEPTVDQRLGQQRAEDFLRKQARYHDRARDPSGSAGLDARRPWAGSQEAELSREGPYGRESDHHAREGSLEQPGFWEGEAERGKAGDPHRRHVHRQGGSRESRSGSPRTGADGEHRRHRAHRRPGEEGPEDKAERRARHREGSRPARGGEGEGEGPDGGERRRRHRHGAPATYEGDARREDKERRHRRRKENQGSGVPVSGPNLSTTRPIQQDLGRQDPPLAEDIDNMKNNKLATAESAAPHGSLGHAGLPQSPAKMGNSTDPGPMLAIPAMATNPQNAASRRTPNNPGNPSNPGPPKTPENSLIVTNPSGTQTNSAKTARKPDHTTVDIPPACPPPLNHTVVQVNKNANPDPLPKKEEEKKEEEEDDRGEDGPKPMPPYSSMFILSTTNPLRRLCHYILNLRYFEMCILMVIAMSSIALAAEDPVQPNAPRNNVLRYFDYVFTGVFTFEMVIKMIDLGLVLHQGAYFRDLWNILDFIVVSGALVAFAFTGNSKGKDINTIKSLRVLRVLRPLKTIKRLPKLKAVFDCVVNSLKNVFNILIVYMLFMFIFAVVAVQLFKGKFFHCTDESKEFEKDCRGKYLLYEKNEVKARDREWKKYEFHYDNVLWALLTLFTVSTGEGWPQVLKHSVDATFENQGPSPGYRMEMSIFYVVYFVVFPFFFVNIFVALIIITFQEQGDKMMEEYSLEKNERACIDFAISAKPLTRHMPQNKQSFQYRMWQFVVSPPFEYTIMAMIALNTIVLMMKFYGASVAYENALRVFNIVFTSLFSLECVLKVMAFGILNYFRDAWNIFDFVTVLGSITDILVTEFGNNFINLSFLRLFRAARLIKLLRQGYTIRILLWTFVQSFKALPYVCLLIAMLFFIYAIIGMQVFGNIGIDVEDEDSDEDEFQITEHNNFRTFFQALMLLFRSATGEAWHNIMLSCLSGKPCDKNSGILTRECGNEFAYFYFVSFIFLCSFLMLNLFVAVIMDNFEYLTRDSSILGPHHLDEYVRVWAEYDPAACGRIHYKDMYSLLRVISPPLGLGKKCPHRVACKRLLRMDLPVADDNTVHFNSTLMALIRTALDIKIAKGGADKQQMDAELRKEMMAIWPNLSQKTLDLLVTPHKSTDLTVGKIYAAMMIMEYYRQSKAKKLQAMREEQDRTPLMFQRMEPPSPTQEGGPGQNALPSTQLDPGGALMAHESGLKESPSWVTQRAQEMFQKTGTWSPEQGPPTDMPNSQPNSQSVEMREMGRDGYSDSEHYLPMEGQGRAASMPRLPAENQRRRGRPRGNNLSTISDTSPMKRSASVLGPKARRLDDYSLERVPPEENQRHHQRRRDRSHRASERSLGRYTDVDTGLGTDLSMTTQSGDLPSKERDQERGRPKDRKHRQHHHHHHHHHHPPPPDKDRYAQERPDHGRARARDQRWSRSPSEGREHMAHRQGSSSVSGSPAPSTSGTSTPRRGRRQLPQTPSTPRPHVSYSPVIRKAGGSGPPQQQQQQQQQQQQQAVARPGRAATSGPRRYPGPTAEPLAGDRPPTGGHSSGRSPRMERRVPGPARSESPRACRHGGARWPASGPHVSEGPPGPRHHGYYRGSDYDEADGPGSGGGEEAMAGAYDAPPPVRHASSGATGRSPRTPRASGPACASPSRHGRRLPNGYYPAHGLARPRGPGSRKGLHEPYSESDDDWC

SEQ ID NO: 70599 - protein, 162 aa, Homo sapiens
  MOD_RES (1)..(1): Any amino acid
XTKRSWEAERVMEWLKTQEWGLMILDEVHTIPAKMFRRVLTIVQAHCKLGLTATLVREDDKIVDLNFLIGPKLYEANWMELQNNGYIAKVQCAEVWCPMSPEFYREYVAIKTKKRILLYTMNPNKFRACQFLIKFHERRNDKIIVFADNVFALKEYAIRLNK

SEQ ID NO: 70600 - protein, 177 aa, Homo sapiens
MVATGSLSSKNPASISELLDCGYHPESLLSDFDYWDYVVPEPNLNEVIFEESTCQNLVKMLENCLSKSKQTKLGCSKVLVPEKLTQRIAQDVLRLSSTEPCGLRGCVMHVNLEIENVCKKLDRIVCDSSVVPTFELTLVFKQENCSWTSFRDFFFSRGRFSSGFRRTLILSSGFRLV

SEQ ID NO: 70601 - protein, 287 aa, Homo sapiens
MFYFRGCGRWVAVSFTKQQFPLARLSSDSAAPRTPHFDVIVIGGGHAGTEAATAAARCGSRTLLLTHRVDTIGQMSCNPSFGGIGKGHLMREVDALDGLCSRICDQSGVHYKVLNRRKGPAVWGLRAQIDRKLYKQNMQKEILNTPLLTVQEGAVEDLILTEPEPEHTGKCRVSGVVLESHCVAQAGVQWRDLGLLQPLPPRFKRFSCLSLSSSWDYSGWKHSICRECDSDYWDISERHDCNWIGDASSRTFRGSAFYRIGSDTGEVRVCGGKVEDWDSTPNCQRVH

SEQ ID NO: 70602 - protein, 82 aa, Homo sapiens
MVTFEDVAVHFTKTEWTGLSPAQRALYRSVMLENFGNLTALGYPVPKPALISLLERGDMAWGLEAQDDPPAERTKNVCKVIL

SEQ ID NO: 70603 - protein, 1176 aa, Homo sapiens
MLVGQGAGPLGPAVVTAAVVLLLSGVGPAHGSEDIVVGCGGFVKSDVEINYSLIEIKLYTKHGTLKYQTDCAPNNGYFMIPLYDKGDFILKIEPPLGWSFEPTTVELHVDGVSDICTKGGDINFVFTGFSVNGKVLSKGQPLGPAGVQVSLRNTGTEAKIQSTVTQPGGKFAFFKVLPGDYEILATHPTWALKEASTTVRVTNSNANAASPLIVAGYNVSGSVRSDGEPMKGVKFLLFSSLVTKEIPFYRGERITFDVAPSRLDFTVEHDSLKIEPVFHVMGFSVTGRVLNGPEGDGVPEAVVTLNNQIKVKTKADGSFRLENITTGTYTIHAQKEHLYFETVTIKIAPNTPQLADIVATGFSVCGQISIIRFPDTVKQMNKYKVVLSSQDKDKSLVTVETDAHGSFCFKANPGTYKVQVMVPEAETRAGLTLKPQTFPLTVTDRPVMDVAFVQFLASVSGKVSCLDTCGDLLVTLQSLSRQGEKRSLQLSGKVNAMTFTFDNVLPGKYKISIMHEDWCWKNKSLEVEVLEDDVSAVEFRQTGYMLRCSLSHAITLEFYQDGNGRENVGIYNLSKGVNRFCLSKPGVYKVTPRSCHRFEQAFYTYDTSSPSILTLTAIRHHVLGTITTDKMMDVTVTIKSSIDSEPALVLGPLKSVQELRREQQLAEIEARRQEREKNGNEEGEERMTKPPVQEMVDELQGPFSYDFSYWARSGEKITVTPSSKELLFYPPSMEAVVSGESCPGKLIEIHGKAGLFLEGQIHPELEGVEIVISEKGASSPLITVFTDDKGAYSVGPLHSDLEYTVTSQKEGYVLTAVEGTIGDFKAYALAGVSFEIKAEDDQPLPGVLLSLSGGLFRSNLLTQDNGILTFSNLSPGQYYFKPMMKEFRFEPSSQMIEVQEGQNLKITITGYRTAYSCYGTVSSLNGEPEQGVAMEAVGQNDCSIYGEDTVTDEEGKFRLRGLLPGCVYHVQLKAEGNDHIERALPHHRVIEVGNNDIDDVNIIVFRQINQFDLSGNVITSSEYLPTLWVKLYKSENLDNPIQTVSLGQSLFFHFPPLLRDGENYVVLLDSTLPRSQYDYILPQVSFTAVGYHKHITLIFNPTRKLPEQDIAQGSYIALPLTLLVLLAGYNHDKLIPLLLQLTSRLQGVGALGQAASDNSGPEDAKRQAKKQKTRRT

SEQ ID NO: 70604 - protein, 66 aa, Homo sapiens
MEEKRRRARVQGAWAAPVKSQAIAQPATTAKSHLHQKPGQTWKNKEHHLSDREFVFKEPQQQRGCV

SEQ ID NO: 70605 - protein, 141 aa, Homo sapiens
MQLITDIPLLDITYEISVEAISTMVVFLSCQLFHKEVLRQSISHKYLMRGPCLPYTSKLVKTLLYNFIRQEKPPPPGAHVFPQQSDGGGLLYGLASGVARLWTVFTLGGVGSKAAASPELSSPLANQSLLLLLVLANLTDA

SEQ ID NO: 70606 - protein, 141 aa, Homo sapiens
MKQPIMADGPRCKRRKQANPRRKNVVNYDNVVDTGSETDEEDKLHIAEDDGIANPLDQETSPASVPNHESSPHVSQALLPREEEEDEIREGGVEHPWHNNEILQASVDGPEEMKEDYDTMGPEATIQTAINNGTVKNANCT

SEQ ID NO: 70607 - protein, 126 aa, Homo sapiens
MAAPEAPPLDRVFRTTWLSTECDSHPLPPSYRKFLFETQAADLAGGTTVAAGNLLNESEKDCGQDRRAPGVQPCRLVTMTSVVKTVYSLQPPSALSGGQPAGPKKSMFPNSFIQEVQRMMLQKSPN

SEQ ID NO: 70608 - protein, 65 aa, Homo sapiens
MLASGMLLVALLVCLTVMVLMSVWQQRKSKGKLPPGPTPLPFIGNYLQLNTEQMYNSLMKVSQDQ

SEQ ID NO: 70609 - protein, 64 aa, Homo sapiens
MKELLHKELPSFVGEKVDEEGLKKLMGSLDENSDQQVDFQEYAVFLALITVMCNDFFQGCPDRP

SEQ ID NO: 70610 - protein, 85 aa, Homo sapiens
MDLSGVKKKSLLGVKENNKKSSTRAPSPTKRKDRSDEKSKDRSKDKGATKESSEKDRGRDKTRKRRSASSGSSSTRSRSSSTSSS

SEQ ID NO: 70611 - protein, 489 aa, Homo sapiens
MYTSHEDIGYDFEDGPKDKKTLKPHPNIDGGWAWMMVLSSFFVHILIMGSQMALGVLNVEWLEEFHQSRGLTAWVSSLSMGITLIVGPFIGLFINTCGCRQTAIIGGLVNSLGWVLSAYAANVHYLFITFGVAAGLGSGMAYLPAVVMVGRYFQKRRALAQGLSTTGTGFGTFLMTVLLKYLCAEYGWRNAMLIQGAVSLNLCVCGALMRPLSPGKNPNDPGEKDVRGLPAHSTESVKSTGQQGRTEEKDGGLGNEETLCDLQAQECPDQAGHRKNMCALRILKTVSWLTMRVRKGFEDWYSGYFGTASLFTNRMFVAFIFWALFAYSSFVIPFIHLPEIVNLYNLSEQNDVFPLTSIIAIVHIFGKVILGVIADLPCISVWNVFLLANFTLVLSIFILPLMHTYAGLAVICALIGFSSGYFSLMPVVTEDLVGIEHLANAYGIIICANGISALLGPPFAGKLSEVLRAQSACTYGALCYKVPDKEEGF

SEQ ID NO: 70612 - protein, 92 aa, Homo sapiens
MDFRTACEETKTGICLLQDGNQEPFKVRLHLAKDILMIQEQDVICVSGEPFYSGERTVTIRRQTVGGFGLSIKGGAEHNIPVVVSKISKEQR

SEQ ID NO: 70613 - protein, 64 aa, Homo sapiens
MDFKIEHTWDGFPVKHEPVFIRLNPGDRGVMMDISAPFFRDPPAPLGEPGKPFNELWDYEVVEA

SEQ ID NO: 70614 - protein, 158 aa, Homo sapiens
MWLCPLALNLILMAASGAVCEVKDVCVGSPGIPGTPGSHGLPGRDGRDGLKGDPGPPGPMGPPGEMPCPPGNDGLPGAPGIPGECGEKGEPGERGPPGLPAHLDEELQATLHDFRHQILQTRGALSLQGSIMTVGEKVFSSNGQSITFDAIQEACARA

SEQ ID NO: 70615 - protein, 65 aa, Homo sapiens
AFEHYKTLITTKLGISGHVHRLMAGSMAGKHILLFVLDCSCKLREEESCYHHYSRYDSSYLYLPS

SEQ ID NO: 70616 - protein, 86 aa, Homo sapiens
  MOD_RES (1)..(1): Any amino acid
XYYFIKHVPPLTEEQLNRKPALPLKTRSTPEFSLVLDLDETLVHCSLNELEDAALTFPVLFQDVIYQWCCLHLLAKKKYTQGSEMI

SEQ ID NO: 70617 - protein, 116 aa, Homo sapiens
  MOD_RES (1)..(1): Any amino acid
XQDIKETFNRCEEVQLQPPEVWSPDPCQPHSHDFLTDAIVRKMSRMFCQAARVDLTLDPDTAHPALMLSPDRRGVRLAERRQEVADHPKRFSADCCVLGAQGFRSGRHYWEVCMGP

SEQ ID NO: 70618 - protein, 705 aa, Homo sapiens
MWLLYLLVPALFCRAGGSIPIPQKLFGEVTSPLFPKPYPNNFETTTVITVPTGYRVKLVFQQFDLEPSEGCFYDYVKISADKKSLGRFCGQLGSPLGNPPGKKEFMSQGNKMLLTFHTDFSNEENGTIMFYKGFLAYYQAVDLDECASRSKSGEEDPQPQCQHLCHNYVGGYFCSCRPGYELQEDRHSCQAECSSELYTEASGYISSLEYPRSYPPDLRCNYSIRVERGLTLHLKFLEPFDIDDHQQVHCPYDQLQIYANGKNIGEFCGKQRPPDLDTSSNAVDLLFFTDESGDSRGWKLRYTTEIIKCPQPKTLDEFTIIQNLQPQYQFRDYFIATCKQGYQLIEGNQVLHSFTAVCQDDGTWHRAMPRCKIKDCGQPRNLPNGDFRYTTTMGVNTYKARIQYYCHEPYYKMQTRAGSRESEQGVYTCTAQGIWKNEQKGEKIPRCLPVCGKPVNPVEQRQRIIGGQKAKMGNFPWQVFTNIHGRGGGALLGDRWILTAAHTLYPKEHEAQSNASLDVFLGHTNVEELMKLGNHPIRRVSVHPDYRQDESYNFEGDIALLELENSVTLGPNLLPICLPDNDTFYDLGLMGYVSGFGVMEEKIAHDLRFVRLPVANPQACENWLRGKNRMDVFSQNMFCAGHPSLKQDACQGDSGGVFAVRDPNTDRWVATGIVSWGIGCSRGYGFYTKVLNYVDWIKKEMEEED

SEQ ID NO: 70619 - protein, 114 aa, Homo sapiens
MATPMHRLIARRQAFDTELQPVKTFWILIQPSIVISEANKQHVRCQKCLEFGHWTYECTGKRKYLHRPSRTAELKKALKEKENRLLLQQRSFFPPRVYQHWRNQCRKKGQEKKV

SEQ ID NO: 70620 - protein, 141 aa, Homo sapiens
MMIRLPHKKLQRLFLRKEEGVVKEIDISHHVKEGFEKADPSQFELLKVLGQGSYGKVFLVRKVKGSDAGQLYAMKVLKKATLKVRDRVRSKMERDILAEVNHPFIVKLHYAFQTEGKLYLILDFLRGGDLFTRLSKEVMFT

SEQ ID NO: 70621 - protein, 1104 aa, Homo sapiens
MSLHAWEWEEDPASIEPISSITSFYQSTSECDVEEHLKAKARAQESDSDRPCSSIESSSEPASTFSSDVPHVVPCKFTISLAFPVNMGQKGKYASLIEKYKKHPKTDSSVTKMRRFYHIEYFLLPDDEEPKKVDILLFPMVAKVFLESGVKTVKPWHEGDKAWVSWEQTFNITVTKELLKKINFHKITLRLWNTKDKMSRKVRYYRLKTAGFTDDVGAFHKSEVRHLVLNQRKLSEQGIENTNIVREESNQEHPPGKQEKTEKHPKSLQGSHQAEPETSSKNSEEYEKSLKMDDSSTIQWSVSRTPTISLAGASMMEIKELIESESLSSLTNILDRQRSQIKGKDSEGRRKIQRRHKKPLAEEEADPTLTGPRKQSAFSIQLAVMPLLAGWQTVVSRGSEKSANILDCLLTLKTEVPIMTEEQKQDLNPLTIKIKCASCLPSQPVPIQELERLCMPVYCKYQFHKTPVHKTKGEPHGTHVYFQDINVIFLGALHPSDLREYLEGPPMVVEVHDRDRKSEECSQKPVLFGEDPLDSYLNFQALISPRETENNPFESQNKMWYPYGIAQVSFADLLLGHKYLNLAVPIHSCEVQPTHCGQDSRRRKVVGLGVPRDGHQHGPMPRGNYLEADSQLKLRVDIAVPLRAGARAADPDLGGSQFGRIIFVFDFKKVSLLHSLLQDITMINAKALGLDSYPVRTLQQILSAFKVRVRVQEQQHLDVLTGFHLLDGKTHLFILEGLADQGLRQLWENHQSWIPRSEHRKYKVLYNSQLLFRSRLYGDLEAILYHVHLFQPTELLLQQAVFFLRDTERRRVFQALARIHDICYNSTTLWDVTVRDLLPSSAMIKDLSQEFGMPLSQEELTDEKLFALPPQPAPNLEDYHSRNSTLTLEIHAHQEKYLQWRSAMLMKNKDKKHSFIQKNITEAYQVSKKPPKSVAKVIKISAPANKAVYNYSTQTMNSTELAKKELYQEIAKEPRKRFTYSQDYLSAMVEPLDLKEEEKKAQKKSRQAWLTARGFQVTGLQSDTESSFQDLKLPPIKELNEEWKENSLFANVLEPVLDRDRWSWDRHHVDFDLYKKPPPFLELLPSPAPKPVTVRKKKGNSPIS

SEQ ID NO: 70622 - protein, 116 aa, Homo sapiens
MSAFDMSHGFFPREPICPFEEKTKIGTMVEDHRSNSYQDSVTFDDVAVEFTPEEWALLDTTQKYLYRDVMLENYMNLASVDFFFCLTSEWEIQPRTKRSSLQQGFLKNQIFTGIQM

SEQ ID NO: 70623 - protein, 54 aa, Homo sapiens [sequence omitted]

SEQ ID NO: 70624 - protein, 65 aa, Homo sapiens
LNNPEMVEGLVLINVNPCAEGWMDWAASKVRWGPVRPAGSLQEEGQISGWTQALPDMVVSHLFGK

SEQ ID NO: 70625 - protein, 36 aa, Homo sapiens
MSLQFLKLLLREDLSSDHNAVFITKKPVHFNVTWRY

SEQ ID NO: 70626 - protein, 8 aa, Homo sapiens
MMQAQESL

SEQ ID NO: 70627 - protein, 41 aa, Homo sapiens
MAVLSDGVSLCHPSWSAVAQPLLTATSTSRVQVILLPQPLE

SEQ ID NO: 70628 - protein, 122 aa, Homo sapiens
MAQILPIRFQEHLQLQNLGINPANIGFSTLTMESDKFICIREKVGEQAQVVIIDMNDPSNPIRRPISADSAIMNPASKVIALKGIKESGKTLQIFNIEMKSKMKAHTMTDDVTFWKWISLNT

SEQ ID NO: 70629 - protein, 98 aa, Homo sapiens
  MOD_RES (1)..(1): Any amino acid
XAHQDPTSTFTKIYRRSLCVLQAWVEDCYAVDFPRNSGLLGKLEDFISSKILPLDGSAKHLLGLLEVGMDRRAEGNPRGTDLENPREAEEDARPFNAL

SEQ ID NO: 70630 - protein, 115 aa, Homo sapiens
MLLSTLQSTQRPTLPVGSLSSDKELTRPNETTIHTAGHSLAAGPEAGENQKQPEKNAGPTARTSATVPVLCLLAIIFILTAALSYVLCKRRRGQSPQSSPDLPVHYIPVAPDSNT

SEQ ID NO: 70631 - protein, 364 aa, Homo sapiens
MSCNPSFGGIGKGHLMREVDALDGLCSRICDQSGVHYKVLNRRKGPAVWGLRAQIDRKLYKQNMQKEILNTPLLTVQEGAVEDLILTEPEPEHTGKCRVSGVVLVDGSTVYAESVILTTGTFLRGMIVIGLETHPAGRLGDQPSIGLAQTLEKLGFVVGRLKTGTPPRIAKESINFSILNKHIPDNPSIPFSFTNETVWIKPEDQLPCYLTHTNPRVDEIVLKNLHLNSHVKETTRGPRYCPSIESKVLRFPNRLHQVWLEPEGMDSDLIYPQGLSMTLPAELQEKMITCIRGLEKAKVIQPGYGVQYDYLDPRQITPSLETHLVQRLFFAGQINGTTGYEEAAAQGIKTLAVCPNNDMKELVG

SEQ ID NO: 70632 - protein, 338 aa, Homo sapiens
MSSKMVISEPGLNWDISPKNGLKTFFSRENYKDHSMAPSLKELRVLSNRRIGENLNASASSVENEPAVSSATQAKEKVKTTIGMVLLPKPRVPYPRFSRFSQREQRSYVDLLVKYAKIPANSKAVGINKNDYLQYLDMKKHVNEEVTEFLKFLQNSAKKCAQDYNMLSDDARLFTEKILRACIEQVKKYSEFYTLHEVTSLMGFFPFRVEMGLKLEKTLLALGSVKYVKTVFPSMPIKLQLSKDDIATIETSEQTAEAMHYDISKDPNAEKLVSRYHPQIALTSQSLFTLLNNHGPTYKEQWEIPVCIQVIPVAGSKPVKVIYINSPLPQKKMTMRER

SEQ ID NO: 70633 - protein, 1931 aa, Homo sapiens
KTVLHMDGCLDTETPTVSIQENVDVASLKPISDSGINFTDAIWSPTCERRTCECHESIEKNKDKTDLPQSVVYQNEEGRWVTDLAYYTSFNSKQNLNVSLSDEMNEDFRSGSEAFDLIAQDEEEFNKEHQFIQEENIDAHNTSVALGDTSWGATINYSLLRKSRSTSDLDKDDASYLRLSLGEFFAQRSEALGCLGGGNNVKRPSFGYFIRSPEKREPIALIRKSDVSRGNLEKEMAHLNHDLYSGDLNEQSQAQLSEGSITLQVEAVESTSQVDENDVTLTADKGKTEDTFFMSNKPQRYKDKLPDSGDSMLRISTIASAIAEASVNTDPSQLAAMIKALSNKTRDKTFQEDEKQKDYSHVRHFLPNDLEKSNGSNALDMEKYLKKTEVSRYESALENFSRASMSDTWDLSLPKEQTTQDIHPVDLSATSVSVRAPEENTAAIVYVENGESENQESFRTINSSNSVTNRENNSAVVDVKTCSIDNKLQDVGNDEKATSISTPSDSYSSVRNPRITSLCLLKDCEEIRDNRENQRQNECVSEISNSEKHVTFENHRIVSPKNSDLKNTSPEHGGRGSEDEQESFRPSTSPLSHSSPSEISGTSSSGCALESFGSAAQQQQPPCEQELSPLVCSPAGVSRLTYVSEPESSYPTTATDDALEDRKSDITSELSTTIIQGSPAALEERAMEKLREKVPFQNRGKGTLSSIIQNNSDTRKATETTSLSSKPEYVKPDFRWSKDPSSKSGNLLETSEVGWTSNPEELDPIRLALLGKSGLSCQVGSATSHPVSCQEPIDEDQRISPKDKSTAGREFSGQVSHQTTSENQCTPIPSSTVHSSVADMQNMPAAVHALLTQPSLSAAPFAQRYLGTLPSTGSTTLPQCHAGNATVCGFSGGLPYPAVAGEPVQNSVAVGICLGSNIGSGWMGTSSLCNPYSNTLNQNLLSTTKPFPVPSVGTNCGIEPWDSGVTSGLGSVRVPEELKLPHACCVGIASQTLLSVLNPTDRWLQVSIGVLSISVNGEKVDLSTYRCLVFKNKAIIRPHATEEIKVLFIPSSPGVFRCTFSVASWPCSTDAETIVQAEALASTVTLTAIAESPVIEVETEKKDVLDFGDLTYGGWKALPLKLINRTHATVPIRLIINANAVAWRCFTFSKESVRAPVEVAPCADVVTRLAGPSVVNHMMPASYDGQDPEFLMIWVLFHSPKKQISSSDILDSAEEFSAKVDIEVDSPNPTPVLRSVSLRARAGIARIHAPRDLQTMHFLAKVASSRKQHLPLKNAGNIEVYLDIKVPEQGSHFSVDPKNLLLKPGEEHEVIVSFTPKDPEACEERILKIFVQPFGPQYEVVLKGEVISSGSKPLSPGPCLDIPSILSNKQFLAWGGVPLGRTQLQKLALRNNSASTTQHLRLLIRGQDQDCFQLQNTFGSEQRLTSNCEIRIHPKEDIFISVLFAPTRLSCMLARLEIKQLGNRSQPGIKFTIPLSGYGGTSNLILEGVKKLSDSYMVTVNGLVPGKESKIVFSVRNTGSRAAFVKAVGFKDSQKKVLLDPKVLRIFPDKFVLKERTQENVTLIYNPSDRGINNKTATELSTVYLFGGDEISRQQYRRALLHKPEMIKQILPEHSVLQNINFVEAFQDELLVTEVYDLPQRPNDVQLFYGSMCKIILSVIGEFRDCISSREFLQPSSKASLESTSDLGASGKHGGNVSLDVLPVKGPQGSPLLSRAARPPLDQLASEEPWTVLPEHLILVAPSPCDMAKTGRFQIVNNSVRLLRFELCWPAHCLTVTPQHGCVAPESKLQILVSPNSSLSTKQSMFPWSGLIYIHCDDGQKKIVKVQIREDLTQVELLTRLTSKPFGILSPVSEPSVSHLVKPMTKPPSTKVEIRNKSITFPTTEPGETSESCLELENHGTTDVKWHLSSLAPPYVKRWSLTTLPRLVSIS

SEQ ID NO: 70634 - protein, 40 aa, Homo sapiens
MLTRKIKLWDINAHITCRLCSGYLIDATTVTECLHTFCRS

SEQ ID NO: 70635 - protein, 1171 aa, Homo sapiens
MEPLLLGRGLIVYLMFLLLKFSKAIEIPSSVQQVPTIIKQSKVQVAFPFDEYFQIECEAKGNPEPTFSWTKDGNPFYFTDHRIIPSNNSGTFRIPNEGHISHFQGKYRCFASNKLGIAMSEEIEFIVPSVPKFPKEKIDPLEVEEGDPIVLPCNPPKGLPPLHIYWMNIELEHIEQDERVYMSQKGDLYFANVEEKDSRNDYCCFAAFPRLRTIVQKMPMKLTVNSLKHANDSSSSTEIGSKANSIKQRKPKLLLPPTESGSESSITILKGEILLLECFAEGLPTPQVDWNKIGGDLPKGRETKENYGKTLKIENVSYQDKGNYRCTASNFLGTATHDFHVIVEEPPRWTKKPQSAVYSTGSNGILLCEAEGEPQPTIKWRVNGSPVDNHPFAGDVVFPREISFTNLQPNHTAVYQCEASNVHGTILANANIDVVDVRPLIQTKDGENYATVVGYSAFLHCEFFASPEAVVSWQKVEEVKPLEGRRYHIYENGTLQINRTTEEDAGSYSCWVENAIGKTAVTANLDIRNATKLRVSPKNPRIPKLHMLELHCESKCDSHLKHSLKLSWSKDGEAFEINGTEDGRIIIDGANLTISNVTLEDQGIYCCSAHTALDSAADITQVTVLDVPDPPENLHLSERQNRSVRLTWEAGADHNSNISEYIVEFEGNKEEPGRWEELTRVQGKKTTVILPLAPFVRYQFRVIAVNEVGRSQPSQPSDHHETPPAAPDRNPQNIRVQASQPKEMIIKWEPLKSMEQNGPGLEYRVTWKPQGAPVEWEEETVTNHTLRVMTPAVYAPYDVKVQAINQLGSGPDPQSVTLYSGEDYPDTAPVIHGVDVINSTLVKVTWSTVPKDRVHGRLKGYQINWWKTKSLLDGRTHPKEVNILRFSGQRNSGMVPSLDAFSEFHLTVLAYNSKGAGPESEPYIFQTPEGVPEQPTFLKVIKVDKDTATLSWGLPKKLNGNLTGYLLQYQIINDTYEIGELNDINITTPSKPSWHLSNLNATTKYKFYLRACTSQGCGKPITEESSTLGEGKYAGLYDDISTQGWFIGLMCAIALLTLLLLTVCFVKRNRGGKYSVKEKEDLHPDPEIQSVKDETFGEYSDSDEKPLKGSLRSLNRDMQPTESADSLVEYGEGDHGLFSEDGSFIGAYAGSKEKGSVESNGSSTATFPLRA

SEQ ID NO: 70636 - protein, 29 aa, Homo sapiens
MKYSCCALVLAVLGTELLGSLCSTVRSPR

SEQ ID NO: 70637 - protein, 253 aa, Homo sapiens
MATSGDCPRSESQGEEPAECSEAGLLQEGVQPEEFVAIADYAATDETQLSFLRGEKILILRQTTADWWWGERAGCCGYIPANHVGKHVDEYDPEDTWQDEEYFGSYGTLKLHLEMLADQPRTTKYHSVILQNKESLTDKVILDVGCGTGIISLFCAHYARPRAVYAVEASEMAQHTGQLVLQNGFADIITVYQQKVEDVVLPEKVDVLVSEWMGTCLLVRAGVRAAGGRSWGASEHGLGWANLRISRVVRDSF

SEQ ID NO: 70638 - protein, 142 aa, Homo sapiens
MSDKLKKDLCYDQNIIPENLPAPTDKCKLKYQQCKTEIKEGYKQYSQRNAENTKSNVTHKQSPRNKIDEKCVQDEEANTDDLTTLDRKAILQQGYADNSCDKQQRARKLDAVSCQHFYLFGNCGCREEETDCCRASDDRPLI

SEQ ID NO: 70639 - protein, 42 aa, Homo sapiens
MTPQSLLQTTLFLLSLLFLVQGAHGRGHREDFRFCSQRNQTH

SEQ ID NO: 70640 - protein, 44 aa, Homo sapiens
MSTPARRRLMRDFKRLQEDPPVGVSGAPSENNIMQWNAVIFGVC

SEQ ID NO: 70641 - protein, 1027 aa, Homo sapiens
MANLLKTVVTGCSCPLLSNLGSCKGLRVKKDFLRTFYTHQELWCKAPVKPGIPYKQLTVGVPKEIFQNEKRVALSPAGVQNLVKQGFNVVVESGAGEASKFSDDHYRVAGAQIQGAKEVLASDLVVKVRAPMVNPTLGVHEADLLKTSGTLISFIYPAQNPELLNKLSQRKTTVLAMDQVPRVTIAQGYDALSSMANIAGAAALEQFKSLGAEPLEVDLKESGEGQGGYAKEMSKEFIEAEMKLFAQQCKEVDILISTALIPGKKAPVLFNKEMIESMKEGSVVVDLAAEAGGNFETTKPGELYIHKGITHIGYTDLPSRMATQASTLYSNNITKLLKAISPDKDNFYFDVKDDFDFGTMGHVIRGTVVMKDGKVIFPAPTPKNIPQGAPVKQKTVAELEAEKAATITPFRKTMSTASAYTAGLTGILGLGIAAPNLAFSQMVTTFGLAGIVGYHTVWGVTPALHSPLMSVTNAISGLTAVGGLALMGGHLYPSTTSQGLAALAAFISSVNIAGGFLVTQRMLDMFKRPTDPPEYNYLYLLPAGTFVGGYLAALYSGYNIEQIMYLGSGLCCVGALAGLSTQGTARLGNALGMIGVAGGLAATLGVLKPGPELLAQMSGAMALGGTIGLTIAKRIQISDLPQLVAAFHSLVGLAAVLTCIAEYIIEYPHFATDAAANLTKIVAYLGTYIGGVTFSGSLIAYGKLQGLLKSAPLLLPGRHLLNAGLLAASVGGIIPFMVDPSFTTGITCLGSVSALSAVMGVTLTAAIGGADMPVVITVLNSYSGWALCAEGFLLNNNLLTIVGALIGSSGAILSYIMCVAMNRSLANVILGGYGTTSTAGGKPMEISGTHTEINLDNAIDMIREANSIIITPGYGLCAAKAQYPIADLVKMLTEQGKKVRFGIHPVAGRMPGQLNVLLAEAGVPYDIVLEMDEINHDFPDTDLVLVIGANDTVNSAAQEDPNSIIAGMPVLEVWKSKQVIVMKRSLGVGYAAVDNPIFYKPNTAMLLGDAKKTCDALQAKVRESYQK

SEQ ID NO: 70642 - protein, 165 aa, Homo sapiens
MALTGASDPSAEAEANGEKPFLLRALQIALVVSLYWVTSISMVFLNKYLLDSPSLRLDTPIFVTFYQCLVTTLLCKGLSALAACCPGAVDFPSLRLDLRVARSVLPLSVVFIGMITFNNLCLKYVGVAFYNVGRSLTTVFNVLLSYLLLKQTTSFYALLTCGIII

SEQ ID NO: 70643 - protein, 191 aa, Homo sapiens
LDWVRLHVCEVDSLSADVLGSENPSKHDSFWNLGRLDEARQMLSKEADASPASAGICRIMGDLMRTMPILSPGNTQTLTELELKWQHWHEECERYLQDSTFATSPHLESLLKIMLGDEAALLEQKELLSNWYHFLVTRLLYSNPTVKPIDLHYYAQSSLDLFLGGESSPEPLDNILLAAFEFDIHQVIKEC

SEQ ID NO: 70644 - protein, 243 aa, Homo sapiens
MAARLLAPPGPDSFKPFTPESLANIERRIAESKLKKPPKADGSHREDDEDSKPKPNSDLEAGKSLPFIYGDIPQGLVAVPLEDFDPYYLTQKTFVVLNRGKTLFRFSATPALYILSPFNLIRRIAIKILIHSVFSMIIMCTILTNCVFMTFSNPPDWSKNVEYTFTGIYTFESLVKIIARGFCIDGFTFLRDPWNWLDFSVIMMAYITEFVNLGNVSALRTFRVLRALKTISVIPGKMVRGWC

SEQ ID NO: 70645 - protein, 94 aa, Homo sapiens
MLLLKKHTEDISSVYEIRERLGSGAFSEVVLAQERGSAHLVALKCIPKKALRGKEALVENEIAVLRRRFLAIAGSVTPTSSLWRMSTRALPTST

SEQ ID NO: 70646 - protein, 55 aa, Homo sapiens
MACLNPVLWETKVLQSKATEDFFRNSIQSPLFTLQLPHSLHQTLQSSTGWIPLHH

SEQ ID NO: 70647 - protein, 286 aa, Homo sapiens
  MOD_RES (1)..(1): Any amino acid
XCLCNLVLSSPVAQMLAAEARLVVKLTERVGLYRERSFPHDVQFFDLRLLFLLTALRTDVRQQLFQELKGVRLLTDTLELTLGVTPEGNPPPTLLPSQETERAMEILKVLFNITLDSIKGEVDEHYPESPRKTPGDQEDAALYRHLGTLLRHCVMIATAGDRTEEFHGHAVNLLGNLPLKCLDVLLTLEPHGDSTEFMGVNMDVIRALLIFLEKRLHKTHRLKESVAPVLSVLTECARMHRPARKFLKAQVLPPLRDVRTRPEVGEMLRNKLVRLMTHLDTDVKRV

SEQ ID NO: 70648 - protein, 94 aa, Homo sapiens
MLPSKKTVRMPSVTQRLRDPDINPCLSESDASTRCLDENNYDRERCSTYFLRYKNCRRFWNSIVMQRRKNGVKPFMPTAAERDEILRAVGNMPY

SEQ ID NO: 70649 - protein, 316 aa, Homo sapiens
MARPQRTPARSPDSIVEVKSKFDAEFRRFALPRASVSGFQEFSRLLRAVHQIPGLDVLLGYTDAHAEADSSGLAFASNSLQRRKKGLLLRPVAPLRTRPPLLISLPQDFRQVSSVIDVDLLPETHRRVRLHKHGSDRPLGFYIRDGMSVRVAPQGLERVPGIFISRLVRGGLAESTGLLAVSDEILEVNGIEVAGKTLDQVTDMMVANSHNLIVTVKPANQRNNVVRGASGRLTGPPSAGPGPAEPDSDDDSSDLVIENRQPPSSNGLSQGPPCWDLHPGCRHPGTRSSLPSLDDQEQASSGWGSRIRGDGSGFSL

SEQ ID NO: 70650 - protein, 276 aa, Homo sapiens
MKQILHPALETTACTNHFNADPCSTGFVFPAMTLFPVLLFLVAGLLPSFPANEDKDPAFTALLTTQTQVQREIVNKHNELRRAVSPPARNMLKMEWNKEAAANAQKWANQCNYRHSNPKDRMTSLKCGENLYMSSASSSWSQAIQSWFDEYNDFDFGVGPKTPNAVVGHYTQVVWYSSYLVGCGNAYCPNQKVLKYYYVCQYCPAGNWANRLYVPYEQGAPCASCPDNCDDGLCTNGCKYEDLYSNCKSLKLTLTCKHQLVRDSCKASCNCSNSIY

SEQ ID NO: 70651 - protein, 104 aa, Homo sapiens
MCAARLAAAAAAAQSVYAFSARPLAGGEPVSLGSLRGKVLLIENVASLCGTTVRDYTQMNELQRRLGPRGLVVLGFPCNQFGHQLLKFLSALGIAHGGQNPGDS

SEQ ID NO: 70652 - protein, 70 aa, Homo sapiens
MGCVQCKDKEATKLTEERDGSLNQSSGYRYGTDPTPQHYPSFGVTSIPNYNNFHAAGGQGLTVFGGVTLF

SEQ ID NO: 70653 - protein, 712 aa, Homo sapiens
MAGVAAHRAHPPFTAHMKNRGLREELEKAVVRGKELGDRLEHLQRELEQAALERQEFLREKESQHQRYQGLEQRLEAELQAAATSKEEALMELKTRALQLEEELFQLRQGPAGLGPKKRAEPQLVETQNVRLIEVERSNAMLVAEKAALQGQLQHLEGQLGSLQGRAQELLLQSQRAQEHSSRLQAEKSVLEIQGQELHRKLEVLEEEVRAARQSQEETRGQQQALLRDHKALAQLQRRQEAELEGLLVRHRDLKANMRALELAHRELQGRHEQLQAQRASVEAQEVALLAERERLMQDGHRQRGLEEELRRLQSEHDRAQMLLAELSRERGELQGERGELRGRLARLELERAQLEMQSQQLRESNQQLDLSACRLTTQCELLTQLRSAQEEENRQLLAEVQALSRENRELLERSLESRDHLHREQREYLDQLNALRREKQKLVEKIMDQYRVLEPVPLPRTKKGSWLADKGPLPRHPCAGPRAPSACGMRPWQAGSGGNSAQGSRWGEALSHSALGTPLGNDSDSAIQAPWGRPSPTAKDLVWDGRTPLRPCRNTKQMPTERALRYRNRRNVPSPHPSASDTVGTAGLGVQPSRHWSVSGGPRQPKSSGSQGPQGESLDKEAWALRSSTVSAGARRWSWDECVDRGDGWPPRAAPGWSSGSSRWLPLRQRSLGDPPAEGGWQELAREPPALSRWEAESQCWGTVAWADLEP

SEQ ID NO: 70654 - protein, 98 aa, Homo sapiens
MALRLLKLAATSASARVVAAGAQRVRGIHSSVQCKLRYGMWHFLLGDKASKRLTERSRVITVDGNICTGKGKLAKEIAEKLASEIEPRMVLTHRWVYS

SEQ ID NO: 70655 - protein, 20 aa, Homo sapiens
  MOD_RES (1)..(1): Any amino acid
XDNYGQNFVFGPGTRLSVLP

SEQ ID NO: 70656 - protein, 202 aa, Homo sapiens
MRMTMEEMKNEAETTSMVSMPLYAVMYPVFNELERVNLSAAQTLRAAFIKAEKENPGLTQDIIMKILEKKSVEVNFTESLLRMAADDVEEYMIERPEPEFQDLNEKARALKQILSKIPDEINDRVRFLQTIKDIASAIKELLDTVNNVFKKYQYQNRRALEHQKKEFVKYSKSFSDTLKTYFKDGKAINVFVSANRLIHQTN

SEQ ID NO: 70657 - protein, 619 aa, Homo sapiens
SRMVQNEIPYFIWTTRRDVLDCRFLSKDQMINHYARAGSFTTKVGLCLNLRNLPWFDEVDANSFFPRCYCLGAEDDKKAFIEDFWLTAARNVLKLVVKSEWKSYPIQAVEEEASGDKQPKKQEKNPVLVSPEFVDEALCACEEYLSNLAHMDIDKDLEAPLYLTPEGWSLFLQRYYQVVHEGAELRHLDTQVQRCEDILQQLQAVVPQIDMEGDRNIWIVKPGAKSRGRGIMCMDHLEEMLKLVNGNPVVMKDGKWVVQKYIERPLLIFGTKFDLRQWFLVTDWNPLTVWFYRDSYIRFSTQPFSLKNLDNSVHLCNNSIQKHLENSCHRHPLLPPDNMWSSQRFQAHLQEMGAPNAWSTIIVPGMKDAVIHALQTSQDTVQCRKASFELYGADFVFGEDFQPWLIEINASPTMAPSTAVTARLCAGVQADTLRVVIDRMLDRNCDTGAFELIYKQPAVEVPQYVGIRLLVEGFTIKKPMAMCHRRMGVRPAVPLLTQRGSGEGKDSGTPTHSRGIRKFKEVAQGCTAQKGHSWDADPARHHFPSLHTKAQLPSPHVLRHQGQVLRRQHSKLVGTKALSTTGKALRTLPTAKVFISLPPNLDFKVAPSILKPRKVGLDL

SEQ ID NO: 70658 - protein, 302 aa, Homo sapiens
VTEKIPVRHLYTKDIDIHEVRIGWSLTTSGMLLGEEEFSYGYSLKGIKTCNCETEDYGEKFDENDVITCFANFESDEVELSYAKNGQDLGVAFKISKEVLAGRPLFPHVLCHNCAVEFNFGQKEKPYFPIPEEYTFIQNVPLEDRVRGPKGPEEKKDCEVVMMIGLPGAGKTTWVTKHAAENPGKYNILGTNTIMDKMMVAGFKKQMADTGKLNTLLQRAPQCLGKFIEIAARKKRNFILDQTNVSAAAQRRKMCLFAGFQRKAVVVCPKDEDYKQRTQKKAEVEGKDLPEHAVLKMKGMEF

SEQ ID NO: 70659 - protein, 153 aa, Homo sapiens
MEQDNSPRKIQFTVPLLEPHLDPEAAEQIRRRRPTPATLVLTSDQSSPEIDEDRIPNPHLKKLQNASLKLTREAVRNPAQKNPQPIYHHWIPREPTRSERGGGTGGQKSVGGFPCSTHTLAPFYVFTRSILLLKRGERMSHPLEPRDDPTKMP

SEQ ID NO: 70660 - protein, 586 aa, Homo sapiens
MKRHEMVDEPPGMCPHFAQDLWPEQGMEDSFQKAILRRYGKYGHENLQLRKGCKSVDEYKVNKEGYNGLNQCFTTAQSKVFQCDKYLKVFYKFLNSNRPKIRHTEKKSFKCKKRVKLFCMLSHKTQHKSIYHREKSYKCKECGKTFNWSSTLTNHRKIYTEEKPYKCEEYNKSPKQLSTLTTHEIIHAGEKLYKCEECGEAFNRSSNLTTHKIIHTGEKPYKCEECGKAFIWSSTLTEHKKIHTRKKPYKCEECGKAFIWSSTLTRHKRMHTGEKPYKCEECGKAFSQSSTLTTHKIIHTGEKRYKCLECGKAFKQLSTLTTHKIIHVGEKLYKCEECGKGFNRSSNLTTHKIIHTGEKPYKCEECGKAFIWSSTLTKHKRIHTREKPYKCEECGKAFIWSSTLTRHKRMHTGEKPYKCEECGKSFSQSSTLTTHKIIHTGEKPYKCEECGKAFNWSSTLTKHKIIHTEEKPYKCEKCGKAFKQSSILTNHKRIHTGEKPYKCEECGKSFNRSSTFTKHKVIHTGVKPYKCEECGKAFFWSSTLTKHKRIHTGEQPYKWEKFGKAFNRSSHLTTDKITHWREILQV

SEQ ID NO: 70661 - protein, 1700 aa, Homo sapiens
MTSAQCPALACVMSPLRFWGPWPLLMWQLLWLLVKEAQPLEWVKDPLQLTSNPLGPPEPWSSHSSHFPRESPHAPTLPADPWDFDHLGPSASSEMPAPPQESTENLVPFLDTWDSAGELPLEPEQFLASQQDLKDKLSPQERLPVSPKKLKKDPAQRWSLAEIIGIIRQLSTPQSQKQTLQNEYSSTDTPYPGSLPPELRVKSDEPPGPSEQVGPSQFHLEPETQNPETLEDIQSSSLQQEAPAQLPQLLEEEPSSMQQEAPALPPESSMESLTLPNHEVSVQPPGEDQAYYHLPNITVKPADVEVTITSEPTNETESSQAQQETPIQFPEEVEPSATQQEAPIEPPVPPMEHELSISEQQQPVQPSESPREVESSPTQQETPGQPPEHHEVTVSPPGHHQTHHLASPSVSVKPPDVQLTIAAEPSAEVGTSLVHQEATTRLSGSGNDVEPPAIQHGGPPLLPESSEEAGPLAVQQETSFQSPEPINNENPSPTQQEAAAEHPQTAEEGESSLTHQEAPAQTPEFPNVVVAQPPEHSHLTQATVQPLDLGFTITPESKTEVELSPTMKETPTQPPKKVVPQLRVYQGVTNPTPGQDQAQHPVSPSVTVQLLDLGLTITPEPTTEVGHSTPPKRTIVSPKHPEVTLPHPDQVQTQHSHLTRATVQPLDLGFTITPKSMTEVEPSTALMTTAPPPGHPEVTLPPSDKGQAQHSHLTQATVQPLDLELTITTKPTTEVKPSPTTEETSTQPPDLGLAIIPEPTTETGHSTALEKTTAPRPDRVQTLHRSLTEVTGPPTELEPAQDSLVQSESYTQNKALTAPEEHKASTSTNICELCTCGDEMLSCIDLNPEQRLRQVPVPEPNTHNGTFTILNFQGNYISYIDGNVWKAYSWTEKLILRENNLTELHKDSFEGLLSLQYLDLSCNKIQSIERHTFEPLPFLKFINLSCNVITELSFGTFQAWHGMQFLHKLILNHNPLTTVEDPYLFKLPALKYLDMGTTLVPLTTLKNILMMTVELEKLILPSHMACCLCQFKNSIEAVCKTVKLHCNSACLTNTIHCPEEASVGNPEGAFMKVLQARKNYTSTELIVEPEEPSDSSGINLSGFGSEQLDTNDESDFISTLRYILPYFSAVNLDVKSLLLPLIKLPTTGNSLAKIQTVGQNRQRVKRVLMGPRSIQKRHFKEVGRQSIRREQGAQASVENAAEEKRLGSPAPREVEQPHTQQGPEKLAGNAVYTKPSFTQEHKAAVSVLKPFSKGAPSTSSPAKALPQVRDRWKDLTHAISILESAKARVTNTKTSKPIVHARKKYRFHKTRSHVTHRTPKVKKSPKVRKKSYLSRLMLANRLPFSAAKSLINSPSQGAFSSLGDLSPQENPFLEVSAPSEHFIEKNNTKHTTARNAFEENDFMENTNMPEGTISENTNYNHPPEADSAGTAFNLGPTVKQTETKWEYNNVGTDPSPEPKSFNYPLLSSPGDQFEIQLTQQLQSLIPNNNVRRLIAHVIRTLKMDCSGAHVQVTCAKLISRTGHLMKLLSGQQEVKASKIEWDTDQWKIENYINESTEAQSEQKEKSLELKKEVPGYGYTDKLILALIVTGILTILIILFCLIVICCHRRSLQEDEEGFSRGIFRFLPRRGCSSRRESQDGLSSFGQPLWFKDMYKPLSATRINNHAWKLHKKSSNEDKILNRDPGDSEAPTEEEESEALP

SEQ ID NO: 70662 - protein, 104 aa, Homo sapiens
MHYDGHVRFDLPPQGSVLARNVSTRSCPPRTSPAVDLEEEEEESSVDGKGDRKSTGLKLSKKKARRRHTDDPSKECFTLKFDLNVDIETEIVPAMKKKSLGEVL

SEQ ID NO: 70663 - protein, 52 aa, Homo sapiens
GLTVCKPGLITCLEQRKEPWNVKRQEAADGHPGCTFFETGIYSVTQAGSAVV

SEQ ID NO: 70664 - protein, 317 aa, Homo sapiens
  MOD_RES (1)..(1): Any amino acid
XFDMVYWTGDIPAHDVWHQTRQDQLRALTTVTALVRKFLGPVPVYPAVGNHESTPVNSFPPPFIEGNHSSRWLYEAMAKAWEPWLPAEALRTLRYLSSVETQEGKRKVHIIGHIPPGHCLKSWSWNYYRIVARYENTLAAQFFGHTHVDEFEVFYDEETLSRPLAVAFLAPSATTYIGLNPGYRVYQIDGNYSGSSHVVLDHETYILNLTQANIPGAIPHWQLLYRARETYGLPNTLPTAWHNLVYRMRGDMQLFQTFWFLYHKGHPPSEPCGTPCRLATLCAQLSARADSPALCRHLMPDGSLPEAQSLWPRPLFC

SEQ ID NO: 70665 - protein, 138 aa, Homo sapiens
MAGQRVLLLVGFLLPGVLLSEAAKILTISTVGGSHYLLMDRVSQILQDHGHNVTMLNHKRGPFMPDFKKEEKSYQVISWLAPEDHQREFKKSFDFFLEETLGGRGKFENLLNVLEYLALQCSHFLNRKDIMDSLKNEN

SEQ ID NO: 70666 - protein, 361 aa, Homo sapiens
MSEREVSTAPAGTDMPAAKKQKLSSDENSNPDLSGDENDDAVSIESGTNTERPDTPTNTPNAPGRKSWGKGKWKSKKCKYSFKCVNSLKEDHNQPLFGVQFNWHSKEGDPLVFATVGSNRVTLYECHSQGEIRLLQSYVDADADENFYTCAWTYDSNTSHPLLAVAGSRGIIRIINPITMQCIKHYVGHGNAINELKFHPRDPNLLLSVSKDHALRLWNIQTDTLVAIFGGVEGHRDEVLSASCENAIVCWKPGKMEDDIDKIKPSESNVTILGRFDYSQCDIWYMRFSMDFWQKMLALGNQVGKLYVWDLEVEDPHKAKCTTLTHHKCGAAIRQTSFSRDSSILIAVCDDASIWRWDRLR

SEQ ID NO: 70667 - protein, 129 aa, Homo sapiens
MESKALLVLTLAVWLQSLTASRGGVAAADQRRDFIDIESKFALRTPEDTAEDTCHLIPGVAESVATCHFNHSSKTFMVIHGWTVTGMYESWVPKLVAALYKREPDSNVIVVDWLSRAQEHYPVSAGYTK

SEQ ID NO: 70668 - protein, 570 aa, Homo sapiens
MLGTLRAMEGEDVEDDQLLQKLRASRRRFQRRMQRLIEKYNQPFEDTPVVQMATLTYETPQGLRIWGGRLIKERNEGEIQCAGNRAGRDVRVTPLPSLASPAVPAPGYCSRISRKSPGDPAKPASSPREWDPLHPSSTDMALVPRNDSLSLQETSSSSFLSSQPFEDDDICNVTISDLYAGMLHSMSRLLSTKPSSIISTKTFIMQNWNSRRRHRYKSRMNKTYCKGARRSQRSSKENFIPCSEPVKGTGALRDCKNVLDVSCRKTGLKLEKAFLEVNRPQIHKLDPSWKERKVTPSKYSSLIYFDSSATYNLDEENRFRTLKWLISPVKIVSRPTIRQGHGENRQREIEIRFDQLHREYCLSPRNQPRRMCLPDSWAMNMYRGGPASPGGLQGLETRRLSLPSSKAKAKSLSEAFENLGKRSLEAGRCLPKSDSSSSLPKTNPTHSATRPQQTSDLHVQGNSSGIFRKSVSPSKTLSVPDKEVPGHGRNRYDEIKEEFDKLHQKYCLKSPGQMTVPLCIGVSTDKASMEVRYQTEGFLGKLNPDPHFQGFQKLPSSPLGCRKSLLGSTA

SEQ ID NO: 70669 - protein, 13 aa, Homo sapiens
MEKLTFYAVSAPE

SEQ ID NO: 70670 - protein, 53 aa, Homo sapiens
MPVRGPDVEAYCLRCECKYEERSSVTIKVTIIIYLSILGLLLLYMVYLTLVEP

SEQ ID NO: 70671 - protein, 1194 aa, Homo sapiens
MGKEQELLEAARTGHLPAVEKLLSGKRLSSGFGGGGGGGSGGGGGGSGGGGGGLGSSSHPLSSLLSMWRGPNVNCVDSTGYTPLHHAALNGHKDVVEVLLRNDALTNVADSKGCYPLHLAAWKGDAQIVRLLIHQGPSHTRVNEQNALEIKELKKYGPFDPYINAKNNDNETALHCAAQYGHTEVVKVLLEELTDPTMRNNKFETPLDLAALYGRLEVVKMLLNAHPNLLSCNTKKHTPLHLAARNGHKAVVQVLLDAGMDSNYQTEMGSALHEAALFGKTDVVQILLAAGTDVNIKDNHGLTALDTVRELPSQKSQQIAALIEDHMTGKRSTKEVDKTPPPQPPLISSMDSISQKSQGDVEKAVTELIIDFDANAEEEGPYEALYNAISCHSLDSMASGRSSDQDSTNKEAEAAGVKPAGVRPRERPPPPAKPPPDEEEEDHIDKKYFPLTASEVLSMRPRIHGSAAREEDEHPYELLLTAETKKVVLVDGKTKDHRRSSSSRSQDSAEGQDGQVPEQFSGLLHGSSPVCEVGQDPFQLLCTAGQSHPDGSPQQGACHKASMQLEETGVHAPGASQPSALDQSKRVGYLTGLPTTNSRSHPETLTHTASPHPGGAEEGDRSGARSRAPPTSKPKAELKLSRSLSKSDSDLLTCSPTEDATMGSRSESLSNCSIGKKRLEKSPSFASEWDEIEKIMSSIGEGIDFSQERQKISGLRTLEQSVGEWLESIGLQQYESKLLLNGFDDVHFLGSNVMEEQDLRDIGISDPQHRRKLLQAARSLPKVKALGYDGNSPPSVPSWLDSLGLQDYVHSFLSSGYSSIDTVKNLWELELVNVLKVQLLGHRKRIIASLADRPYEEPPQKPPRFSQLRCQDLLSQTSSPLSQNDSCTGRSADLLLPPGDTGRRRHDSLHDPAAPSRAERFRIQEEHREAKLTLRPPSLAAPYAPVQSWQHQPEKLIFESCGYEANYLGSMLIKDLRGTESTQDACAKMRKSTEHMKKIPTIILSITYKGVKFIDASNKNVIAEHEIRNISCAAQDPEDLCTFAYITKDLQTSHHYCHVFSTVDVNLTYEIILTLGQAFEVAYQLALQAQKSRATGASAAEMIETKSSKPVPKPRVGVRKSAVPLPPDSRCCYCHTCTTHRPSYLPLPSVSPGVKLEPPDMDQDAQSHASVSWVVDPKPDSKRSLSTKYETTIF

SEQ ID NO: 70672 - protein, 216 aa, Homo sapiens
MILASVLRSGPGGGLPLRPLLGPALALRARSTSATDTHHVEMARERSKTVTSFYNQSAIDAAAEKPSVRLTPTMMLYAGRSQDGSHLLKSARYLQQELPVRIAHRIKGFRCLPFIIGCNPTILHVKLTDFPPIKDQADEAQYCQLVRQLLDDHKDVVTLLAEGLRESRKHIEDEKLVRYFLDKTLTSRLGIRMLATHHLALHEDKPDFVGIICTRL

SEQ ID NO: 70673 - protein, 93 aa, Homo sapiens
WWTAPPVIYYVPDFISKEEEEYLLRQVFNAPKPKWTQLSGRKLQNWGPHCLPQVGFLIPEGWFLSGCPHGSSATWTKCQTSASLEASQLTMSS

SEQ ID NO: 70674 - protein, 293 aa, Homo sapiens
MDTMMLNVRNLFEQLVRRVEILSEGNEVQFIQLAKDFEDFRKKWQRTDHELGKYKDLLMKAETERSALDVKLKHARNQVDVEIKRRQRAEADCEKLERQIQLIREMLMCDTSGSIQLSEEQKSALAFLNRGQPSSSNAGNKRLSTIDESGSILSDISFDKTDESLDWDSSLVKTFKLKKREKRRSTSRQFVDGPPGPVKKTRSIGSAVDQGNESIVAKTTVTVPNDGGPIEAVSTIETVPYWTRSRRKTGTLQPWNSDSTLNSRQLEPRTETDSVGTPQSNGGMRLHDFVSKT

SEQ ID NO: 70675 - protein, 142 aa, Homo sapiens
MASATAPAAAVPTLASPLEQLRHLAEELRLLLPRVRVGEAQETTEEFNREMFWRRLNEAAVTVSREATTLTIVFSQLPLPSPQETQKFCEQVHAAIKAFIAVYYLLPKDQALRTMTLFPTTVSGLRASRCLRYQEITKLQLF

SEQ ID NO: 70676 - protein, 54 aa, Homo sapiens
MGLLSQGSPLSWEETKRHADHVRRHGILQFLHIYHAVKDRHKDVLKWGDEVTNL

SEQ ID NO: 70677 - protein, 54 aa, Homo sapiens
  MOD_RES (1)..(1): Any amino acid
XDGFLVLEGFLSAEECVAMQQRIGEIVAEMDVPLHCRTEFSTQEEEQLRAQAQL

SEQ ID NO: 70678 - protein, 210 aa, Homo sapiens
GDHRVELYKVLSSLGYHVVTFDYRGWGDSVGTPSERGMTYDALHVFDWIKARSGDNPVYIWGHSLGTGVATNLVRRLCERETPPDALILESPFTNIREEAKSHPFSVIYRYFPGFDWFFLDPITSSGIKFANDENVKHISCPLLILHAEDDPVVPFQLGRKLYSIAAPARSFRDFKVQFVPFHSDLGYRHKYIYKSPELPRILRGLKLVA

SEQ ID NO: 70679 - protein, 38 aa, Homo sapiens
MNGGKECDGGDKEGGLPAIQVPVGWQRRVDQNGVLYVR

SEQ ID NO: 70680 - protein, 198 aa, Homo sapiens
MAEDKETKHGGHKNGRKGGLSGTSFFTWFMVIALLGVWTSVAVVWFDLVDYEEVLGKLGIYDADGDGDFDVDDAKVLLGLKERSTSEPAVPPEEAEPHTEPEEQVPVEAEPQNIEDEAKEQIQSLLHEMVHAEHETEHSYHVEETDSSEPVVEDERLHHDTDDVTYQVYEEQAVYEPLENEGIEITEVTAPPEDNPVE

SEQ ID NO: 70681 - protein, 57 aa, Homo sapiens
MTKVPATKKLQSSPNSGAVRPFYASENLRQVPDKPMKSIKYMDKEIINLKKDLIRSR

SEQ ID NO: 70682 - protein, 114 aa, Homo sapiens
MLARKSIIPEEYVLARIAAENLRKPRIRDRLPKARFIAKSGACNLAHKNIREQGRFLQDIFTTLVDLKWRHTLVIFTMSFLCSWLLFAIMWWLVAFAHGDIYAYMEKSGMEKSG

SEQ ID NO: 70683 - protein, 236 aa, Homo sapiens
MSVIFFACVVRVRDGLPLSASTDFYHTQDFLEWRRRLKSLALRLAQYPGRGSAEGCDFSIHFSSFGDVACMAICSCQCPAAMAFCFLETLWWEFTASYDTTCIGLASRPYAFLEFDSIIQKVKWHFNYVSSSQMECSLEKIQEELKLQPPAVLTLEDTDVANGVMNGHTPMHLEPAPNFRMEPVTALGILSLILNIMCAALNLIRGVHLAEHSLQVAHEEIGNILAFLVPFVACIF

SEQ ID NO: 70684 - protein, 59 aa, Homo sapiens
MRALWVLGLCCVLLTFGSVRADDEVDVDGTVEEDLGKSREGSRTDDEVVQRKKLFSWMD

SEQ ID NO: 70685 - protein, 394 aa, Homo sapiens
MANMQGLVERLERAVSRLESLSAESHRPPGNCGEVNGVIAGVAPSVEAFDKLMDSMVAEFLKNSRILAGDVETHAEMVHSAFQAQRAFLLMASQYQQPHENDVAALLKPISEKIQEIQTFRERNRGSNMFNHLSAVSESIPALGWIAVSPKPPPLPPPGPPPLFENEGKKEESSPSRSALFAQLNQGEAITKGLRHVTDDQKTYKNPSLRAQGGQTQSPTKSHTPSPTSPKSYPSQKHAPVLELEGKKWRVEYQEDRNDLVISETELKQVAYIFKCEKSTIQIKGKVNSIIIDNCKKLGLVFDNVVGIVEVINSQDIQIQVMGRVPTISINKTEGCHIYLSEDALDCEIVSAKSSEMNILIPQDGDYREFPIPEQFKTAWDGSKLITEPAEIMA

SEQ ID NO: 70686 - protein, 67 aa, Homo sapiens
MYALWRTGPTTSPALLTLLSKGVPRPAAPWTMSPSSVALICLLRYGQLLEQSRHSWVNTTALITGCT

SEQ ID NO: 70687 - protein, 400 aa, Homo sapiens
NKSTSTPTSPGPRTHSTPSIPVLTAGQSGLYSPQYISYIPQIHMGPAVQAPQMYPYPVSNSVPGQQGKYRGAKGSLPPQRSDQHQPASAPPMMQAAAAAGPPLVAATPYSSYIPYNPQQFPGQPAMMQPMAHYPSQPVFAPMLQSNPRMLTSGSHPQAIVSSSTPQYPSAEQPTPQALYATVHQSYPHHATQLHAHQPQPATTPTGSQPQSQHAAPSPVQHQAGQAPHLGSGQPQQNLYHPGALTGTPPSLPPGPSAQSPQSSFPQPAAVYAIHHQQLPHGFTNMAHVTQAHVQTGITAAPPPHPGAPHPPQVMLLHPPQSHGGPPQGAVPQSGVPALSASTPSPYPYIGHPQGEQPGQAPGFPGGADDRIREFSLAGGIWHGRAEGLQVGQDARVLGGE

SEQ ID NO: 70688 - protein, 230 aa, Homo sapiens
MSDEDDLEDSEPDQDDSEKEEDEKETEEGEDYRKEGEEFPEEWLPTPLTEDMMKEGLSLLCKTGNGLAHAYVKLEVKERDLTDIYLLRSYIHLRYVDISENHLTDLSPLNYLTHLLWLKADGNRLRSAQMNELPYLQIASFAYNQITDTEGISHPRLETLNLKGNSIHMVTGLDPEKLISLHTVELRGNQLESTLGINLPKLKNLYLVAHWVRGWCREEGTVLGVRMPAF

SEQ ID NO: 70689 - protein, 93 aa, Homo sapiens
MTEEACRTRSQKRALERDPTEDDVESKKIKMERGLLASDLNTDGDMRVTPEPGAGPTQGLLRATEATAMAMGRGEGLVGDGPVDMRTSHSDMK

SEQ ID NO: 70690 - protein, 157 aa, Homo sapiens
MAGGEDRGDGEPVSVVTVRVQYLEDTDPFACANFPEPRRAPTCSLDGALPLGAQIPAVHRLLGAPLKLEDCALQVSPSGYYLDTELSLEEQREMLEGFYEEISKGRKPTLILRTQLSVRVNAILGFYTLPFAEKLYSSSGPELRRSLFSLKQIFQRG

SEQ ID NO: 70691 - protein, 116 aa, Homo sapiens
MNEQHAKVYEQLDVTARELEETNQKLVADSKASQQKILSLTETIECLQTNIDHLQSQVEELKSSGQGRRSPGKCDQEKPAPSFACLKELYDLRQHFVYDHVFAEKITSLQGQPSPD

SEQ ID NO: 70692 - protein, 217 aa, Homo sapiens
MVPVHQQFLSKQHNVKPSNILVNSRGEIKLCDFGVSGQLIDSMANSFVGTRSYMSPERLQGTHYSVQSDIWSMGLSLVEMAVGRYPIPPPDAKELELMFGCQVEGDAAETPPRPRTPGRPLSSYGMDSRPPMAIFELLDYIVNEPPPKLPSGVFSLEFQDFVNKCLIKNPAERADLKQLMVHAFIKRSDAEEVDFAGWLCSTIGLNQPSTPTHAAGV

SEQ ID NO: 70693 - protein, 178 aa, Homo sapiens
RSQGCSREASPSRLSVARSSRIPRPSVSQGCSREASRESSRDTSPVRSFQPLASRHHSRSTGALYAPEVYGASGPGYGISQSSRLSSSVSAMRVLNTGSDVEEAVADALLLGDIRTKKKPARRRYESYGMHSDDDANSDASSACSERSYSSRNGSIPTYMRQTEDVAEVLNRCASSNW

SEQ ID NO: 70694 - protein, 184 aa, Homo sapiens
MRSMKALQKALSRAGSHCGRGGWGHPSRSPLLGGGVRHHLSEAAAQGRETPHSHQPQHQDHDSSESGMLSRLGDLLFYTIAEGQERIPIHKFTTALKATGLQTSDPRLRDCMSEMHRVVQESSSGGLLDRDLFRKWTVTKQRSLILCCSISTKWLGMNTWVSAMPHSSQRRKQGIGIMPSAIIS

SEQ ID NO: 70695 - protein, 33 aa, Homo sapiens
MPSPGTVCSLLLLGMLWLDLAMAGSSFLSPEHQ

SEQ ID NO: 70696 - protein, 219 aa, Homo sapiens
MLRVLCLLRPWRPLRARGCASDGAAGGSEIQVRALAGPDQGITEILMNRPSARNALGNVFVSELLETLAQLREDRQVRVLLFRSGVKGVFCAGADLKEREQMSEAEVGVFVQRLRGLMNDIASSAVMGLIETTRGLLPGAGGTQRLPRCLGVALAKELIFTGRRLSGTEAHVLGLVNHAVAQNEEGDAAYQRARALAQEILPQVDIASGMAIEGMCYAQ

SEQ ID NO: 70697 - protein, 118 aa, Homo sapiens
AAAEVAGQFVIKLTHDVELNLDYERYNSQLLSFVRDLNQYRADIKEMGLSLQWLYSARGDFFRATSRLTTDFGNAEKTDRFVMKKLNDRVMREGPQMMLLLTDARPSNHFLSPLLSLH

SEQ ID NO: 70698 - protein, 67 aa, Homo sapiens
ATGSNEIIEPVYFYIGIVFGLQGIYVTALFVTSWLMSGTWLAGMLTVAWFVINRAACNLAAGLPYSE

SEQ ID NO: 70699 - protein, 196 aa, Homo sapiens
  MOD_RES (1)..(1): Any amino acid
XNNAFRVYRMLPLSERPSKKGKKPKTEKEDKVKHIKQEPVESSLGLSNGVSDLSPEYAVLTSTIKNEVDSTVNIIALNFCCVYGDFCFWETEEASSMLNCPDRPPLASCRVVGQSHLDSNIENQEIVTNPPDICQVVEVTTESDEQPVSMSELYPLQISPVSSYAESETTDSVPSDEESAEGRPHWRKRNIEGKQY

SEQ ID NO: 70700 - protein, 98 aa, Homo sapiens
MDMGTSALSKKPWWTLPQNFHAPMVFHMEEDQEELIFGHGDTYLRCIEVHSHTLIQLESWFTATGQTRVTVVGPHRARQWLLHMFCCVGSQDSYHHAR

SEQ ID NO: 70701 - protein, 324 aa, Homo sapiens
MPILLQGHERSITQIKYNREGDLLFTVAKDPIVNVWYSVNGERLGTYMGHTGAVWCVDADWDTKHVLTGSADNSCRLWDCETGKQLALLKTNSAVRTCGFDFGGNIIMFSTDKQMGYQCFVSFFDLRDPSQIDNNEPYMKIPCNDSKITSAVWGPLGECIIAGHESGELNQYSAKSGEVLVNVKEHSRQINDIQLSRDMTMFVTASKDNTAKLFDSTTLEHQKTFRTERPVNSAALSPNYDHVVLGGGQEAMDVTTTSTRIGKFEARFFHLAFEEEFGRVKGHFGPINSVAFHPDGKSYSSGGEDGYVRIHYFDPQYFEFEFEA

SEQ ID NO: 70702 - protein, 105 aa, Homo sapiens
MKGWGWLALLLGALLGTAWARRSQDLHCGACRALVDELEWEIAQVDPKKTIQMGSFRINPDGSQSVVENASCLVLAARHASASSTNLKDILADLIPKEQARIKTF

SEQ ID NO: 70703 - protein, 202 aa, Homo sapiens
  MOD_RES (1)..(1): Any amino acid
XQCLLGLRTFVAFAAKLWSFFIYLLRRQIRTVIQYQTVRYDILPLSPVSRNRLAQVKRKILVLDLDETLIHSHHDGVLRPTVRPGTPPDFILKVSQWYELVVFTASMEIYGSAVADKLDNSRSILKRRYYRQHCTLELGSYIKDLSVVHSDLSSIVILDNSPGAYRSHPDNAIPIKSWFSDPSDTALLNLLPMLDALRFTAD

SEQ ID NO: 70704 - protein, 188 aa, Homo sapiens
MTTETGPDSEVKKAQEEAPQQPEAAAAVTTPVTPAGHGHPEANSNEKHPSQQDTRPAEQSLDMEEKDYSEADGLSERTTPSKAQKSPQKIAKKYKSAICRVTLLDASEYECEVEKHGRGQVLFDLVCEHLNLLEKDYFGLTFCDADSQKNWLDPSKEIKKQIRSSPWNFAFTVKFYPPDPAQLTEDIT

SEQ ID NO: 70705 - protein, 418 aa, Homo sapiens
  MOD_RES (1)..(1): Any amino acid
XERPYKCDFPGCEKTFITVSALFSHNRAHFREQELFSCSFPGCSKQYDKACRLKIHLRSHTGERPFICDSDSCGWTFTSMSKLLRHRRKHDDDRRFTCPVEGCGKSFTRAEHLKGHSITHLGTKPFECPVEGCCARFSARSSLYIHSKKHVQDVGAPKSRCPVSTCNRLFTSKHSMKAHMVRQHSRRQDLLPQLEAPSSLTPSSELSSPGQSELTNMDLAALFSDTPANASGSAGGSDEALNSGILTIDVTSVSSSLGGNLPANNSSLGPMEPLVLVAHSDIPPSLDSPLVLGTAATVLQQGSFSVDDVQTVSAGALGCLVALPMKNLSDDPLALTSNSNLAAHITTPTSSSTPRENASVPELLAPIKVEPDSPSRPGAVGQQEGSHGLPQSTLPSPAEQHGAQDTELSAGTGNFYLV

SEQ ID NO: 70706 - protein, 102 aa, Homo sapiens
  MOD_RES (1)..(1): Any amino acid
XVCLESAHPRMGVGCRLSRALLTAVTNVLIFFWCLAFLWGLLILLKYRWRKLEEEEQAMYEMVKKIIDVVQDHYVDWEQDMERYPYVGILHVRDSLIPPQSR

SEQ ID NO: 70707 - protein, 92 aa, Homo sapiens
MDCYRTSLSSSWIYPTVILCLFGFFSMMRPSEPFLIPYLSGPDKNLTSAEITNEIFPVWTYSYLVLLLPVFVLTDYVRYKPVIILQGWNAMA

SEQ ID NO: 70708 - protein, 380 aa, Homo sapiens
MEQPPAPKSKLKKLSEDSLTKQPEEVFDVLEKLGEGSYGSVFKAIHKESGQVVAIKQVPVESDLQEIIKEISIMQQCDSPYVVKYYGSYFKNTDLWIVMEYCGAGSVSDIIRLRNKTAIFMIPTNPPPTFRKPELWSDDFTDFVKKCLVKNPEQRATATQLLQHPFIKNAKPVSILRDLITEAMEIKAKRHEEQQRELEEEEENSDEDELDSHTMVKTSVESVGTMRATSTMSEGAQTMIEHNSTMLESDLGTMVINSEDEEEEDGTMKRNATSPQVQRPSFMDYFDKQDFKNKSHENCNQNMHEPFPMSKNVFPDNWKVPQDGDFDFLKNLSLEELQMRLKALDPMMEREIEELRQRYTAKRQPILDAMDAKKRRQQNF

SEQ ID NO: 70709 - protein, 171 aa, Homo sapiens
MNSDDPVVQQKAVLETEKRLLLMEEDQEEDECRTTLNKTMISPPQTAMKSAEEINSEAFLASVEKDAKERAKRRRENKVLADALKEKGNEAFAEGNYETAILRYSEGLEKLKDMKVLYTNRAQAYMKLEDYEKALVDCEWALKCDEKCTKAYFHMGKANLALKNYSVSREC

SEQ ID NO: 70710 - protein, 163 aa, Homo sapiens
  MOD_RES (1)..(1): Any amino acid
XYMFLVKWQDLSEKVVYRRFTEIYEFHKTLKEMFPIEAGAINPENRIIPHLPAPKWFDGQRAAENRQGTLTEYCSTLMSLPTKISRCPHLLDFFKVRPDDLKLPTDNQAPEGGRGRAQWLTRIIPALWKVEDKKARDILDAQRWQEYRDRHHRPHHPADVPRH

SEQ ID NO: 70711 - protein, 151 aa, Homo sapiens
MDLYSTPAAALDRFVARRLQPRKEFVEKARRALGALAAALRERGGRLGAAAPRVLKTVKSYVDQRARRAEILSEMRASLESWWQNPVPGLRLTFPEQSVPGALQFRLTSVDLEDWMDVSLVPAFNVLGEGFLDHSRVGGKRSLGTTQDFQF

SEQ ID NO: 70712 - protein, 1998 aa, Homo sapiens
MANFLLPRGTSSFRRFTRESLAAIEKRMAEKQARGSTTLQESREGLPEEEAPRPQLDLQASKKLPDLYGNPPQELIGEPLEDLDPFYSTQKTFIVLNKGKTIFRFSATNALYVLSPFHPIRRAAVKILVHSLFNMLIMCTILTNCVFMAQHDPPPWTKYVEYTFTAIYTFESLVKILARGFCLHAFTFLRDPWNWLDFSVIIMAYVSENIKLGNLSALRTFRVLRALKTISVIPGLKTIVGALIQSVKKLADVMVLTVFCLSVFALIGLQLFMGNLRHKCVRNFTALNGTNGSVEADGLVWESLDLYLSDPENYLLKNGTSDVLLCGNSSDAGTCPEGYRCLKAGENPDHGYTSFDSFAWAFLALFRLMTQDCWERLYQQTLRSAGKIYMIFFMLVIFLGSFYLVNLILAVVAMAYEEQNQATIAETEEKEKRFQEAMEMLKKEHEALTIRGVDTVSRSSLEMSPLAPVNSHERRSKRRKRMSSGTEECGEDRLPKSDSEDGPRAMNHLSLTRGLSRTSMKPRSSRGSIFTFRRRDLGSEADFADDENSTAGESESHHTSLLVPWPLRRTSAQGQPSPGTSAPGHALHGKKNSTVDCNGVVSLLGAGDPEATSPGSHLLRPVMLEHPPDTTTPSEEPGGPQMLTSQAPCVDGFEEPGARQRALSAVSVLTSALEELEESRHKCPPCWNRLAQRYLIWECCPLWMSIKQGVKLVVMDPFTDLTITMCIVLNTLFMALEHYNMTSEFEEMLQVGNLVFTGIFTAEMTFKIIALDPYYYFQQGWNIFDSIIVILSLMELGLSRMSNLSVLRSFRLLRVFKLAKSWPTLNTLIKIIGNSVGALGNLTLVLAIIVFIFAVVGMQLFGKNYSELRDSDSGLLPRWHMMDFFHAFLIIFRILCGEWIETMWDCMEVSGQSLCLLVFLLVMVIGNLVVLNLFLALLLSSFSADNLTAPDEDREMNNLQLALARIQRGLRFVKRTTWDFCCGLLRQRPQKPAALAAQGQLPSCIATPYSPPPPETEKVPPTRKETRFEEGEQPGQGTPGDPEPVCVPIAVAESDTDDQEEDEENSLGTEEESSKQQESQPVSGGPEAPPDSRTWSQVSATASSEAEASASQADWRQQWKAEPQAPGCGETPEDSCSEGSTADMTNTAELLEQIPDLGQDVKDPEDCFTEGCVRRCPCCAVDTTQAPGKVWWRLRKTCYHIVEHSWFETFIIFMILLSSGALAFEDIYLEERKTIKVLLEYADKMFTYVFVLEMLLKWVAYGFKKYFTNAWCWLDFLIVDVSLVSLVANTLGFAEMGPIKSLRTLRALRPLRALSRFEGMRVVVNALVGAIPSIMNVLLVCLIFWLIFSIMGVNLFAGKFGRCINQTEGDLPLNYTIVNNKSQCESLNLTGELYWTKVKVNFDNVGAGYLALLQVYEEQPQWEYNLYMYIYFVIFIIFGSFFTLNLFIGVIIDNFNQQKKKLGGQDIFMTEEQKKYYNAMKKLGSKKPQKPIPRPLNKYQGFIFDIVTKQAFDVTIMFLICLNMVTMMVETDDQSPEKINILAKINLLFVAIFTGECIVKLAALRHYYFTNSWNIFDFVVVILSIVGTVLSDIIQKYFFSPTLFRVIRLARIGRILRLIRGAKGIRTLLFALMMSLPALFNIGLLLFLVMFIYSIFGMANFAYVKWEAGIDDMFNFQTFANSMLCLFQITTSAGWDGLLSPILNTGPPYCDPTLPNSNGSRGDCGSPAVGILFFTTYIIISFLIVVNMYIAIILENFSVATEESTEPLSEDDFDMFYEIWEKFDPEATQFIEYSVLSDFADALSEPLRIAKPNQISLINMDLPMVSGDRIHCMDILFAFTKRVLGESGEMDALKIQMEEKFMAANPSKISYEPITTTLRRKHEEVSAMVIQRAFRRHLLQRSLKHASFLFRQQAGSGLSEEDAPEREGLIAYVMSENFSRPLGPPSSSSISSTSFPPSYDSVTRATSDNLQVRGSDYSHSEDLADFPPSPDRDRESIV

SEQ ID NO: 70713 - protein, 74 aa, Homo sapiens
MASRVLSAYVSRLPAAFAPLPRVRMLAVARPLSTALCSAGTQTRLGTLQPALVLAQHLLPVSRTPGSNSRKQAK

SEQ ID NO: 70714 - protein, 186 aa, Homo sapiens
MPWLAVPYTDEARRSRLNRLYGIQGIPTLIMLDPQGEVITRQGRVEVLNDEDCREFPWHPKPVLELSDSNAAQLNEGPCLVLFVDSEDDGESEAAKQLIQPIAEKIIAKYKAKEEEAPLLFFVAGEDDMTDSLRDYTNLPEAAPLLTILDMSARAKYVMDVEEITPAIVEAFVNDFLAEKLKPEPI

SEQ ID NO: 70715 - protein, 29 aa, Homo sapiens
MPIMGSSVYITVELAIAVLAILGNVLVCW

SEQ ID NO: 70716 - protein, 118 aa, Homo sapiens
MQKFFGLPQTGDLDQNTIETMRKPRCGNPDVANYNFFPRKPKWDKNQITYRIIGYTPDLDPETVDDAFARAFQVWSDVTPLRFSRIHDGEADIMINFGRWEHGDGYPFDGKDGLLAHA

SEQ ID NO: 70717 - protein, 138 aa, Homo sapiens
MSRSQVALLGLSLLLMLLLYVGLPGPPEQTSCLWGDPNVTVLAGLTPGNSPIFYREVLPLNQAHRVEVVLLHGKAFNSHTWEQLGTLQLLSQRGYRAVALDLPAHHAQRHDQQGSRGGAPIGDALPPVPAYPHCPAQA

SEQ ID NO: 70718 - protein, 13 aa, Homo sapiens
  MOD_RES (1)..(1): Any amino acid
XLLNLLTAHQNSL

SEQ ID NO: 70719 - protein, 108 aa, Homo sapiens
MSRRRISCKDLGHADCQGWLYKKKEKGSFLSNKWKKFWVILKGSSLYWYSNQMAEKADGFVNLPDFTVERASECKKKHAFKISHPQIKTFYFAAENVQEMNVWLNKLG

SEQ ID NO: 70720 - protein, 175 aa, Homo sapiens
MAEVLKGLTCLLLLFAQKRGNVKHLVLFLHEAVLVQYVDTLKLAVPSLIYTLQNNLQYVAISNLPAATFQVTYQLKILTTALFSVLMLNRSLSRLQWASLLLLFTGVAIVQAQQAGGGGPRPLDQNPGAGLAAVVASCLSSGFAGVYFEKILKGSSGSVWLRNLQLGLFGTALGL

SEQ ID NO: 70721 - protein, 43 aa, Homo sapiens
MARTAGDTLDVFTMIDIFKYVIYGIAAAFFVYGILLMVEGFFT

SEQ ID NO: 70722 - protein, 578 aa, Homo sapiens
  MOD_RES (1)..(1): Any amino acid
XDSGPLRIAKTPSPPEEPSPLPSPTASPNHTLAPASPAPARPRSPSQTRKGPPVPPLPKVTPTKELQQENIISFFEDNFVPEISVTTPSQNEVPEVKKEETLLDLDFDPFKPEVTPAGSAGVTHSPMSQTLPWDLWTTSTDLVQPTDSSESLSLCNLIMEETPDSGLAEEIQRSQNDIGAFTWGPDASTDRVSQEVTSGGFGEDSACPSETEQDIRLSTSLLSSADWPTVAEESEHAPGPAFPGGNEQLPPKPAPEAGVAIAACVEMEQLYDPLDSDMPAMDTAGLFKESHEDMKKSDEEEEKQKMEDSLWAGVEACQKASGGSFNGFTQPQDTSLFTMQTDQSMICNLIIPGADADAAVGTLVSAAEGAPGEEAEAEKATVPAGEGVSLEEAKIGTETTEGAESAQPEAEELEATVPQEKVIPSVVIEPASNHEEEGENEITIGAEPKETTEDAAPPGPTSETPELATEQKPIQDPQPTPSAPAMGAADQLASAREASQELPPGFLYKVETLHDFEAANSDELTLQRGDVVLVVPSDSEADQDAGWLVGVKESDWLQYRDLATYKGLFPENFTRRLD

SEQ ID NO: 70723 - protein, 113 aa, Homo sapiens
MAALGRPFSGLPLSGGSDFLQPPQPAFPGRAFPPGADGAELAPRPGPRAVPSSPAGSAARGRCPVRKKRITEAELCAGPNDWILCAHQDVEGHGVNPSVSGLSIPGILDVICE

SEQ ID NO: 70724 - protein, 196 aa, Homo sapiens
MDLSVVRLMFTAFLPDSTGSFTRRLEPVVSDAIYDSKAPNASNLKIVRMDRTAGCVTGGEEIYLLCDKVQKDDIQIRFYEEEENGGVWEGFGDFSPTDVHRQFAIVFKTPKYKDINITKPASVFVQLRRKSDLETSEPKPFLYYPEIKDKEEVQRKRQKLMPNFSDSFGGGSGAGAGGGGMFGSGGGGGGTGSTGP

SEQ ID NO: 70725 - protein, 29 aa, Homo sapiens
SFASLKSGTCACTQTGRAGEAGGLRKAGS

SEQ ID NO: 70726 - protein, 117 aa, Homo sapiens
MDEGGTPLLPDSLVYQIFLSLGPADVLAAGLVCRQWQAVSRDEFLWREQFYRYYQVARDVPRHPAAMSWYEEFQRLYDTVPCVEVQTLREHTDQVLHLSFSHSGYQFASCSKDCTVK

SEQ ID NO: 70727 - protein, 193 aa, Homo sapiens
MHGVCKEGDNCRYSHDLSDSPYSVVCKYFQRGYCIYGDRCRYEHSKPLKQEEATATELTTKSSLAASSSLSSIVGPLVEMNTGEAESRNSNFATVGAGSEDWVNAIEFVPGQPYCGRTAPSCTEAPLQGSVTKEESEKEQTAVETKKQLCPYAAVGECRYGENCVYLHGDSCDMCGLQVLHPMDAAQRSQHIK

SEQ ID NO: 70728 - protein, 307 aa, Homo sapiens
MSKSESPKEPEQLRKLFIGGLSFETTDESLRSHFEQWGTLTDCVVMRDPNTKRSRGFGFVTYATVEEVDAAMNARPHKVDGRVVEPKRAVSREDSQRPGAHLTVKKIFVGGIKEDTEEHHLRDYFEQYGKIEVIEIMTDRGSGKKRGFAFVTFDDHDSVDKIVIQKYHTVNGHNCEVRKALSKQEMASASSSQRGRSGSGNFGGGRGGGFGGNDNFGRGGNFSGRGIGDGYNGFGNDGSNFGGGGSYNDFGNYNNQSSNFGPMKGGNFGGRSSGPYGGGGQYFAKPRNQGGYGGSSSSSSYGSGRRF

SEQ ID NO: 70729 - protein, 32 aa, Homo sapiens
MAYHSFLVEPISCHAWNKDRTRQPVPGEDRVA

SEQ ID NO: 70730 - protein, 200 aa, Homo sapiens
RRLAEDDWTGMESEEENKKDDEEMDIDTVKKLPKHYANQLMLSEWLIDVPSDLGQEWIVVVCPVGKRALIVASRGSTSAYTKSGYCVNRFSSLLPGGNRRNSTAKDYTILDCIYNEVNQTYYVLDVMCWRGHPFYDCQTDFRFYWMHSKLPEEEGLGEKTKLNPFKFVGLKNFPCTPESLCDVLSMDFPFEVTKPLSLLP

SEQ ID NO: 70731 - protein, 60 aa, Homo sapiens
MEEAEERHQVEIKVYKQKVKHLLYEHQNNLTEMKAEGTVVMKLAQKEHRIQESVLRKDMR

SEQ ID NO: 70732 - protein, 370 aa, Homo sapiens
MSLRRHIGNPEYLMKRIPQNPRYQHIKSRLDTGNSMTKYTEKLEEIKKNYRYKKDELFKRLKVTTFAQLIIQVASLSDQTLEVTAEEIQRLEDNDSAASDPDAETTARTNGKGNPGEQSPSPEQFINNAGAGDSSRSTLQSGVGELDLDKGPVKKAEPHTKDKPYPDCPFLLLDVRDRDSYQQCHIVGAYSYPIATLSRTMNPYSNDILEYKNAHGKIIILYDDDERLASQAATTMCERGFENLFMLSGGLKVLAQKFPEGLITGSLPASCQQALPPGSARKRSSPKGPPLPAENKWRFTPEDLKKIEYYLEEEQGPADHPSRLNQANSSGRESKVPGARSAQNLPGGGPASHSNPRSLSSGHLQGKPWK

SEQ ID NO: 70733 - protein, 42 aa, Homo sapiens
  MOD_RES (1)..(1): Any amino acid
XSANISDLKQKYQKLILMVIGFFPPLFGVHTWKDASVTGKFL

SEQ ID NO: 70734 - protein, 185 aa, Homo sapiens
GTSFLVSDQSRFAKEVLPQYFKHSNMASFVRQLNMYGFRKVVSIEQGGLLRPERDHVEFQHPSFVRGREQLLERVRRKVPALRGDDGRWRPEDLGRLLGENEILWREVVTLRQSHGQQHRVIGKLIQCLFGPLQAGPSNAGGKRKLSLMLDEGSSCPTPAKFNTCPLPGALLQDPYFIQSPLPET

SEQ ID NO: 70735 - protein, 81 aa, Homo sapiens
MSISSDEVNFLVYRYLQESGFSHSAFTFGIESHISQSNINGALVPPAALISIIQKGLQYVEAEVSINEDGTLFDGRPIESL

SEQ ID NO: 70736 - protein, 164 aa, Homo sapiens
MMLGTEGGEGFVVKVRGLPWSCSADEVQRFFSDCKIQNGAQGIRFIYTREGRPSGEAFVELESEDEVKLALKKDRETMGHRYVEVFKSNNVEMDWVLKHTGPNSPDTANDGFVRLRGLPFGCSKEEIVQFFSGMSDHRYGDGGSTFQSTTGHCVHMRGLPYRAT

SEQ ID NO: 70737 - protein, 179 aa, Homo sapiens
MWSPQDRKYNSPPTQLSLKPNSQSLRSGNWSERKSHRLPRLPKRHSHDDMLLLAQLSLPSSPSSLNEDSLSTTSELLSSRRARRIPKLVQRINSIYNAKRGKKRLKKLSMSSIETASLRDENSESESDSDDRFKAHTQRLVHIQSMLKRAPSYRTLELELLEWQERELFEYFVVVSLKK

SEQ ID NO: 70738 - protein, 84 aa, Homo sapiens
MLPLLQLVPAKLLNSSCSLEKTLQCSCSFHGIPTPSVQWWMGGVPVGVDGMDGSLQVTSTMLGPWANSTISLTEEPEMGMRLLC

SEQ ID NO: 70739 - protein, 343 aa, Homo sapiens [sequence omitted]

SEQ ID NO: 70740 - protein, 1049 aa, Homo sapiens
MSCQKAVLELNIGSQLGPKSPERTEGVTAFEDYGTGLLENQLSVGDFVKIQKAFESPQPRKIICMSREDFTQKMTEIVGWGTKEEYGELFDKVDVAQDGFINWDKLTSFILLELYEQDERAKATVVPQWKDLEFLPVKHKDTIQKVIFLKNSSHYLTISKEGLLAIWGEHLKLQETFPITSDATKLKHLWVTSLVSLENVNKIAVAFTSKEVCFYDLLSKEEFACQYKLQGLKGTPICMDYWYDPLDANESILSFGDITGKVQAIAFTAALISLFERPASACEDGEATMTINWAELLSGCHKCCHILEHKLHQGDWVRQVTYNASLDAIISSTTSNTNSVVMAWREKSKKRLNMTSFNIAQGIHAFDYHSRLNLIATAGINNKVCLWNPYVVSKPVGVLWGHSASVIAVQFFVERKQLFSFSKDKVLRLWDIQHQLSIQRIACSFPKSQDFRCLFHFDEAHGRLFISFNNQLALLAMKSEASKRVKSHEKAVTCVLYNSILKQVISSDTGSTVSFWMIDTGQKIKQFTGCHGNAEISTMALDANETRLLTGSTDGTVKIWDFNGYCHHTLNVGQDGAVDISQILILKKKILVTGWERYDYASWKTIGRAITVFRPQNFNQFFIQPEEWKGGIQHHDDILCAAFLPPQTLVTGSYDGEIVLWNNSTENAHHVLHPDYQRLLKSKLDTKPQKLLSAGRSQPSHPMADHSTTGVRNFEIDTEGKNAVMRLCFLKARKNTAVTGGANLVSCGGSGYVRFWDIYKKQLLAEFLAHSGVGSIIMSTDKMNRYLTTGDLDGWLKIWNIEEYCLNSSKNKITKAPTLIRSFQPHEDRISSLEMCEPGGQLLIISSSADCSICVTGVCNAPVWIFGQAKHWHIENCLFLPKRDTNLVESEIQKEISLFSKEESCLDPTEHSLLNKKNKDDSTYNVRPSEDINLDIKYKERSTCMKETQKPYYGEVIKKSFSTFRSLNIGALEELPEVNKPAFLLDPEKYFRKEPEEERPQILEAPSLFKTLKAVFDEKNLFPKEILHHERKAKQLCQEKSCEVKKNKK

SEQ ID NO: 70741 - protein, 857 aa, Homo sapiens
MFWRRRKCDVMPIVLVRPTNRTRRLDSTGAGMGPSSHQQQESPLPTITHCAGCTTAWSPCSFNSPDMETPLQFQRGFFPEQPPPPPRSSHLHCQQQQQSQDKPCPPFAPLPHPHHHPHLAHQQPASGGSSPCLRCNSCASSGAPAAGAGDNLSLLLRTSSPGGAFRTRTSSPLSGSSCCCCCCSSRRGSQLNVSELTPSSHASALRQQYAQQSAQQSASASQYHQCHSLQPAASPTGSLGSLGSGPPLSHHHHHPHPAHHQHHQPQARRESNPFTEIAMSSCRYNGGVMRPLSNLSASRRNLHEMDSEAQPLQPPASVGGGGGASSPSAAAAAAAAVSSSAPEIVVSKPEHNNSNNLALYGTGGGGSTGGGGGGGGSGHGSSSGTKSSKKKNQNIGYKLGHRRALFEKRKRLSDYALIFGMFGIVVMVIETELSWGAYDKASLYSLALKCLISLSTIILLGLIIVYHAREIQLFMVDNGADDWRIAMTYERIFFICLEILVCAIHPIPGNYTFTWTARLAFSYAPSTTTADVDIILSIPMFLRLYLIARVMLLHSKLFTDASSRSIGALNKINFNTRFVMKTLMTICPGTVLLVFSISLWIIAAWTVRACERYHDQQDVTSNFLGAMWLISITFLSIGYGDMVPNTYCGKGVCLLTGIMGAGCTALVVAVVARKLELTKAEKHVHNFMMDTQLTKRVKNAAANVLRETWLIYKNTKLVKKIDHAKVRKHQRKFLQAIHQLRSVKMEQRKLNDQANTLVDLAKTQNIMYDMISDLNERSEDFEKRIVTLETKLETLIGSIHALPGLISQTIRQQQRDFIEAQMESYDKHVTYNAERSRSSSRRRRSSSTAPPTSSESS

SEQ ID NO: 70742 - protein, 154 aa, Homo sapiens
MALVRGGWLWRQSSILRRWKRNWFALWLDGTLGYYHDETAQDEEDRVLIHFNVRDIKIGPECHDVQPPEGRSRDGLLTVNLREGGRLHLCAETKDDALAWKTALLEANSTPVRVYSPYQDYYEVVPPNAHEATYVRSYYGPPYAGPGVTHVIVR

SEQ ID NO: 70743 - protein, 152 aa, Homo sapiens
MPNSEPASLLELFNSIATQGELVRSLKAGNASKDEIDSAVKMLVSLKMSYKAAAGEDYKADCPPGNPAPTSNHGPDATEAEEDFVDPWTVQTSSAKGIDYDKLIVRFGSSKIDKELINRIERATGQRPHHFLRRGIFFSHRDMNQVLDAYEN

SEQ ID NO: 70744 - protein, 68 aa, Homo sapiens
NLALVSWNSPQWWWARADLGQQVQFSLWVLRYVVSGGLFVLGLWAPGLRPQSYTLQVHEEDQDVERSQ

SEQ ID NO: 70745 - protein, 321 aa, Homo sapiens
  MOD_RES (1)..(1): Any amino acid
XCLIRRTSDILSKYLPVKIEQVVCCRLTPLQTELYKRFLRQAKPAEELLEGKMSVSSLSSITSLKKLCNRKMLVLDYILAVTRSRSSDKVVLVSNYTQTLDLFEKLCRARRYLYVRLDGTMSIKKRAKVVERFNSPSSPDFVFMLSSKAGGCGLNLIGANRLVMFDPDWNPANDEQAMARVWRDGQKKTCYIYRLLSAGTIEEKIFQRQSHKKALSSCVVDEEQDVERHFSLGELKELFILDEASLSDTHDRLHCRRCVNSRQIRPPPDGSDCTSDLAGWNHCTDKWGLRDEVLQAAWDAASTAITFVFHQRSHEEQRGLR

SEQ ID NO: 70746 - protein, 43 aa, Homo sapiens
MASGADSKGDDLSTAILKQKNRPNRLIVDEAINEDNSVVSLSQ

SEQ ID NO: 70747 - protein, 666 aa, Homo sapiens
MLELQYHNEDLEKDKTSQNCLGRGMEQVAKKLGVAHEEIQRLTDELQVKEKEQCKLDSALKKAQLEIDKLKENLVKLKENDAADLQKAKEQNQRLDEEILALRNRVRSLDSEKKVLGEMVERLKGEVCESQENKQLGNHSPGKTVGGEQREQHPSSGEKLKYNQQGEVQQLHQNLHRLQILCNSAENELRYERGQNLDLKQHNSLLQEENIKIKIELKHAQQKLLDSTKMCSSLTAEYKHCQQKIKELELEVLKHTQSIKSQNNLQEKLVQEKSKVADAEEKILDLQRKLEHAHKVCLTDTCISEKQQLEEKIKEATQNEAKVKQQYQEEQQKRKLLYQNVDELHRQVRTLQDKENLLEMTCSQQQSRIQQQEALLKQLENEKRKYDEHVKSNQELSEKLSKLQQEKEALREEYLRLLKLLNVHVRNYNEKHHQQKVKLQKVKYRLTNEVELRDKRINQFEDEIGILQHKIEKEKAIQDQITAQNDTLLLEKRKLQEQVIEQEQLIHSNKWTISSIQSRVLYMDKENKQLQENSLRLTQQIGFLERIIRSIHIRRGENLKEFPVPKWWHRGKLASLPPTKKQKEIYSTEVFTSNNAELQHEDESVPEATEKWKHSEQMETTISDILESEVVNEILPLSNSRLVKSRQIKSSLSEMDCQPCLRVMAA

SEQ ID NO: 70748 - protein, 39 aa, Homo sapiens
MQAARMAASLGRQLLRLGGGRSVCDKRDGGQRPWAPGRH

SEQ ID NO: 70749 - protein, 164 aa, Homo sapiens
MDDDDAKLKAEIEAELDKLSISSLEKEDIESDAKSETQSDDSDTDSVELPESVLHCINIIKNRSKAVEELILQDLEDTDILSCSYGAVSNNHMHLRTGLSTEYEESSEQLIKILSEIEKEEFMRSKTDCATPDFVPEPSPHDLPMDEHVLPDDADINFGYCEVE

SEQ ID NO: 70750 - protein, 204 aa, Homo sapiens
MNLILRYTFSKMAMVSEFLKQAWFIENEEQEYVQTVKSSKGGPGSAVSPYPTFNPSSDVAALHKAIMVKGVDEATIIDILTKRNNAQRQQIKAAYLQETGKPLDETLKKALTGHLEEVVLALLKTPAQFDADELRAAMKGLGTDEDTLIEILASRTNKEIRDINRVYREELKRDLAKDITSDTSGDFRNALLSLAKGDRSEDFG

SEQ ID NO: 70751 - protein, 37 aa, Homo sapiens
MTQDRPLLAVQEALKKCFPVVEEQQGLWQSALRDCQP

SEQ ID NO: 70752 - protein, 109 aa, Homo sapiens
MNSLLIGELSPEQPSFEPTKNKELTDEFRELRATVERMGLMKANHVFFLLYLLHILLLDGAAWLTLWVFGTSFLPFLLCAVLLSAVQAQAGWLQHDFGHLSVFSTSKWN

SEQ ID NO: 70753 - protein, 343 aa, Homo sapiens
MAETVWSTDTGEAVYRSRDPVRNLRLRVHLQRITSSNFLHYQPAAELGKDLIDLATFRPQPTASGHRPEEDEEEEIVIGWQEKLFSQFEVDLYQNETACQSPLDYQYRQEILKLENSGGKKNRRIFTYTDSDRYTNLEEHCQRMTTAASEVPSFLVERMANVRRRRQDRRGMEGGILKSRIVTWEPSEEFVRNNHVINTPLQTMHIMADLGPYKKLGYKKYEHVLCTLKVDSNGVITVKPDFTGLKGPYRIETEGEKQELWKYTIDNVSPHAQPEEEERERRVFKDLYGRHKEYLSSLVGTDFEMTVPGALRLFVNGEVVSAQGYEYDNLYVHFFVELPTARA

SEQ ID NO: 70754 - protein, 156 aa, Homo sapiens
MASVLSRRLGKRSLLGARVLGPSASEGPSAAPPSEPLLEGAAPQPFTTSDDTPCQEQPKEVLKAPSTSGLQQVAFQPGQKVYVWYGGQECTGLVEQHSWMEGQVTVWLLEQKLQVCCRVEEVWLAELQGPCPQAPPLEPGAQALAYRPVSRNIDVP

SEQ ID NO: 70755 - protein, 63 aa, Homo sapiens
  MOD_RES (1)..(1): Any amino acid
XRSSSVLSHEELQSMGHLADHSMAQTLQASLEGLPPSTSSGQPPLQDMLCLGGVAVSLSHIRN

SEQ ID NO: 70756 - protein, 36 aa, Homo sapiens
  MOD_RES (1)..(1): Any amino acid
XGSVHVDSGASAITRESHTHRDRPSQQQPLRNQSTV

SEQ ID NO: 70757 - protein, 535 aa, Homo sapiens
MPAPRAREQPRVPGERQPLLPRGARGPRRWRRAAGAAVLLVEMLERAAFFGVTANLVLYLNSTNFNWTGEQATRAALVFLGASYLLAPVGGWLADVYLGRYRAVALSLLLYLAASGLLPATAFPDGRSSFCGEMPASPLGPACPSAGCPRSSPSPYCAPVLYAGLLLLGLAASSVRSNLTSFGADQVMDLGRDATRRFFNWFYWSINLGAVLSLLVVAFIQQNISFLLGYSIPVGCVGLAFFIFLFATPVFITKPPMGSQVSSMLKLALQNCCPQLWQRHSARDRQCARVLADERSPQPGASPQEDIANFQVLVKILPVMVTLVPYWMVYFQMQSTYVLQGLHLHIPNIFPANPANISVALRAQGSSYTIPEAWLLLANVVVVLILVPLKDRLIDPLLLRCKLLPSALQKMALGMFFGFTSVIVAGVLEMERLHYIHHNETVSQQIGEVLYNAAPLSIWWQIPQYLLIGISEIFASIPGLEFAYSEAPRSMQGAIMGIFFCLSGVGSLLGSSLVALLSLPGGWLHCPKDFAEEEL

SEQ ID NO: 70758 - protein, 476 aa, Homo sapiens
MQLPRWWELGDPCAWTGQGRGTRRMSPATTGTFLLTVYSIFSKVHSDRNVYPSAGVLFVHVLEREYFKGEFPPYPKPGEISNDPITFNTNLMGYPDRPGWLRYIQRTPYSDGVLYGSPTAENVGKPTIIEITAYNRRTFETARHNLIINIMSAEDFPLPYQAEFFIKNMNVEEMLASEVLGDFLGAVKNVWQPERLNAINITSALDRGGRVPLPINDLKEGVYVMVGADVPFSSCLREVENPQNQLRCSQEMEPVITCDKKFRTQFYIDWCKISLVDKTKQVSTYQEVIRGEGILPDGGEYKPPSDSLKSRDYYTDFLITLAVPSAVALVLFLILAYIMCCRREGVIQLVHHSAIQKSTKELRDMSKNREIAWPLSTLPVFHPVTGEIIPPLHTDNYDSTNMPLMQTQQWSFAPVAQAGVQWSDLGSLQPPPPRNLPHQTQIPQQQTTGDFRLTTFQRFEVNGIPEERKLTEAMNL

SEQ ID NO: 70759 - protein, 1215 aa, Homo sapiens
MNKRRSQCRGKGEETWRNQGDLALRNCLLTSDLTVRIGDYGLAHSNYKEDYYLTPERLWIPLRWAAPELLGELHGTFMVVDQSRESNIWSLGVTLWELFEFGAQPYRHLSDEEVLAFVVRQQHVKLARPRLKLPYADYWYDILQSCWRPPAQRPSASDLQLQLTYLLSERPPRPPPPPPPPRDGPFPWPWPPAHSAPRPGTLSSPFPLLDGFPGADPDDVLTVTESSRGLNLECLWEKARRGAGRGGGAPAWQPASAPPAPHANPSNPFYEALSTPSVLPVISARSPSVSSEYYIRLEEHGSPPEPLFPNDWDPLDPGVPAPQAPQAPSEVPQLVSETWASPLFPAPRPFPAQSSASGSFLLSGWDPEGRGAGETLAGDPAEVLGERGTAPWVEEEEEEEEGSSPGEDSSSLGGGPSRRGPLPCPLCSREGACSCLPLERGDAVAGWGGHPALGCPHPPEDDSSLRAERGSLADLPMAPPASAPPEFLDPLMGAAAPQYPGRGPPPAPPPPPPPPRAPADPAASPDPPSAVASPGSGLSSPGPKPGDSGYETETPFSPEGAFPGGGAAEEEGVPRPRAPPEPPDPGAPRPPPDPGPLPLPGPREKPTFVVQVSTEQLLMSLREDVTRNLLGEKGATARETGPRKAGRGPGNREKVPGLNRDPTVLGNGKQAPSLSLPVNGVTVLENGDQRAPGIEEKAAENGALGSPEREEKVLENGELTPPRREEKALENGELRSPEAGEKVLVNGGLTPPKSEDKVSENGGLRFPRNTERPPETGPWRAPGPWEKTPESWGPAPTIGEPAPETSLERAPAPSAVVSSRNGGETAPGPLGPAPKNGTLEPGTERRAPETGGAPRAPGAGRLDLGSGGRAPVGTGTAPGGGPGSGVDAKAGWVDNTRPQPPPPPLPPPPEAQPRRLEPAPPRARPEVAPEGEPGAPDSRAGGDTALSGDGDPPKPERKGPEMPRLFLDLGPPQGNSEQIKARLSRLSLALPPLTLTPFPGPGPRRPPWEGADAGAAGGEAGGAGAPGPAEEDGEDEDEDEEEDEEAAAPGAAAGPRGPGRARAAPVPVVVSSADADAARPLRGLLKSPRGADEPEDSELERKRKMVSFHGDVTVYLFDQETPTNELSVQAPPEGDTDPSTPPAPPTPPHPATPGDGFPSNDSGFGGSFEWAEDFPLLPPPGPPLCFSRFSVSPALETPGPPARAPDARPAGPVEN

SEQ ID NO: 70760 - protein, 220 aa, Homo sapiens
  MOD_RES (1)..(1): Any amino acid
XMSLGGRHAGLVGGSHPEDGLAGSTSLMHNHAALPSQPGTLPDLSRPPDSYSGLGRAGATAAASEIKREEKEDEENTSAADHSEEEKKELKAPRARTSSTDEVLSLEEKDLRDRERRMANNARERVRVRDINEAFRELGRMCQMHLKSDKAQTKLLILQQAVQVILGLEQQVRERNLNPKAACLKRREEEKVSGVVGDPQMVLSAPHPGLSEAHNPAGHM

SEQ ID NO: 70761 - protein, 148 aa, Homo sapiens
MRFLAATFLLLALSTAAQAEPVQFKDCGSVDGVIKEVNVSPCPTQPCQLSKGQSYSVNVTFTSNIQSKSSKAVVHGILMGVPVPFPIPEPDGCKSGINCPIQKDKTYSYLNKLPVKSEYPSIKLVVEWQLQDDKNQSLFCWEIPVSHL

SEQ ID NO: 70762 - protein, 184 aa, Homo sapiens
SLFLFRALGKILYCKRASLTELDSPRLPSHLSEYERDTLLVEPEEVVEMSHMPGDLFNLYLHQNYIDFFMEIDDIVRASEFLSFADILSGDWNTRSLLREYSTSIATRGVMHSNKARGYAHCQGGGSSFRPLHKPQWFLINKKYRENCLAAKALFPDFCLPALCLQTQLLPYLALLTIPMRNQD

SEQ ID NO: 70763 - protein, 168 aa, Homo sapiens
VTSQCSFSSTIVHVGDKKPPESDIIMMEDLPGLAPGPAPSPAPSPTVAPDPAPDAYRPVGLTKAVLSLHTQKEEQAFLSRFRDLGRLRGLDSSSTAPSALGERGRIRPRWAGGMPRLAVPTGVWRTRAICPCVHGLTLLPPSASMPPSSAHPQLDPSCNLSLALFLSQ

SEQ ID NO: 70764 - protein, 26 aa, Homo sapiens
MTDPLLDSQPASSTGEMDGLCPELLL

SEQ ID NO: 70765 - protein, 379 aa, Homo sapiens
MFEISRTLNAALLNNEIISTMEPQVSNGPTSNTSNGPSSNNRNCPSPMQTGATTDDSKTNLIVNYLPQNMTQEEFRSLFGSIGEIESCKLVRDKITGQSLGYGFVNYIDPKDAEKAINTLNGLRLQTKTIKVSYARPSSASIRDANLYVSGLPKTMTQKELEQLFSQYGRIITSRILVDQVTGVSRGVGFIRFDKRIEAEEAIKGLNGQKPSGATEPITVKFANNPSQKSSQALLSQLYQSPNRRYPGPLHHQAQRFRLDNLLNMAYGVKRFSPITIDGMTSLVGMNIPGHTGTGWCIFVYNLSPDSDESVLWQLFGPFGAVNNVKVIRDFNTNKCKGFGFVTMTNYDEAAMAIASLNGYRLGDRVLQVSFKTNKAHKS

SEQ ID NO: 70766 - protein, 97 aa, Homo sapiens
MASSEVARHLLFQSHMATKTTCMSSQGSDDEQIVNIIPVIAKADTVSKTELQKFKIKLMSELVSNGVQIYQFPTDDDTIAKVNAAMNGQLPFAVVGS

SEQ ID NO: 70767 - protein, 151 aa, Homo sapiens
MGDDSEWLKLPVDQKCEHKLWKARLSGYEEALKIFQKIKDEKSPEWSKFLGLIKKFVTDSNAVVQLKGLEAALVYVENAHVAGKTTGEVVSGVVSKVFNQPKAKAKELGIEICLMYIEIEKGEAVQEELLKGLDNKNPKIIVACIETLRKA

SEQ ID NO: 70768 - protein, 210 aa, Homo sapiens
MDPRGTKRGAEKTEVAEPRNKLPRPAPSLPTDPALYSGPFPFYRRPSELGCFSLDAQRQYHGDARALRYYSPPPTNGPGPNFDLRDGYPDRYQPRDEEVQERLDHLLCWLLEHRGRLEGGPGWLAEAIVTWRGHLTKLLTTPYERQEGWQLAASRFQGTLYLSEVETPNARAQRLARPPLLRELMYMGYKFEQYMCAAAWEATLCSSQGR

SEQ ID NO: 70769 - protein, 100 aa, Homo sapiens
  MOD_RES (1)..(1): Any amino acid
XTPEVKKQRGKILLGLSRLPLISVALVQGWALGGGAEFTTACDFRLMTPESKIRFVHKEMGIIPSWGGTTRLVEIIGSRQALKVLSGALKLDSKNALNIG

SEQ ID NO: 70770 - protein, 162 aa, Homo sapiens
MDVATALPLQVAPSAVPMDLRLDHQFSLPVAEPALREQQLQQELLALKQKQQIQRQILIAEFQRQHEQLSRQHEAQLHEHIKQQQEMLAMKHQQELLEHQRKLERHRQEQELEKQHREQKLQQLKNKEKGKESAVASTEVKMKLQEFVLNKKKALAHRNLNH

SEQ ID NO: 70771 - protein, 612 aa, Homo sapiens
MTSAGGAPGALPAGTPESSLHEALDQCMTALDLFLTNQFSEALSYLKPRTKESMYHSLTYATILEMQAMMTFDPQDILLAGNMMKEAQMLCQRHRRKSSVTDSFSSLVNRPTLGQFTEEEIHAEVCYAECLLQRAALTFLQGSSHGGAVRPRALHDPSHACSCPPGPGRQHLFLLQDENMVSFIKGGIKVRNSYQTYKELDSLVQSSQYCKGENHPHFEGGVKLGVGAFNLTLSMLPTRILRLLEFVGFSGNKDYGLLQLEEGASGHSFRSVLCVMLLLCYHTFLTFVLGTGNVNIEEAEKLLKPYLNRYPKGAIFLFFAGRIEVIKGNIDAAIRRFEECCEAQQHWKQFHHMCYWELMWCFTYKGQWKMSYFYADLLSKENCWSKATYIYMKAAYLSMFGKEDHKPFGDDEVELFRAVPGLKLKIAGKSLPTEKFAIRKSRRYFSSNPISLPVPALEMMYIWNGYAVIGKQPKLTDGILEIITKAEEMLEKGPENEYSVDDECLVKLLKGLCLKYLGRVQEAEENFRSISANEKKIKYDHYLIPNALLELALLLMEQDRNEEAIKLLESAKQNYKNYSMESRTHFRIQAATLQAKSSLENSSRSMVSSVSL

SEQ ID NO: 70772 - protein, 302 aa, Homo sapiens
MAAAAAVEAAAPMGALWGLVHDFVVGQQEGPADQVAADVKSGNYTVLQVVEALGSSLENPEPRTRARAIQLLSQVLLHCHTLLLEKEVVHLILFYENRLKDHHLVIPSVLQGLKALSLCVALPPGLAVSVLKAIFQEVHVQSLPQVDRHTVYNIITNFMRTREEELKSLGADFTFGFIQVMDGEKDPRNLLVAFRIVHDLISRDYSLGPFVEELFEVTSCYFPIDFTPREDLILSLRAVLASTPRFAEFLLPLLIEKVDSEVLSAKLDSLQTLNACCAVYGQKELKDFLPSLWASIRREVFQ

SEQ ID NO: 70773 - protein, 131 aa, Homo sapiens
MTSDQDAKVVAEPQTQRVQEGKDSAHLMNGPISQTTSQTSSIPPLSQVPATKVSELNPNAEVWGAPVLHLEASSAADGVSAAWEEVAGHHADRGPQGSDANGDGDQGHENAALPDPQESDPADMNALALGP

SEQ ID NO: 70774 - protein, 104 aa, Homo sapiens
MADKEAAFDDAVEERVINEEYKIWKKNTPFLYDLVMTHALEWPSLTAQWLPDVTRPEGKDFSIHRLVLGTHTSDEQNHLVIASVQLPNDDAQFDASHYDSEKGG

SEQ ID NO: 70775 - protein, 143 aa, Homo sapiens
MSLWPPFRCRWKLAPRYSRRASPQQPQQDFEALLAECLRNGCLFEDTSFPATLSSIGSGSLLQKLPPRLQWKRPPELHSNPQFYFAKAKRLDLCQGIVGDCWFLAALQALALHQDILSRVVPLNQSFTEKYAGIFRFWALWFL

SEQ ID NO: 70776 - protein, 184 aa, Homo sapiens
MPFWGHSPESDMGSRVGYPAQVYKTASAETPRPSQLAQPSPFQLSASVPKSFFSKQPVRNKHPTGWKRTEEPPPRPLPFSDPKKQVDTNTKNVFGQPRLRASLRDLRSPRKNYKSTIEDDLKKLIIMDNLGPEQERDTGSPQKGLQRTLSDESLCSGRREPSFASPAGLEPGLPSDVLFTSTCA

SEQ ID NO: 70777 - protein, 1560 aa, Homo sapiens
NSIYTISISSTAESGKKPWYLEECSSTLATTYSSGESYDKKIITTDLRQRCTDNHTGTSASAPMAAGIIALALEANPFLTWRDVQHVIVRTSRAGHLNANDWKTNAAGFKVSHLYGFGLMDAEAMVMEAEKWTTVPRQHVCVESTDRQIKTIRPNSAVRSIYKASGCSDNPNRHVNYLEHVVVRITITHPRRGDLAIYLTSPSGTRSQLLANRLFDHSMEGFKNWEFMTIHCWGERAAGDWVLEVYDTPSQLRNFKTPGKLKEWSLVLYGTSVQPYSPTNEFPKVERFRYSRVEDPTDDYGTEDYAGPCDPECSEVGCDGPGPDHCNDCLHYYYKLKNNTRICVSSCPPGHYHADKKRCRKCAPNCESCFGSHGDQCMSCKYGYFLNEETNSCVTHCPDGSYQDTKKNLCRKCSENCKTCTEFHNCTECRDGLSLQGSRCSVSCEDGRYFNGQDCQPCHRFCATCAGAGADGCINCTEGYFMEDGRCVQSCSISYYFDHSSENGYKSCKKCDISCLTCNGPGFKNCTSCPSGYLLDLGMCQMGAICKDGEYVDEHGHCQTCEASCAKCQGPTQEDCTTCPMTRIFDDGRCVSNCPSWKFEFENQCHPCHHTCQRCQGSGPTHCTSCGADNYGREHFLYQGECGDSCPEGHYATEGNTCLPCPDNCELCHSVHVCTRCMKGYFIAPTNHTCQKLECGQGEVQDPDYEECVPCEEGCLGCSLDDPGTCTSCAMGYYRFDHHCYKTCPEKTYSEEVECKACDSNCGSCDQNGCYWCEEGFFLLGGSCVRKCGPGFYGDQEMGECESCHRACETCTGPGHDECSSCQEGLQLLRGMCVHATKTQEEGKFWNEAVSTANLSVVKSLLQERRRWKVQIKRDILRKLQPCHSSCKTCNGSATLCTSCPKGAYLLAQACVSSCPQGTWPSVRSGSCENCTEACAICSGADLCKKCQMQPGHPLFLHEGRCYSKCPEGSYAEDGICERCSSPCRTCEGNATNCHSCEGGHVLHHGVCQENCPERHVAVKGVCKHCPEMCQDCIHEKTCKECTPEFFLHDDMCHQSCPRGFYADSRHCVPCHKDCLECSGPKADDCELCLESSWVLYDGLCLEECPAGTYYEKETKECRDCHKSCLTCSSSGTCTTCQKGLIMNPRGSCMANEKCSPSEYWDEDAPGCKPCHVKCFHCMGPAEDQCQTCPMNSLLLNTTCVKDCPEGYYADEDSNRCAHCHSSCRTCEGRHSRQCHSCRPGWFQLGKECLLQCREGYYADNSTGRCERCNRSCKGCQGPRPTDCLSCDRFFFLLRSKGECHRSCPDHYYVEQSTQTCERCHPTCDQCKGKGALNCLSCVWSYHLMGGICTSDCLVGEYRVGEGEKFNCEKCHESCMECKGPGAKNCTLCPANLVLHMDDSHCLHCCNTSDPPSAQECCDCQDTTDECILRTSKVRPATEHFKTALFITSSMMLVLLLGAAVVVWKKSRGRVQPAAKAGYEKLADPNKSYSSYKSSYRESTSFEEDQVIEYRDRDYDEDDDDDIVYMGQDGTVYRKFKYGLLDDDDIDELEYDDESYSYYQ

SEQ ID NO: 70778 - protein, 383 aa, Homo sapiens
  MOD_RES (1)..(1): Any amino acid
XIILLWRTLKYLWTVCCHCGGKTKEAQKINNGSSQADGTLKPVDEKEEAVAAEVGWMTSVKDWAGVMISAQTLTGRVLVVLVFALSIGALVIYFIDSSNPIESCQNFYKDFTLQIDMAFNVFFLLYFGLRFIAANDKLWFWLEVNSVVDFFTVPPVFVSVYLNRSWLGLRFLRALRLIQFSEILQFLNILKTSNSIKLVNLLSIFISTWLTAAGFIHLVENSGDPWENFQNNQALTYWECVYLLMVTMSTVGYGDVYAKTTLGRLFMVFFILGGLAMFASYVPEIIELIGNRKKYGGSYSAVSGRKHIVVCGHITLESVSNFLKDFLHKDRDDVNVEIVFLHKLRKTHGRNTTWKESQMKCTQNISPVPSWVCPSLLFVSCVL

SEQ ID NO: 70779 - protein, 410 aa, Homo sapiens
MPALEPAPPLLADLGPALEPESPAALGPPGYLHSAPGPAPAPGEGPPPGTVLEPQSAPESSCPCRGSVKNQPSEELPDMTTFPPRLLAEQLTLMDAELFKKVVLHECLGCIWGQGHLKGNEHMAPTVRATIAHFNRLTNCITTSCLGDHSMRARDRARVVEHWIKVARECLSLNNFSSVHVIVSALCSNPIGQLHKTWAGVSSKSMKELKELCKKDTAVKRDLLIKAGSFKVATQERNPQRVQMRLRRQKKGVVPFLGDFLTELQRLDSAIPDDLDGNTNKRSKEVRVLQEMQLLQVAAMNYRLRPLEKFVTYFTRMEQLSDKERLHCSVTISVHCNVCLLGSSPSSASQAAGTTAVHHHVRLFCCCCSATSCPASWSPKTRRLATSCSGWEPTGMLARTPALHHPSPRP

SEQ ID NO: 70780 - protein, 182 aa, Homo sapiens
MSLQWTAVATFLYAEVFVVLLLCIPFISPKRWQKIFKSRLVELLVSYGNTFFVVLIVILVLLVIDAVREIRKYDDVTEKVNLQNNPGAMEHFHMKLFRAQRNLYIAGFSLLLSFLLRRLVTLISQQATLLASNEAFKKQAESASEAAKKYMEENDQLKKGAAVDGGKLDVGNAEVKLEEENR

SEQ ID NO: 70781 - protein, 208 aa, Homo sapiens
  MOD_RES (1)..(1): Any amino acid
XQYQTVRYDILPLSPVSRNRLAQVKRKILVLDLDETLIHSHHDGVLRPTVRPGTPPDFILKVVIDKHPVRFFVHKRPHVDFFLEVVSQWYELVVFTASMEIYGSAVADKLDNSRSILKRRYYRQHCTLELGSYIKDLSVVHSDLSSIVILDNSPGAYRSHPDNAIPIKSWFSDPSDTALLNLLPMLDALRFTADVRSVLSRNLHQHRL

SEQ ID NO: 70782 - protein, 74 aa, Homo sapiens
MEGDFSVCRNCKRHVVSANFTLHEAYCLRFLVLCPECEEPVPKETMEEHCKLEHQQGKEFQLLKGKSTVIIATK

SEQ ID NO: 70783 - protein, 337 aa, Homo sapiens
  MOD_RES (1)..(1): Any amino acid
XGVNKIISSLSSAFHVFEDGNKENYGLPQPKNKPTGARTFGERSVSRLPSKPKEEVPHAEEFLDDSTVWGIRCNKTLAPSPKSPGDFTSAAQLASTPFHKLPVESVHILEDKENVVAKQCTQATLDSCEENMVVPSRDGKFSPIQEKSPKQALSSHMYSASLLRLSQPAAGGVLTCEAELGVEACRLTDTDAAIAEDPPDAIAGLQAEWMQMSSLGTVDAPNFIVGNPWDDKLIFKLLSGLSKPVSSYPNTFEWQCKLPAIKPKTEFQLGSKLVYVHHLLGEGAFAQVYEATQGDLNDAKNKQKFVLKNTRLDMNFTYLICRSKSLPTPGNSTLGPS

SEQ ID NO: 70784 - protein, 695 aa, Homo sapiens
MESTSQDRRATHVITIKPNETVLTAFPYRPHSSLLDFLKGEPRVLGATQILLALIIVGFGTIFALNYIGFSQRLPLVVLTGYPFWGALIGQGVTGMNVISSLVAITGITFTILSYRHQDKYCQMPSFEEICVFSRTLFIGILLILLIISIAELSISVTIASFRSKCWTQSDEVLFFLPSDVTQNSEQPAPEENDQLQFVLQEEFSSDDSTTNAQSVIFGGYAFFKLTLSRSPLVSQPGNKGREFVPDEQKQSILPSPKFSEEEIEPLPPTLEKKPSENMSIQLDSTFKQMKDEDLQSAIVQPSQMQTKLLQDQAASLQVFPSHSALKLEDISPEDLPSQALPVEGLSEQTMPSKSTSSHVKQSSNLTANDLPPQGILSQDTSSQDMLFHDMTSQDMQSLDMLSQDTPSHAMPPQDIPSQDMLSQALSAHAILPEASTSHIVQFPEIQHLLQQPPDLQPENTEPQNQQILQMSYQDIRSEVMEETKEWKSEEELHRRKSSRRHSLNQQTKALQYLRRHSLDVQAKGQKSSKRHSLDQQSKGWQSPKQKSLDQQIKDWLSPKRHSVDKQAQLNQTKEQLPDQQAEDQQAKGEQYPEGQSKDGQVKDQQTDKEQNSKKQTQDQQTEDQPAQEKKSPKGQFQNVQAEGQQAQVEKVPKLLCQDSESQIQQYQFWQFHKGNLQAGQPRTVNLLAKNPLTG

SEQ ID NO: 70785 - protein, 173 aa, Homo sapiens
MDLDVVNMFVIAGGTLAIPILAFVASFLLWPSALIRIYYWYWRRTLGMQVRYVHHEDYQFCYSFRGRPGHKPSILMLHGFSAHKDMWLSVVKFLPKNLHLVCVDMPGHEGTTRSSLDDLSIDGQVKRIHQFVECLKLNKKPFHLVGTSMGGQVAGVYAAYYPSDVSSLCLVCP

SEQ ID NO: 70786 - protein, 208 aa, Homo sapiens
  MOD_RES (1)..(1): Any amino acid
XVLYSGWLRKSPPEKKLRLFAWRKRWFILRRGQTSSDPDVLEYYKNDGSKKPLRTINLNLCEQLDVDVTLNFNKKEIQKGYMFDIKTSERTFYLVAETREDMNEWVQSICQICGFRQEESTGFLGNISSASHGLCSSPAEPSCSHQHLPQEQEPTSEPPVSHCVPPTWPIPAPPGCLRSHQHASQRAEHASFLRQVHPAWWRECQPAC

SEQ ID NO: 70787 - protein, 594 aa, Homo sapiens
MREQLKGHETQTTCWDHPKMTELYQSLADLNNVRFSAYRTAMKLRRLQKALCLDLLSLSAACDALDQHNLKQNDQPMDILQIINCLTTIYDRLEQEHNNLVNVPLCVDMCLNWLLNVYDTGRTGRIRVLSFKTGIISLCKAHLEDKYRYLFKQVASSTGFCDQRRLGLLLHDSIQIPRQLGEVASFGGSNIEPSVRSCFQFANNKPEIEAALFLDWMRLEPQSMVWLPVLHRVAAAETAKHQAKCNICKECPIIGFRYRSLKHFNYDICQSCFFSGRVAKGHKMHYPMVEYCTPTTSGEDVRDFAKVLKNKFRTKRYFAKHPRMGYLPVQTVLEGDNMETPASSPQLSHDDTHSRIEHYASRLAEMENSNGSYLNDSISPNESIDDEHLLIQHYCQSLNQDSPLSQPRSPAQILISLESEERGELERILADLEEENRNLQAEYDRLKQQHEHKGLSPLPSPPEMMPTSPQSPRDAELIAEAKLLRQHKGRLEARMQILEDHNKQLESQLHRLRQLLEQPQAEAKVNGTTVSSPSTSLQRSDSSQPMLLRVVGSQTSDSMGEEDLLSPPQDTSTGLEEVMEQLNNSFPSSRASIR

SEQ ID NO: 70788 - protein, 379 aa, Homo sapiens
MWAFSELPMPLLINLIVSLLGFVATVTLIPAFRGHFIAARLCGQDLNKTSRQQMLESWTCPSLPQFVALIGALLAICCMIFLGFADDVLNLRWRHKLLLPTAASLPLLMVYFTNFGNTTIVVPKPFRPILGLHLDLGILYYVYMGLLAVFCTNAINILAGINGLEAGQSLVISASIIVFNLVELEGDCRDDHVFSLYFMIPFFFTTLGLLYHNWYPSRVFVGDTFCYFAGMTFAVVGILGHFSKTMLLFFMPQVFNFLYSLPQLLHIIPCPRHRIPRLNIKTGKLEMSYSKFKTKSLSFLGTFILKVAESLQLVTVHQSETEDGEFTECNNMTLINLLLKVLGPIHERNLTLLLLLLQILGSAITFSIRYQLVRLFYDV

SEQ ID NO: 70789 - protein, 334 aa, Homo sapiens
MMVREFNGQHFILEEAITGDFALVKAWKADRAGNVIFRKSARNFNLPMCKAAETTVVEVEEIVDIGAFAPEDIHIPQIYVHRLIKGEKYEKRIERLSIRKEGDGEAKSAKPGDDVRERIIKRAALEFEDGMYANLGIGIPLLASNFISPNITVHLQSENGVLGLGPYPRQHEADADLINAGKETVTILPGASFFSSDESFAMIRGGHVDLTMLGAMQVSKYGDLANWMIPGKMVKGMGGAMDLVSSAKTKVVVTMEHSAKGNAHKIMEKCTLPLTGKQCVNRIITEKAVFDVDKKKGLTLIELWEGLTVDDVQKSTGCDFAVSPKLMPMQQIAN

SEQ ID NO: 70790 - protein, 279 aa, Homo sapiens
  MOD_RES (1)..(1): Any amino acid
XNSADFLLHTVGAEDSGNYSCIYYETTMSNRGSYLSMPLMIWVTDTFPKPWLFAEPSSVVPMGQNVTLWCRGPVHGVGYILHKEGEATSMQLWGSTSNDGAFPITNISGTSMGRYSCCYHPDWTSSIKIQPSNTLELLVTASNHSDSLEIWVTDKPPKPSLSAWPSTMFKLGKDITLQCRGPLPGVEFVLEHDGEEAPQQFSEDGDFVINNVEGKGIGNYSCSYRLQAYPDIWSEPSDPLELVGAAGPVAQECTVGNIVRSSLIVVVVVALGVVLAIEW

SEQ ID NO: 70791 - protein, 162 aa, Homo sapiens [sequence omitted]

SEQ ID NO: 70792 - protein, 13 aa, Homo sapiens
MKVKVIPVLEDNY

SEQ ID NO: 70793 - protein, 190 aa, Homo sapiens
  MOD_RES (1)..(1): Any amino acid
XRQCVWPFIVMMDDSCVLWNIHSVQEPSSQPMEVGVSSKNVSLKTVLQHIEATPKIVHYAILGIQKWSSKLTSQSLKAPFSRCHVHDFILLNTDLTQNVQYDFNRYFCEDADFNLRTNSSGLLICRFNNFSLMKKHVQVGGQRDFIIKPKIMPSITSGVLCWPLTATLTLDQRWPYAISAPDPTPAMSTV

SEQ ID NO: 70794 - protein, 20 aa, Homo sapiens
MTEDSQRNFRSVYYEKVGFR

SEQ ID NO: 70795 - protein, 163 aa, Homo sapiens
MEEGMNVLHDFGIQSTHYLQVNYQDSQDWFILVSVIADLRNAFYVLFPIWFHLQEAVGIKLLWVAVIGDWLNLVFKWILFGQRPYWWVLDTDYYSNTSVPLIKQFPVTCETGPGSPSGHAMGTAGVYYVMVTSTLSIFQGKIKPTYRFRHCCCRNFQPHPQHL

SEQ ID NO: 70796 - protein, 146 aa, Homo sapiens
MDPVATHSCHLLQQLHEQRIQGLLCDCMLVVKGVCFKAHKNVLAAFSQYFRSLFQNSSSQKNDVFHLDVKNVSGIGQILDFMYTSHLDLNQDNIQVMLDTAQCLQVQNVLSLCHTFLKSATVVQPPGMPCNSTLSLQSTLTPDATC

SEQ ID NO: 70797 - protein, 48 aa, Homo sapiens
MSEASSEDLVPPLEAGAAPYREEEEAAKKKKEKKKKSPRASFCTWAAP

SEQ ID NO: 70798 - protein, 99 aa, Homo sapiens
MQNSEGGADSPASVALRPSAAAPPVPASPQRVLVQAASSNPKGAQMQPISLPRVQQVPQQVQPVQHVYPAQVQYVEGGDAVYTNGAIRTAYTYNPEPQM

SEQ ID NO: 70799 - protein, 62 aa, Homo sapiens
MNEPLDYLANASDFPDYAAAFGNCTDENIPLKMHYLPVIYGIIFLVGFPGNAVVISTYIFKM

SEQ ID NO: 70800 - protein, 65 aa, Homo sapiens
MPVRRGHVAPQNTYLDTIIRKFEGQSRKFLIANAQMENCAIIYCNDGFCELFGYSRVEPPASAAW

SEQ ID NO: 70801 - protein, 129 aa, Homo sapiens
MNVGTAHSEVNPNTRVMNSRGIWLSYVLAIGLLHIVLLSIPFVSVPVVWTLTNLIHNMGMYIFLHTVKGTPFETPDQGKARLLTHWEQMDYGVQFTASRKFLTITPIVLYFLTSFYTKYDQIHFVLNTV

SEQ ID NO: 70802 - protein, 729 aa, Homo sapiens
MAAPVVAPPGVVVSRANKRSGAGPGGSGGGGARGAEEEPPPPLQAVLVADSFDRRFFPISKDQPRVLLPLANVALIDYTLEFLTATGVQETFVFCCWKAAQIKEHLLKSKWCRPTSLNVVRIITSELYRSLGDVLRDVDAKALVRSDFLLVYGDVISNINITRALEEHSSVPPVLYRLRRKLEKNVSVMTMIFKESSPSHPTRCHEDNVVVAVDSTTNRVLHFQKTQGLRRFAFPLSLFQGSSDGVEVRYDLLDCHISICSPQVAQLFTDNFDYQTRDDFVRGLLVNEEILGNQIHMHVTAKEYGARVSNLHMYSAVCADVIRRWVYPLTPEANFTDSTTQSCTHSRHNIYRGPEVSLGHGSILEENVLLGSGTVIGSNCFITNSVIGPGCHIGDNVVLDQTYLWQGVRVAAGAQIHQSLLCDNAEVKERVTLKPRSVLTSQVVVGPNITLPEGSVISLHPPDAEEDEDDGEFSDDSGADQEKDKVKMKGYNPAEVGAAGKGYLWKAAGMNMEEEEELQQNLWGLKINMEEESESESEQSMDSEEPDSRGGSPQMDDIKVFQNEVLGTLQRGKEENISCDNLVLEINSLKYAYNISLKEVMQVLSHVVLEFPLQQMDSPLDSSRYCALLLPLLKAWSPVFRNYIKRAADHLEALAAIEDFFLEHEALGISMAKVLMAFYQLEILAEETILSWFSQRDTTDKGQQLRKNQQLQRFIQWLKEAEEESSEDD

SEQ ID NO: 70803 - protein, 187 aa, Homo sapiens
  MOD_RES (1)..(1): Any amino acid
XSVDMCELKRDLQLLSQFLKHPQKASRRPSAAPASQQLQSLESKLTSVRFMGDMVSFEEDRINATVWKLQPTAGLQDLHIHSRQEEEQSEIMEYSVLLPRTLFQRTKGRSGEAEKRLLLVDFSSQALFQDKNSSQVLGEKVFGTYVPGYLLKLSAMGWGFPIFLVTLVALVDVDNYGPIILAVHRTP

SEQ ID NO: 70804 - protein, 399 aa, Homo sapiens
  MOD_RES (1)..(1): Any amino acid
XALSVLHALLYAALFAFAYLQLWRLLLYRERRLSYQSLCLFLCLLWAALRTTLFSAAFSLSGSLPLLRPPAHLHFFPHWLLYCFPSCLQFSTLCLLNLYLAEVICKVRCATELDRHKILLHLGFIMASLLFLVVNLTCAMLVHGDVPENQLKWTVFVRALINDSLFILCAISLVCYICKITKMSSANVYLESKITGSHSFLWLNSTPLCGMSLCQTVVVGSVVILLYSSRACYNLVVVTISQDTLESPFNYGWDNLSDKAHVEDISGEEYIVFGMVLFLWEHVPAWSVVLFFRAQRLNQNLAPAGMINSHSYSSRAYFFDNPRRYDSDDDLPRLGSSREGSLPNSQSLGWYGTMTGCGSSSYTVTPHLNGPMTDTAPLLFTCSNLDLNNHHSLYVTPQN

SEQ ID NO: 70805 - protein, 829 aa, Homo sapiens
MFALGLPFLVLLVASVESHLGVLGPKNVSQKDAEFERTYVDEVNSELVNIYTFNHTVTRNRTEGVRVSVNVLNKQKGAPLLFVVRQKEAVVSFQVPLILRGMFQRKYLYQKVERTLCQPPTKNESEIQFFYVDVSTLSPVNTTYQLRVSRMDDFVLRTGEQFSFNTTAAQPQYFKYEFPEGVDSVIVKVTSNKAFPCSVISIQDVLCPVYDLDNNVAFIGMYQTMTKKAAITVQRKDFPSNSFYVVVVVKTEDQACGGSLPFYPFAEDEPVDQGHRQKTLSVLVSQAVTSEAYVSGMLFCLGIFLSFYLLTVLLACWENWRQKKKTLLVAIDRACPESASLLGHPRVLADSFPGSSPYEGYNYGSFENVSGSTDGLVDSAGTGDLSYGYQGTRPRVDSMSSVEEDDYDTLTDIDSDKNVIRTKQYLYVADLARKDKRVLRKKYQIYFWNIATIAVFYALPVVQLVITYQTVVNVTGNQDICYYNFLCAHPLGNLSAFNNILSNLGYILLGLLFLLIILQREINHNRALLRNDLCALECGIPKHFGLFYAMGTALMMEGLLSACYHVCPNYTNFQFDTSFMYMIAGLCMLKLYQKRHPDINASAYSAYACLAIVIFFSVLGVVFGKGNTAFWIVFSIIHIIATLLLSTQLYYMGRWKLDSGIFRRILHVLYTDCIRQCSGPLYVDRMVLLVMGNVINWSLAAYGLIMRPNDFASYLLAIGICNLLLYFAFYIIMKLRSGERIKLIPLLCIVCTSVVWGFALFFFFQGLSTWQKTPAESREHNRDCILLDFFDDHDIWHFLSSIAMFGSFLVLLTLDDDLDTVQRDKIYVF

SEQ ID NO: 70806 - protein, 113 aa, Homo sapiens
MAKPYEFNWQKEVPSFLQEGAVFDRYEEESFVFEPNCLFKVDEFGFFLTWRSEGKEGQVLECSLINSIRSGAIPKDPKILAALEAVGKSENDLEGRIVCVCSGTDLVNISFTY

SEQ ID NO: 70807 - protein, 632 aa, Homo sapiens
MKRLPLLVVFSTLLNCSYTQNCTKTPCLPNAKCEIRNGIEACYCNMGFSGNGVTICEDDNECGNLTQSCGENANCTNTEGSYYCMCVPGFRSSSNQDRFITNDGTVCIENVNANCHLDNVCIAANINKTLTKIRSIKEPVALLQEVYRNSVTDLSPTDIITYIEILAESSSLLGYKNNTISAKDTLSNSTLTEFVKTVNNFVQRDTFVVWDKLSVNHRRTHLTKLMHTVEQATLRISQSFQKTTEFDTNSTDIALKVFFFDSYNMKHIHPHMNMDGDYINIFPKRKAAYDSNGNVAVAFVYYKSIGPLLSSSDNFLLKPQNYDNSEEEERVISSVISVSMSSNPPTLYELEKITFTLSHRKGIKDYNILTRITQLGIIISLICLAICIFTFWFFSEIQSTRTTIHKNLCCSLFLAELVFLVGINTNTNKLFCSIIAGLLHYFFLAAFAWMCIEGIHLYLIVVGVIYNKGFLHKNFYIFGYLSPAVVVGFSAALGYRYYGTTKVCWLSTENNFIWSFIGPACLIILVNLLAFGVIIYKVFRHTAGLKPEVSCFENIRSCARGALALLFLLGTTWIFGVLHVVHASVVTAYLFTVSNAFQGMFIFLFLCVLSRKIQEEYYRLFKNVPCCFGCLR

SEQ ID NO: 70808 - protein, 127 aa, Homo sapiens
MSSRKSKSNSLIHTECLSQVQRILRERFCRQSPHSNLFGVQVQYKHLSELLKRTALHGESNSVLIIGPRGSGKTMLINHALKELMEIEEVSENVLQVHLNGLLQINDKIALKEITRQLNLENVVGDK

SEQ ID NO: 70809 - protein, 193 aa, Homo sapiens
MRRDRGPKPALGGAGEVEPGGMAASPTGRPRRLQRYLQSGEFDQFRDFPIFESNFVQVTRLGEVANEVTMGVAASSPALELPDLLLLAGPAKENGHLQLFGCGPHSRPETESSASGCGCSTACASSLLLLCPSRRSKSPKAWKPDLTPRPLNSGDSESSSILQGHRMTRDQSTLPQGRADEILKLIKVSPLRT

SEQ ID NO: 70810 - protein, 159 aa, Homo sapiens
MGRGLLCWSNCGFPFPPSSPLTPIFPPPTASAEWGWGEVGLGAEGGRTEALPSPRAPRLCGAAEGRPAREVQPHRHLQGLPLPLAGVRQLPGLPERWPKSHPQPQRLPKFQQDPGAIWRTPRGGHFSQARHPLHPGAPQWLGTPPSQTQLQQSGPGLGP

SEQ ID NO: 70811 - protein, 168 aa, Homo sapiens
MLAKGLPPRSVLVKGCQTFLSAPREGLGRLRVPTGEGAGISTRSPRPFNEIPSPGDNGWLNLYHFWRETGTHKVHLHHVQNFQKYGPIYREKLGNVESVYVIDPEDVALLFKSEGPNPERFLIPPWVAYHQYYQRPIGVLLKPGVCDHEGLWAHVFSGSRQPGRKTGW

SEQ ID NO: 70812 - protein, 78 aa, Homo sapiens
  MOD_RES (1)..(1): Any amino acid
XPVMPVRNVSEHLLKSRLQTRSVGEHVYKKEKARVITEEEKNFKAFASLRMARANARLFGIRAKRAKEAAEQDVEKKK

SEQ ID NO: 70813 - protein, 580 aa, Homo sapiens
QILLTLLETRRPTFEGHIEICPPGMSHSACSVNKSVLEAIRGRLGSFHELLLEPPKLFLLQKSVMKTTWGVLDPPVGNTRLNVIRLISSLLQTNTSSINGDLMELNSIGVILNMFFKYTWNNFLHTQVEICIALILASPFENTENATITDQDSTGDNLLLKHLFQKCQLIERILEAWEMNEKKQAEGGRRHGYMGHLTRIANCIVHSTDKGPNSALVQQLIKDLPDEVRERWETFCTSSLGETNKRNTVDLAFSDYQMQQMTSNFIDQFGFNDEKFADQDDIGNVSFDRVSDINFTLNTNESGNIALFEACCKERIQQFDDGGSDEEDIWEEKHIAFTPESQRRSSSGSTDSEESTDSEEEDGAKQDLFEPSSANTEDKMEVDLSEPPNWSANFDVPMETTHGAPLDSVGSDVWSTEEPMPTKETGWASFSEFTSSLSTKDSLRSNSPVEMETSTEPMDPLTPSAAALAVQPEAAGSVAMEASSDGEEDAESTDKVTETVMNGGMKETLSLTVDAKTETAVFKSEEGKLSTSQDAACKDAEECPETAEAKCAAPRPPSSSPEQRTGQPSAPGDTSVNGPV

SEQ ID NO: 70814 - protein, 584 aa, Homo sapiens [sequence omitted]

SEQ ID NO: 70815 - protein, 66 aa, Homo sapiens
MARGSVSDEEMMELREAFAKVDTDGNGYISFNELNDLFKAACLPLPGYRVREITENLMATGDLDQD

SEQ ID NO: 70816 - protein, 103 aa, Homo sapiens
MRPEPTKFWEESLTLEDVAVDFTWEEWQFLSPAQKDLYRDVMLENYSNLVAVGYQASKPDALSKLERGEETCTTEDEIYSRICSDSGGASGGAYAGLSHGYIA

SEQ ID NO: 70817 - protein, 107 aa, Homo sapiens
MDVQATTPLDPRVLDAMLPYLINYYGNPHSRTHAYGWESEAAMERARQQVASLIGADPREIIFTSGATESNNIAIKGVARFYRSRKKHLITTQTEHKCVLDSCRSLE

SEQ ID NO: 70818 - protein, 142 aa, Homo sapiens
SFRTILRDLTRLQPHNLADVLTVNPDSPASDPTVFHKRYLKKIRDLGEGHFGKVSLYCYDPTNDGTGEMVAVKALKADCGPQHRSGWKQEIDILRTLYHEHIIKYKGCCEDQGLSSHEELLGDRGVLSPNLREPHTHSEDSP

SEQ ID NO: 70819 - protein, 107 aa, Homo sapiens
MLCSIEKPSAYDYTIPPMEKAVVKTDIQIALPSGCYGRVAPRSGLAAKHFIDVGAGVIDEDYRGNVGVVLFNFGKEKFEVKKGDRIAQLICERIFYPEIEEVQALDD

SEQ ID NO: 70820 - protein, 249 aa, Homo sapiens
MAALTTLFKYIDENQDRYIKKLAKWVAIQSVSAWPEKRGEIRRMMEVAAADVKQLGGSVELVDIGKQKLPDGSEIPLPPILLGRLGSDPQKKTVCIYGHLDVQPAALEDGWDSEPFTLVERDGKLYGRGSTDDKGPVAGWINALEAYQKTGQEIPVNVRFCLEGMEESGSEGLDELIFARKDTFFKDVDYVCISDNYWLGKKKPCITYGLRGICYFFIEVECSNKDLHSGVYGGSVHEAMTDLILLMGS

SEQ ID NO: 70821 - protein, 156 aa, Homo sapiens
MVYEPNQNKWISRSPMLQRRVYHSMAAVQRKLYVLGGNDLDYNNDRILVRHIDSYNIDTDQWTRCNFNLLTGQNESGVAVHNGRIYLVGGYSIWTNEPLACIQVLDVSREGKEEVFYGPTLPFASNGIAACFLPAPYFTCPNLQTLQVPHHRIGTI

SEQ ID NO: 70822 - protein, 156 aa, Homo sapiens
MEDSMDMDMSPLRPQNYLFGCELKADKDYHFKVDNDENEHQLSLRTVSLGAGAKDELHIVEAEAMNYEGSPIKVTLATLKMSVQPTVSLGGFEITPPVVLRLKCGSGPVHISGQHLVAVEEDAESEDEEEEDVKLLSISGKRSAPGGGSKVPQVEM

SEQ ID NO: 70823 - protein, 303 aa, Homo sapiens
  MOD_RES (1)..(1): Any amino acid
XKALYNYEGKEPGDLKFSKGDIIILRRQVDENWYHGEVNGIHGFFPTNFVQIIKPLPQPPPQCKALYDFEVKDKEADKDCLPFAKDDVLTVIRRVDENWAEGMLADKIGIFPISYVEFNSAAKQLIEWDKPPVPGVDAGECSSAAAQSSTAPKHSDTKKNTKKRHSFTSLTMANKSSQASQNRHSMEISPPVLISSSNPTAAARISELSGLSCSAPSQVHISTTGLIVTPPPSSPVTTGPSFTFPSDVPYQAALGAPPPLLLLLEWDRGPWQDPLTRLHIYGRRLAPVCMLLYIHTLLGKRMN

SEQ ID NO: 70824 - protein, 305 aa, Homo sapiens
MERLVARGTFPVLVRTSACRSLFGPVDHEELSRELQARLAELNAEDQNRWDYDFQQDMPLRGPGRLQWTEVDSDSVPAFYRETVQVGRCRLLLAPRPVAVAVAVSPPLEPAAESLDGLEEAPEQLPSVPVPAPASTPPPVPVLAPAPAPAPAPVAAPVAAPVAVAVLAPAPAPAPAPAPAPAPVAARAPAPARARAPAPAPAPAPDAAPQESAEQGANQGQRGQEPLADQLHSGISGRPAAGTAAASANGAAIKKLSGPLISDFFAKRKRSAPEKSSGDVPAPCPSPSAAPGVGSVEQTPRKRLR

SEQ ID NO: 70825 - protein, 40 aa, Homo sapiens
MPAATVDHSQRICEVWACNLDEEMKKIRQVIRKYNYVAMD

SEQ ID NO: 70826 - protein, 139 aa, Homo sapiens
MRRFLRPGHDPVRERLKRDLFQFNKTVEHGFPHQPSALGYSPSLRILAIGTRSGAIKLYGAPGVEFMGLHQENNAVTQIHLLPGQCQLVTLLDDNSLHLWSLKVKGGASELQEDESFTLRGPPGAAPSATQITVVLPHS

SEQ ID NO: 70827 - protein, 622 aa, Homo sapiens
MDEQEALNSIMNDLVALQMNRRHRMPGYETMKNKDTGHSNRQSDVRIKFEHNGERRIIAFSRPVKYEDVEHKVTTVFGQPLDLHYMNNELSILLKNQDDLDKAIDILDRSSSMKSLRILLLSQDRNHNSSSPHSGVSRQVRIKASQSAGDINTIYQPPEPRSRHLSVSSQNPGRSSPPPGYVPERQQHIARQGSYTSINSEGEFIPETSEQCMLDPLSSAENSLSGSCQSLDSPSFRKSRMSRAQSFPDNRQEYSDRETQLYDKGVKGGTYPRRYHVSVHHKDYSDGRRTFPRIRRHQGNLFTLVPSSRSLSTNGENMGLAVQYLDPRGRLRSADSENALSVQERNVPTKSPSAPINWRRGKLLGQGAFGRVYLCYDVDTGRELASKQVQFDPDSPETSKEVSALECEIQLLKNLQHERIVQYYGCLRDRAEKTLTIFMEYMPGGSVKDQLKAYGALTESVTRKYTRQILEGMSYLHSNMIVHRDIKGANILRDSAGNVKLGDFGASKRLQTICMSGTGMRSVTGTPYWMSPEVISGEGYGRKADVWSLGCTVVEMLTEKPPWAEYEAMAAIFKIATQPTNPQLPSHISEHGRDFLRRIFVEARQRPSAEELLTHHFAQLMY

SEQ ID NO: 70828 - protein, 90 aa, Homo sapiens
ALMSETVNSVATDSWSIWKLQKAISVLEMENGYWWCRKKQRAGVMLTVGTKPDGSPDERWCFRQTSELLCCPQGGGGELGFMGADAAYAV

SEQ ID NO: 70829 - protein, 151 aa, Homo sapiens
MAMQMQLEANADTSVEEESFGPQPISRLEQCGINANDVKKLEEAGFHTVEAVAYAPKKELINIKGISEAKADKILAEAAKLVPMGFTTATEFHQRRSEIIQITTGSKELDKLLQGGIETGSITEMFGEFRTGKTQICHTLAVTCQVWSLWQ

SEQ ID NO: 70830 - protein, 130 aa, Homo sapiens
MVDGKPVNLGLWDTAGQEDYDRLRPLSYPQTDVFLICFSLVSPASFENVRAKWYPEVRHHCPHTPILLVGTKLDLRDDKDTIERLRDKKLAPITYPQGLAMAREIGSVKYLECSALTQRGLKTVFDEAIR

SEQ ID NO: 70831 - protein, 279 aa, Homo sapiens
MELQDPKMNGALPSDAVGYRQEREGFLPSRGPAPGSKPVQFMDFEGKTSFGMSVFNLSNAIMGSGILGLAYAMAHTGVIFFLALLLCIALLSSYSIHLLLTCAGIAGIRAYEQLGQRAFGPAGKVVVATVICLHNVGAMSSYLFIIKSELPLVIGTFLYMDPEGDWFLKGNLLIIIVSVLIILPLALMKHLGYLGYTSGLSLTCMLFFLVSVIYKKFQLGCAIGHNETAMESEALVGLPSQGLNSSCEAQMFTVDSQMSYTVPIMAFAFVCHPEVLPIY

SEQ ID NO: 70832 - protein, 390 aa, Homo sapiens
MALRLLKLAATSASARVVAAGAQRVRGIHSSVQCKLRYGMWHFLLGDKASKRLTERSRVITVDGNICTGKGKLAKEIAEKLGFKHFPEAGIHYPDSTTGDGKPLATDYNGNCSLEKFYDDPRSNDGNSYRLQSWLYSSRLLQYSDALEHLLTTGQGVVLERSIFSDFVFLEAMYNQGFIRKQCVDHYNEVKSVTICDYLPPHLVIYIDVPVPEVQRRIQKKGDPHEMKITSAYLQDIENAYKKTFLPEMSEKCEVLQYSAREAQDSKKVVEDIEYLKFDKGPWLKQDNRTLYHLRLLVQDKFEVLNYTSIPIFLPEVTIGAHQTDRVLHQFRELGIPYPQRAVQSTREGPEVLLTGLWRWEDLLIGLQLPGRKYSPGYNTEVGDKWIWLK

SEQ ID NO: 70833 - protein, 136 aa, Homo sapiens
MPAVASVPKELYLSSSLKDLNKKTEVKPEKISTKSYVHSALKIFKTAEECRLDRDEERAYVLYMKYVTVYNLIKKRPDFKQQQDYFHSILGPGNIKKAVEEAERLSESLKLRAMVKRMKNVRPKRKEQSQQRNYTQ

SEQ ID NO: 70834 - protein, 302 aa, Homo sapiens
MQNNGCQQQEGGGENTNSISSNGEDSDEAQMRLQLKRKLQRNRTSFTQEQIEALEKEFERTHYPDVFARERLAAKIDLPEARIQVWFSNRRAKWRREEKLRNQRRQASNTPSHIPISSSFSTSVYQPIPQPTTPVSSFTSGSMLGRTDTALTNTYSALPPMPSFTMANNLPMQDSFPLVCQFQFKFPEVNLICLNTGQDYSKKKKKKKKERKYCVNSVSDYGDTTVELSGKKEKWLLEPLQFYNCVLYCTTGEGMDLKQGPLYTEGTISVGTNLHFGIQTFIHFGVLFVNGHLYVIMKKRTM

SEQ ID NO: 70835 - protein, 214 aa, Homo sapiens
MMTSVSSDHCRGAREKPQISAAQSTQPQKQVVQATAEQMRLAQVIFDKNDSDFEAKVKQLMEVTGKNQDECIVALHDCNGDVNKAINILLEGNSDTTSWETVGCKKKNFAKENSENKENREKKSEKESSRGRGNNNRKGRGGNRGREFRGEENGIDCNQVDKPSDRGKRARGRELASNTHNIAQDLSNKSSYGLKGAWKNSVEEWTTEDWTEDH

SEQ ID NO: 70836 - protein, 317 aa, Homo sapiens
  MOD_RES (1)..(1): Any amino acid
XDGLPPKVTGPPPGTPQPRPHEAVILHLVLSPSLSLALYLFLCLSLSFSLSLALSAPPSPPPTRFLWLLLRRLHHGHYRGRGGEPGGLGRSHRHQRQRPQLRYAFKKTWNPKFTLRSHYDGIRSLAFHHSQSALLTASEDGTLKLWNLQKAVTAKKNAALDVEPIHAFRAHRGPVLAVAMGSNSEYCYSGGADACIHSWKIPDLSMDPYDGYDPSVLSHVLEGHGDAVWGLAFSPTSQRLASCSADGTVRIWDPSSSSPACLCTFPTASEHGVPTSVAFTSTEPAHIVASFRSGDTVLYDMEVGSALLTLESRGSSG

SEQ ID NO: 70837 - protein, 69 aa, Homo sapiens
  MOD_RES (1)..(1): Any amino acid
XLTPLTEKDYEGLKRVLRSLQAHKMAWPFLEPVDPNDAPDYYGVIKEPMGLITTNCSLQLLKVQRVNLT

SEQ ID NO: 70838 - protein, 208 aa, Homo sapiens
  MOD_RES (1)..(1): Any amino acid
XRDELRCKIPAGRLRRAARPHRRLGPTGKEVHALKRLRDSANANDVETVQQLLEDGADPCAADDKGRTALHFASCNGNDQIVQLLLDHGADPNQRDGLGNTPLHLECSPQLVPAGARVDALDRAGRTPLHLAKSKLNILQEGHAQCLEAVRLEVKQIIHMLREYLERLGQHEQRERLDDLCTRLQMTSTKEQVDEVTDLLASFTSLSL

SEQ ID NO: 70839 - protein, 143 aa, Homo sapiens
MATSELSCEVSEENCERREAFWAEWKDLTLSTRPEEGCSLHEEDTQRHETYHQQGQCQLPYQRVLPLPIFTPAKMGATKEEREDTPIQLQELLALETALGGQCVDRQEVAEITKQLPPVVPVSKPGALRRSLSRSMSQEAQRG

SEQ ID NO: 70840 - protein, 353 aa, Homo sapiens
GDSHLGGGSREGSFKETITLKWCTPRTNNIELHYCTGAYRISPVDVNSRPSSCLTNFLLNGRSVLLEQPRKSGSKVISHMLSSHGGEIFLHVLSSSRSILEDPPSISEGCGGRVTDYRITVVPLASVIVKESLTEEDVLNCQKTIYNLVDMERKNDPLPISTVGTRGKGPKRDEQYRIMWNELETLVRAHINNSEKHQRVLECLMACRSKPPEEEERKKRGRKREDKEDKSEKAVKDYEQEKSWQDSERLKGILERGKEELAEAEIIKDSPDSPEPPNKKPLVEMDETPQVEKSKGPVSLLSLWSNRINTANSRKHQEFAGRLNSVNNRAELYQHLKEENGMETTENGKASRQ

SEQ ID NO: 70841 - protein, 181 aa, Homo sapiens
  MOD_RES (1)..(1): Any amino acid
XSHYYLHVRADLQATALLASRGFALYNAANLKSIDFHRRIEEKSLAQLKRQMERIRAKQEKHRQGRVDRSRPQDTLGPKDPGLEPVIHSGDYFLFESDSEEEEEAVPEDPRPSAQSAFQLAYQAWVTNAQAVLRRRQQEQEQARQEQAGQLPTGGGPSQEVEPAEGPEEAAAGRSHVVQRV

SEQ ID NO: 70842 - protein, 373 aa, Homo sapiens
MNVDKFLIVCYLKKEVWGFESYSLSGTTCFQWNYFVWSLRFFFSCGSSKYHLTPLPIKKVDYPHKRGQNWGSYVHNSLPRFNWDYRSCFHTWKRASDNRERAYEHSAYGHHERGTGGFDRTRHYDQDYYRDPRERTLQHGLYYASRSRSPNRFDAHDPRYEPRAREQFTLPSVVHRDIYRDDITREVRGRRPERNYQHSRSRSPHSSQSRNQSPQRLASQASRPTRSPSGSGSRSRSSSSDSISSSSSTSSDSSDSSSSSSDDSPARSVQSAAVPAPTSQLLSSLEKDEPRKSFGIKVQNLPVRSTDTSLKDGLFHEFKKFGKVTSVQIHGTSEERYGLVFFRQQEDQEKALTASKGKLFFGMQIEVTAWIGP

SEQ ID NO: 70843 - protein, 97 aa, Homo sapiens
MGLGQGWGWEASCFACLIRSCCQVVTFTFPFGFQGISQSLENVSGYYADARLEVGSTQLRTAGSCSHSFKRSFLGLRKKTNPSSQVSDWRAPWKVSQ

SEQ ID NO: 70844 - protein, 46 aa, Homo sapiens
SQPSSGSGQTGRHDPSISRFIFNPDLRSPSVSSLLIHLPSQFHPML

SEQ ID NO: 70845 - protein, 299 aa, Homo sapiens
  MOD_RES (1)..(1): Any amino acid
XSQLKGNLEEENRHLLDQIQTLMLQNRTLLEQNMESKDLFHVEQRQYIDKLNELRRQKEKLEEKIMDQYKFYDPSPPRRRGNWITLKMRKLIKSKKDINRERQKSLTLTPTRSDSSEGFLQLPHQDSQDSSSVGSNSLEDGQTLGTKKSSMVALKRLPFLRNRPKDKDKMKACYRRSMSMNDLVQSMVLAGQWTGSTENLEVPDDISTGKRRKELGAMAFSTTAINFSTVNSSAGFRSKQLVNNKDTTSFEDISPQGVSDDSSTGSRVHASRPASLDSGRTSTSNSNNNASLHEVKGML

SEQ ID NO: 70846 - protein, 160 aa, Homo sapiens
MEALASTEKMLQDKVNKTSKERQQQVEAVELEAKEVLKKLFPKVSVPSNLSYGEWLHGFEKKAKECMAGTSGSEEVKVLEHKLKEADEMHTLLQLECEKYKSVLAETEGILQKLQRSVEQEENKWKVKVDESHKTIKQMQSSFTSSEQELERLRSENKDI

SEQ ID NO: 70847 - protein, 612 aa, Homo sapiens
MAQILPIRFQEHLQLQNLGINPANIGFSTLTMESDKFICIREKVGEQAQVVIIDMNDPSNPIRRPISADSAIMNPASKVIALKAGKTLQIFNIEMKSKMKARESYVETELIFALAKTNRLAELEEFINGPNNAHIQQVGDRCYDEKMYDAAKLLYNNVSNFGRLASTLVHLGEYQAAVDGARKANSTRTWKEVCFACVDGKEFRLAQMCGLHIVVHADELEELINYYQDRGYFEELITMLEAALGLERAHMGMFTELAILYSKFKPQKMREHLELFWSRVNIPKVLRAAEQAHLWAELVFLYDKYEEYDNAIITMMNHPTDAWKEGQFKDIITKVANVELYYRAIQFYLEFKPLLLNDLLMVLSPRLDHTRAVNYFSKVKQLPLVKPYLRSVQNHNNKSVNESLNNLFITEEDYQALRTSIDAYDNFDNISLAQRLEKHELIEFRRIAAYLFKGNNRWKQSVELCKKDSLYKDAMQYASESKDTELAEELLQWFLQEEKRECFGACLFTCYDLLRPDVVLETAWRHNIMDFAMPYFIQVMKEYLTKVDKLDASESLRKEEEQATETQPIVYGQPQLMLTAGPSVAVPPQAPFGYGYTAPPYGQPQPGFGYSM

SEQ ID NO: 70848 - protein, 40 aa, Homo sapiens
  MOD_RES (1)..(1): Any amino acid
XADNIRYGRVTAGNDEVEAAAQAAGIHDAIMAFPEETCGG

SEQ ID NO: 70849 - protein, 192 aa, Homo sapiens
MVAVNYVGEELWSYFNAPWEKRVDLAWQLMEIAEQLTNNDFEFALYLLDVSFDNFAVGPRDGKVIIVDAENVLVADKRLIRQNKPENWDVWYESKFDDCDKEACLSFSKEILCARATVDHNYYAVCQNLLSRHATWRGTSGGLLHDPPSEIAKDGRLEALLDECANPKKRYGRFQAAKELREYLAQLSNNVR

SEQ ID NO: 70850 - protein, 130 aa, Homo sapiens
  MOD_RES (1)..(1): Any amino acid
XIKIVLEDIFTLWRQVETKVRAKIRKMKVTTKVNRHDKINGKRKTAKEHLRKLSMKEREHREEERQVSEAEENGKLDMKEIHTYMEMFQRAQALRRRAEDYYRCKITPSARKPLCNRCTYNLVLPGSEKK

SEQ ID NO: 70851 - protein, 406 aa, Homo sapiens
MPPSSVQGHPSPEGATAKGSTDIWADLEVGPSWRGALSPSPGEWQQASAGPLHLSVPGPGPAWENPERGSKSRLSFQVDPQQPSAEGPAGLNTDDSDSADESSDLPVIRVIISTKEGSQAKPGSPKKPGDTCGRRSFHRRESYLQVQGPLLISPPRRLTPVVERPAVGELDVPSLKKMQSMVWGKRGVRPSCSGAAVRGPLPRGTLGRKVAQEKKSLEGAPELALRGAFPAWGQRLSAVPPDPASFPPVSGVGLLGKSVRPKEPKHSSPGKKPAGRKTRESQAAAREDNDPNRDEVPRAQLPTQKPELISLSVRRGEYSSGDPNIRAPQVLGTSQPSAFTLRRLVPRCHASSGDWQPPVHPPRPERQQQPPGAQGCPRCILLQREIEDLRDQLAAMQFLTDKFQDL

SEQ ID NO: 70852 - protein, 1272 aa, Homo sapiens
MANDSPAKSLVDIDLSSLRDPAGIFELVEVVGNGTYGQVYKGRHVKTGQLAAIKVMDVTEDEEEEIKLEINMLKKYSHHRNIATYYGAFIKKSPPGHDDQLWLVMEFCGAGSITDLVKNTKGNTLKEDWIAYISREILRGLAHLHIHHVIHRDIKGQNVLLTENAEVKLVDFGVSAQLDRTVGRRNTFIGTPYWMAPEVIACDENPDATYDYRSDLWSCGITAIEMAEGAPPLCDMHPMRALFLIPRNPPPRLKSKKWSKKFFSFIEGCLVKNYMQRPSTEQLLKHPFIRDQPNERQVRIQLKDHIDRTRKKRGEKDETEYEYSGSEEEEEEVPEQEGEPSSIVNVPGESTLRRDFLRLQQENKERSEALRRQQLLQEQQLREQEEYKRQLLAERQKRIEQQKEQRRRLEEQQRREREARRQQEREQRRREQEEKRRLEELERRRKEEEERRRAEEEKRRVEREQEYIRRQLEEEQRHLEVLQQQLLQEQAMLLHDHRRPHPQHSQQPPPPQQERSKPSFHAPEPKAHYEPADRAREVEDRFRKTNHSSPEAQSKQTGRVLEPPVPSRSESFSNGNSESVHPALQRPAEPQVPVRTTSRSPVLSRRDSPLQGSGQQNSQAGQRNSTSIEPRLLWERVEKLVPRPGSGSSSGSSNSGSQPGSHPGSQSGSGERFRVRSSSKSEGSPSQRLENAVKKPEDKKEVFRPLKPADLTALAKELRAVEDVRPPHKVTDYSSSSEESGTTDEEDDDVEQEGADESTSGPEDTRAASSLNLSNGETESVKTMIVHDDVESEPAMTPSKEGTLIVRQSTVDQKRASHHESNGFAGRIHLLPDLLQQSHSSSTSSTSSSPSSSQPTPTMSPQTPQDKLTANETQSASSTLQKHKSSSSFTPFIDPRLLQISPSSGTTVTSVVGFSCDGMRPEAIRQDPTRKGSVVNVNPTNTRPQSDTPEIRKYKKRFNSEILCAALWGVNLLVGTESGLMLLDRSGQGKVYPLINRRRFQQMDVLEGLNVLVTISGKKDKLRVYYLSWLRNKILHNDPEVEKKQGWTTVGDLEGCVHYKVVKYERIKFLVIALKSSVEVYAWAPKPYHKFMAFKSFGELVHKPLLVDLTVEEGQRLKVIYGSCAGFHAVDVDSGSVYDIYLPTHIQCSIKPHAIIILPNTDGMELLVCYEDEGVYVNTYGRITKDVVLQWGEMPTSVAYIRSNQTMGWGEKAIEIRSVETGHLDGVFMHKRAQRLKFLCERNDKVFFASVRSGGSSQVYFMTLGRTSLLSW

SEQ ID NO: 70853 - protein, 413 aa, Homo sapiens
  MOD_RES (1)..(1): Any amino acid
XSVVLPSGSQCAAAAAAAAPPGLRLRLLLLLFSAAALIPTGDGQNLFTKDVTVIEGEVATISCQVNKSDDSVIQLLNPNRQTIYFRDFRPLKDSRFQLLNFSSSELKVSLTNVSISDEGRYFCQLYTDPPQESYTTITVLVPPRNLMIDIQKDTAVEGEEIEVNCTAMASKPATTIRWFKGNTELKGKSEVEEWSDMYTVTSQLMLKVHKEDDGVPVICQVEHPAVTGNLQTQRYLEVQYKPQVHIQMTYPLQGLTREGDALELTCEAIGKPQPVMVTWVRVDDEMPQHAVLSGPNLFINNLNKTDNGTYRCEASNIVGKAHSDYMLYVYDSRAGEEGSIRAVDHAVIGGVVAVVVFAMLCLLIILGRYFARHKGTYFTHEAKGADDAADADTAIINAEGGQNNSEEKKEYFI

SEQ ID NO: 70854 - protein, 56 aa, Homo sapiens
  MOD_RES (1)..(1): Any amino acid
XAKQLVRGEPNVSYICSRYYRAPELIFGATDYTSSIGPGNSNKGANQRNEPKLHRI

SEQ ID NO: 70855 - protein, 225 aa, Homo sapiens
  MOD_RES (1)..(1): Any amino acid
XPDPPPGRVPGAFTQHAYDGKDYISLNEDLRSWTAADTVAQITQRFYEAEEYAEEFRTYLEGECLELLRRYLENGKETLQRADPPKAHVAHHPISDHEATLRCWALGFYPAEITLTWQRDGEEQTQDTELVETRPAGDGTFQKWAAVVVPSGEEQRYTCHVQHEGLPQPLILRWEQSPQPTIPIVGIVAGLVVLGAVVTGAVVAAVMWRKKSSDRNRGSYSQAAV

SEQ ID NO: 70856 - protein, 205 aa, Homo sapiens
MPSILITILSWVSFWINYDASAARVALGITTVLTMTTINTHLRETLPKIPYVKAIDMYLMGCFVFVFMALLEYALVNYIFFGRGPQRQKKAAEKAASANNEKMRLDVNKMDPHENILLSTLEIKNEMATSEAVMGLGDPRSTMLAYDASSIQYRKAGLPRHSFGRNALERHVAQKKSRLRRRASQLKITIPDLTDVNAIDRWSRI

SEQ ID NO: 70857 - protein, 35 aa, Homo sapiens
MEAASRLTSAIKPEIAKMLMELSAGAANFTDQKEF

SEQ ID NO: 70858 - protein, 131 aa, Homo sapiens
MASLSRPSLPSCLCSFLLLLLLQVSSSYADPFYWVSPGVLVLLAVLPVLLLQITLGLVFLCLQYRLRGKLRAEIENLHRTFDPHFLRVPCWKITLFVIVPVLGPLVALIICYNWLHRRLAGQFLEELRNPF

SEQ ID NO: 70859 - protein, 128 aa, Homo sapiens; identical to SEQ ID NO: 44672
  MOD_RES (1)..(1): Any amino acid

SEQ ID NO: 70860 - protein, 349 aa, Homo sapiens
  MOD_RES (1)..(1): Any amino acid
XVSAETVEKWLKRKNNKSEDESAPKEVSRYQDTNMQGVVYELNSYIEQRLDTGGDNQLLLYELSSIIKIATKADGFALYFLGECNNSLCIFTPPGIKEGKPRLIPAGPITQGTTVSAYVAKSRKTLLVEDILGDERFPRGTGLESGTRIQSVLCLPIVTAIGDLIGILELYRHWGKEAFCLSHQEVATANLAWASVAIHQVQVCRGLAKQTELNDFLLDVSKTYFDNIVAIDSLLEHIMIYAKNLVNADRCALFQVDHKNKELYSDLFDIGEEKEGKPVFKKTKEIRTRLLKVVLLGMTLQAVPEKPRLGSLSVTPGNAVFRRRSFWKSCWKNFLVLPDFQLRKELLAK

SEQ ID NO: 70861 - protein, 24 aa, Homo sapiens
MILNKALMLGALALTTVMSPCGGE

SEQ ID NO: 70862 - protein, 415 aa, Homo sapiens
MMQHPLTGATCVALPNVGMCPQLSCALTFMYLQQGNQEAAAAPDTMAQPYASAQFAPPQNGIPAEYTAPHPHPAPEYTGQTTVPEHTLNLYPPAQTHSEQSPADTSAQTVSGTATQTDDAAPTDGQPQTQPSENTENKSQPKRLHVSNIPFRFRDPDLRQMFGQFGKILDVEIIFNERGSKGFGFVTFENSADADRAREKLHGTVVEGRKIEVNNATARVMTNKKTVNPYTNGWKLNPVVGAVYSPEFYAGTVLLCQANQEGSSMYSAPSSLVYTSAMPGFPYPAATAAAAYRGAHLRGRGRTVYNTFRAAAPPPPIPAYGGVVYQDGFYGADIYGGYAAYRYAQPTPATAAAYSDRNQFVFVAADEISCNTSAVTDEFMLPTPTTTHLLQPPPTALVPWLVYTEGDTTVLLHTK

SEQ ID NO: 70863 - protein, 32 aa, Homo sapiens
  MOD_RES (1)..(1): Any amino acid
XKEQEKEKKSVTRSGSVVQAGGQWHNHNLLQP

SEQ ID NO: 70864 - protein, 34 aa, Homo sapiens
DEERDPLLHSFGHLKEVLNSITETGIFLCCPGWS

SEQ ID NO: 70865 - protein, 64 aa, Homo sapiens
MDKKLSLKLNGGRHVQGILRGFDPFMNLVIDECVEMATSGQQNNIGMVVIRGNSIIMLEALERV

SEQ ID NO: 70866 - protein, 48 aa, Homo sapiens
MALVTVQRSPTPSTTSSPCASRWGLAWGLAAQAGLELVASRDPPVSAS

SEQ ID NO: 70867 - protein, 91 aa, Homo sapiens
MVRLDISEGRAAVAAVVGGVVAVGTVLVALSAMGFTSVGIAASSIAAKMMSTAAIANGGGVAAGSLVAILQSVGECSGQDDQSQEMIQPRG

SEQ ID NO: 70868 - protein, 91 aa, Homo sapiens
MGTRKKVHAFVRVKPTDDFAHEMIRYGDDKRSIDIHLKKDIRRGVVNNQQTDWSFKLDGVLHDASQDLVYETVAKDVVSQALDGYNGNLIN

SEQ ID NO: 70869 - protein, 163 aa, Homo sapiens
  MOD_RES (1)..(1): Any amino acid
XSYGSCQFPTLGFVVERFKAIQAFVPEIFHRIKVTHDHKDGIVEFNWKRHRLFNHTACLVLYQLCVEDPMATVVEVRSKPKSKWRPQALDTVELEKLASRKLRINAKETMRIAEKLYTQGEMNSDCTSLLFAISWLAAPRMLRGRRPQWRSTSLRNALWPMAS

SEQ ID NO: 70870 - protein, 174 aa, Homo sapiens
MAEDKETKHGGHKNGRKGGLSGTSFFTWFMVIALLGVWTSVAVVWFDLVDYEEVLAKAKDFRYNLSEVLQGKLGIYDADGDGDFDVDDAKVLLGLTKDGSNENIDSLEEVLNILAEESSDWFYGFLSFLYDIMTPFEMLEEEEEESETADGVDGTSQNEGVQGKTCVILDLHNQ

SEQ ID NO: 70871 - protein, 220 aa, Homo sapiens
MSSMWSEYTIGGVKIYFPYKAYPSQLAMMNSILRGLNSKQHCLLESPTGSGKSLALLCSALAWQQSLSGKPADEGVSEKAEVQLSCCCACHSKDFTNNDMNQGTSRHFNYPSTPPSERNGTSSTCQDSPEKTTLAAKLSAKKQASIYRDENDDFQVEKKRIRPLETTQQIRKRHCFGTEVHNLDAKVDSGKTVKLNSPLEKINSFSPQKPFRFLTFCLKK

SEQ ID NO: 70872 - protein, 118 aa, Homo sapiens
MKSQGQHWYSSSDKNCKVSFREKLLIIDSNLGVQDVENLKFLCIGLVPNKKLEKSSSASDVFEHLLAEDLLSEEDPFFLAELLYIIRQKKLLQHLNCTKEEVERLLPTRQRVSLFRPP

SEQ ID NO: 70873 - protein, 232 aa, Homo sapiens
MEPNDSTSTAVEEPDSLEVLVKTLDSQTRTFIVGAQMNVKEFKEHIAASVSIPSEKQRLIYQGRVLQDDKKLQEYNVGGKVIHLVERAPPQTHLPSGASSGTGSASATHGGGSPPGTRGPGASVHDRNANSYVMVGTFNLPSDGSAVDVHINMEQAPIQSEPRVRLVMAQHMIRDIQTLLSRMETLPYLQCRGGPQPQHSQPPPQPPAVTPEPVALSSQTSEPVESEAPPRE

SEQ ID NO: 70874 - protein, 141 aa, Homo sapiens
MVHAEAFSRPLSRNEVVGLIFRLTIFGAVTYFTIKWMVDAIDPTRKQKVEAQKQAEKLMKQIGVKNVKLSEYEMSIAAHLVDPLNMHVTWSDIAGLDDVITDLKDTVILPIKKKHLFENSRLLQPPKAISIKCINLHIKGN

SEQ ID NO: 70875 - protein, 256 aa, Homo sapiens
MCNTNMSVPTDGAVTTSQIPASEQETLVRPKPLLLKLLKSVGAQKDTYTMKEVLFYLGQYIMTKRLYDEKQQHIVYCSNDLLGDLFGVPSFSVKEHRKIYTMIYRNLVVVNQQESSDSGTSVSENRCHLEGGSDQKDLVQELQEEKPSSSHLVSRPSTSSRRRAISETEENSDELSGERQRKRHKSDSISLSFDESLALCVIREICCERSSSSESTGTPSNPDLDAGVYQVTVYQAGESDTDSFEEDPEISLADYW

SEQ ID NO: 70876 - protein, 139 aa, Homo sapiens
ATGSVPSTPIAHRGPSSSLNTPGSFRRGLDDSTGGTPLTPAARISALNIVGDLLRKVGALESKLASCRNLVYDQSPNRTGGPASGRSSKNRDGGERRPSSTSVPLGDKGLGKRLEFGKPPSHMSSSPLPSAQGVVKMLL

SEQ ID NO: 70877 - protein, 83 aa, Homo sapiens
MHGNKQHLQKDFFLYNASKARSKTYINMREVSQRFRLPPSEYVIVPSTYEPHQEGEFILRVFSEKRNLSEEVENTISVDRPVW

SEQ ID NO: 70878 - protein, 20 aa, Homo sapiens
MKKTQEISKGKRKEDSLTAS

SEQ ID NO: 70879 - protein, 246 aa, Homo sapiens
MSRERGSRSEEPGAGNRESGSREPGLAAAAMSTVDLARVGACILKHAVTGEAVELRSLWREHACVVAGLRRFGCVVCRWIAQDLSSLAGLLDQHGVRLVGVGPEALGLQEFLDGDYFAGELYLDESKQLYKELGFKRLWTQASPEFGQATWCLRRYNSLSILPAALGKPVRDVAAKAKAVGIQGNLSGDLLQSGGLLVVSKGGDKVLLHFVQKSPGDYVPKEHILQVLGISAEVCASDPPQCDREV

SEQ ID NO: 70880 - protein, 756 aa, Homo sapiens
MQCKVILLDGSEYTCDVEKRSRGQVLFDKVCEHLNLLEKDYFGLTYRDAENQKNWLDPAKEIKKQVRSGAWHFSFNVKFYPPDPAQLSEDITRYYLCLQLRDDIVSGRLPCSFVTLALLGSYTVQSELGDYDPDECGSDYISEFRFAPNHTKELEDKVIELHKSHRGMTPAEAEMHFLENAKKLSMYGVDLHHAKDSEGVEIMLGVCASGLLIYRDRLRINRFAWPKVLKISYKRNNFYIKIRPGEFEQFESTIGFKLPNHRAAKRLWKVCVEHHTFFRLLLPEAPPKKFLTLGSKFRYSGRTQAQTRRASALIDRPAPYFERSSSKRYTMSRSLDGASVNENHEIYMKDSMSAAEVGTGQYATTKGISQTNLITTVTPEKKAEEERDEEEDKRRKGEEVTPISAIRHEGKTDSERTDTAADGETTATEELEKTQDDLMKHQTNISELKRTFLETSTDTAVTNEWEKRLSTSPVRLAARQEDAPMIEPLVPEEKMETKTESSGIETEPTVHHLPLSTEKVVQETVLVEERRVVHASGDASYSAGDSGDAAAQPAFTGIKGKEGSALTEGAKEEGGEEVAKAVLEQEETAAASRERQEEQSAAIHISETLEQKPHFESSTVKTETISFGSVSPGGVKLEISTKEVPVVHTETKTITYESSQVDPGTDLEPGVLMSAQTITSETTSTTTTTHITKTVKGGISETRIEKRIVITGDADIDHDQALAQAIKEAKEQHPDMSVTKVVVHKETEITPEDGED

SEQ ID NO: 70881 - protein, 54 aa, Homo sapiens
MLTFMASDSEEEVCDERTSLMSAESPTPRSCQEGRQGPEDGENTAQWPGERGGR

SEQ ID NO: 70882 - protein, 92 aa, Homo sapiens
MPSSVSWGILLLAGLCCLVPVSLAEDPQGDAAQKTDTSHHDQDHPTFNKITPNLAEFAFSLYRQLAHQSNSTNIFFSPVSIATAFAMLSLGT

SEQ ID NO: 70883 - protein, 146 aa, Homo sapiens
MAETVWSTDTGEAVYRSRDPVRNLRLRVHLQRITSSNFLHYQPAAELGKDLIDLATFRPQPTASGHRPEEDEEEEIVIGWQEKLFSQFEVDLYQNETACQSPLDYQYRQEILKLENSGGKKNRRIFTYTDSDRYTNLEEVLGSMWP

SEQ ID NO: 70884 - protein, 782 aa, Homo sapiens
MFPPSGSTGLIPPSHFQARPLSTLPRMAPTWLSDIPLVQPPGHQDVSERRLDTQRPQVTMWERDVSSDRQEPGRRGRSWGLEGSQALSQQAEVIVRQLQELRRLEEEVRLLRETSLQQKMRLEAQAMELEALARAEKAGRAEAEGLRAALAGAEVVRKNLEEGRQRELEEVQRLHQEQLSSLTQAHEEALSSLTSKAEGLEKSLSSLETRRAGEAKELAEAQREAELLRKQLSKTQEDLEAQVTLVENLRKYVGEQVPSEVHSQTWELERQKLLDTMQHLQEDRDSLHATAELLQVRVQSLTHILALQEEELTRKVQPSDSLEPEFTRKCQSLLNRWREKVFALMVQLKAQELEHSDSVKQLKGQVASLQEKVTSQSQEQAILQRSLQDKAAEVEVERMGAKGLQLELSRAQEARRRWQQQTASAEEQLRLVVNAVSSSQIWLETTMAKVEGAAAQLPSLNNRLSYAVRKVHTIRGLIARKLALAQLRQESCPLPPPVTDVSLELQQLREERNRLDAELQLSARLIQQEVGRAREQGEAERQQLSKVAQQLEQELQQTQESLASLGLQLEVARQGQQESTEEAASLRQELTQQQELYGQALQEKVAEVETRLREQLSDTERRLNEARREHAKAVVSLRQIQRRAAQEKERSQELRRLQEEARKEEGQRLARRLQELERDKNLMLATLQQEGLLSRYKQQRLLTVLPSLLDKKKSVVSSPRPPECSASAPVAAAVPTRESIKGSLSVLLDDLQDLSEAISKEEAVCQGDNLDRCSSSNPQMSS

SEQ ID NO: 70885 - protein, 474 aa, Homo sapiens
MLIGDHYLCDVTWATQERISLQWLRRIQNYSVMDICDYDESSGRWNCLVARQHIEMSTTGWVGRFRPSEPHFTLDGNSFYKIISNEEGYRHICYFQIDKKDCTFITKGTWEVIGIEALTSDYLYYISNEYKGMPGGRNLYKIQLSDYTKVTCLSCELNPERCQYYSVSFSKEAKYYQLRCSGPGLPLYTLHSSVNDKGLRVLEDNSALDKMLQNVQMPSKKLDFIILNETKFWYQMILPPHFDKSKKYPLLLDVYAGPCSQKADTVFRLNWATYLASTENIIVASFDGRGSGYQGDKIMHAINRRLGTFEVEDQIEAARQFSKMGFVDNKRIAIWGWSYGGYVTSMVLGSGSGVFKCGIAVAPVSRWEYYDSVYTERYMGLPTPEDNLDHYRNSTVMSRAENFKQVEYLLIHGTADDNVHFQQSAQISKALVDVGVDFQAMWYTDEDHGIASSTAHQHIYTHMSHFIKQCFSLP

SEQ ID NO: 70886 - protein, 310 aa, Homo sapiens
MELDFGHFDERDKTSRNMRGSRMNGLPSPTHSAHCSFYRTRTLQALSNEKKAKKVRFYRNGDRYFKGIVYAVSSDRFRSFDALLADLTRSLSDNINLPQGVRYIYTIDGSRKIGSMDELEEGESYVCSSDNFFKKVEYTKNVNPNWSVNVKTSANMKAPQSLASSNSAQARENKDFVRPKLVTIIRSGVKPRKAVRVLLNKKTAHSFEQVLTDITEAIKLETGVVKKLYTLDGKQVTCLHDFFGDDDVFIACGPEKFRYAQDDFSLDENECRVMKGNPSATAGPKASPTPQKTSAKSPGPMRRSKSPADS

SEQ ID NO: 70887 - protein, 676 aa, Homo sapiens
MVASARVQKLVRRYKLAIATALAILLLQGLVVWSFSGLEEDEAGEKGRQRKPRPLDPGEGSKDTDSSAGRRGSTGRRHGRWRGRAESPGVPVAKVVRAVTSRQRASRRVPPAPPPEAPGRQNLSGAAAGEALVGAAGFPPHGDTGSVEGAPQPTDNGFTPKCEIVGKDALSALARASTKQCQQEIANVVCLHQAGSLMPKAVPRHCQLTGKMSPGIQWDESQAQQPMDGPPVRIAYMLVVHGRAIRQLKRLLKAVYHEQHFFYIHVDKRSDYLHREVVELAQGYDNVRVTPWRMVTIWGGASLLRMYLRSMRDLLEVPGWAWDFFINLSATDYPTRTNEELVAFLSKNRDKNFLKSHGRDNSRFIKKQGLDRLFHECDSHMWRLGERQIPAGIVVDGGSDWFVLTRSFVEYVVYTDDPLVAQLRQFYTYTLLPAESFFHTVLENSLACETLVDNNLRVTNWNRKLGCKCQYKHIVDWCGCSPNDFKPQDFLRLQQVSRPTFFARKFESTVNQEVLEILDFHLYGSYPPGTPALKAYWENTYDAADGPSGLSDVMLTAYTAFARLSLHHAATAAPPMGTPLCRFEPRGLPSSVHLYFYDDHFQGYLVTQAVQPSAQGPAETLEMWLMPQGSLKLLGRSDQASRLQSLENRGLSMLPRLVSNSWPQAVLPLQPPKALG

SEQ ID NO: 70888 - protein, 56 aa, Homo sapiens
MAMESTATAAVAAELVSADKIEDVPAPSTSADKVERDEVSSRCPGWGSSHLLTSAT

SEQ ID NO: 70889 - protein, 709 aa, Homo sapiens
MQGVVYELNSYIEQRLDTGGDNQLLLYELSSIIKIATKADGFALYFLGECNNSLCIFTPPGIKEGKPRLIPAGPITQGTTVSAYVAKSRKTLLVEDILGDERFPRGTGLESGTRIQSVLCLPIVTAIGDLIGILELYRHWGKEAFCLSHQEVATANLAWASVAIHQVQVCRGLAKQTELNDFLLDVSKTYFDNIVAIDSLLEHIMIYAKNLVNADRCALFQVDHKNKELYSDLFDIGEEKEGKPVFKKTKEIRFSIEKGIAGQVARTGEVLNIPDAYADPRFNREVDLYTGYTTRNILCMPIVSRGSVIGVVQMVNKISGSAFSKTDENNFKMFAVFCALALHCANMYHRIRHSECIYRVTMEKLSYHSICTSEEWQGLMQFTLPVRLCKEIELFHFDIGPFENMWPGIFVYMVHRSCGTSCFELEKLCRFIMSVKKNYRRVPYHNWKHAVTVAHCMYAILQNNHTLFTDLERKGLLIACLCHDLDHRGFSNSYLQKFDHPLAALYSTSTMEQHHFSQTVSILQLEGHNIFSTLSSSEYEQVLEIIRKAIIATDLALYFGNRKQLEEMYQTGSLNLNNQSHRDRVIGLMMTACDLCSVTKLWPVTKLTANDIYAEFWAEGDEMKKLGIQPIPMMDRDKKDEVPQGQLGFYNAVAIPCYTTLTQILPPTEPLLKACRDNLSQWEKVIRGEETATWISSPSVAQKAAASED

SEQ ID NO: 70890 - protein, 478 aa, Homo sapiens
MKMSIRTPPRLLELAGRSLLRDQALAMSTLEELPTELFPPLFMEAFSRRRCEALKLMVQAWPFRRLPLRPLIKMPCLEAFQAVLDGLDALLTQGVCPRRWKLQVLDLQDVCENFWMVWSEAMARGSFLNAKRNKTPVQDCPRMRGQQPLTVFVELWLKNRTLDEYLTYLLLWVKQRKDLLHLCCKKLKILGMPFRNIRSILKMVNLDCIQEVEVNCKWVLPILTQFTPYLGHMRNLQKLVLSHMDVSRYVSPEQKKEIVTQFTTQFLKLHCLQKLYMNSVSFLEGHLDQLLSCLKTSLKVLTITNCVLLESDLKHLSQCPSISQLKTLDLSGIRLTNYSLVPLQILLEKVAATLEYLDLDDCGIIDSQVNAILPALSRCFELNAFSFCGNPISMATLENLLSHTIILKNLCVEVYPAPRESYGADGTLCWSRFAQIRAELMNRVRDLRHPKRIFFCIDNCPDCGNRSFYDLEADQYCC

SEQ ID NO: 70891 - protein, 503 aa, Homo sapiens
MTTDDTEVPAMTLAPGHAALETQTLSAETSSRASTPAGPIPEAETRGAKRISPARETRSFTKTSPNFMVLIATSVETSAASGSPEGAGMTTVQTITGSDPEEAIFDTLCTDDSSEEAKTLTMDILTLAHTSTEAKGLSSESSASSDGPHPVITPSRASESSASSDGPHPVITPSRASESSASSDGPHPVITPSWSPGSDVTLLAEALVTVTNIEVINCSITEIETTTSSIPGASDIDLIPTEGVKASSTSDPPALPDSTEAKPHITEVTASAETLSTAGTTESAAPHATVGTPLPTNSATEREVTAPGATTLSGALVTVSRNPLEETSALSVETPSYVKVSGAAPVSIEAGSAVGKTTSFAGSSASSYSPSEAALKNFTPSETPTMDIATKGPFPTSRDPLPSVPPTTTNSSRGTNSTLAKITTSAKTTMKPPTATPTTARTRPTTDVSAGENGGFLLLRLSVASPEDLTDPRVAERLMQQLHRELHAHAPHFQVSLLRVRRG

SEQ ID NO: 70892 - protein, 435 aa, Homo sapiens
MAKKSMPGGRLQSEGGSGLDSSPFLSEANAERIVQTLCTVRGAALKVGQMLSIQDNSFISPQLQHIFERVRQSADFMPRWQMLRVLEEELGRDWQAKVASLEEVPFAAASIGQVHQGLLRDGTEVAVKIQYPGIAQSIQSDVQNLLAVLKMSAALPAGLFAEQSLQALQQELAWECDYRREAACAQNFRQLLANDPFFRVPAVVKELCTTRVLGMELAGGVPLDQCQGLSQDLRNQICFQLLTLCLRELFEFRFMQTDPNWANFLYDASSHQVTLLDFGASREFGTEFTDHYIEVVKAAADGDRDCVLQKSRDLKFLTGFETKAFSDAHVEAVMILGEPFATQGPYDFGSGETARRIQDLIPVLLRHRLCPPPEETYALHRKLAGAFLACAHLRAHIACRDLFQDTYHRYWASRQPDAATAGSLPTKGDSWVDPS

SEQ ID NO: 70893 - protein, 39 aa, Homo sapiens
MLVHLFRVGIRGGPFPGRLLPPLRFQTFSAVSWPWVRHS

SEQ ID NO: 70894 - protein, 100 aa, Homo sapiens
MRPRGLPPLLVVLLGCWASVSAQTDATPAVTTEGLNSTEAALATFGTFPSTRPPGTPRAPGPSSGPRPTPVTDGGYHVPAPGVHSDPTSRGQPRCCSLCL

SEQ ID NO: 70895 - protein, 304 aa, Homo sapiens
MSLLVVSMACVGFFLLQGAWPHEGVHRKPSLLAHPGRLVKSEETVILQCWSDVMFEHFLLHREGMFNDTLRLIGEHHDGVSKANFSISRMKQDLAGTYRCYGSVTHSPYQLSAPSDPLDIVIIGLYEKPSLSAQPGPTVLAGENVTLSCSSRSSYDMYHLSREGEAHERRLPAGTKVNGTFQANFPLGPATHGGTYRCFGSFRDSPYEWSKSSDPLLVSVTGNPSNSWPSPTEPSSETGNPRHLHVLIGTSVVKIPFTILLFFLLHRWCSDKKNAAVMDQEPAGNRTVNSEDSDEQDHQEVSYA

SEQ ID NO: 70896 - protein, 254 aa, Homo sapiens
MEEEVRLKKRKRRRNVDKDPAKEDVEKAKKRRGRPPAEKLSPNPPKLTKQMNAIIDTVINYKDRCNVEKVPSNSQLEIEGNSSGRQLSEVFIQLPSRKELPEYYELIRKPVDFKKIKERIRNHKYRSLGDLEKDVMLLCHNAQTFNLEGSQIYEDSIVLQSVFKSARQKIAKEEESEDESNEEEEEEDEEESESEAKSVKVKIKLNKKDDKGRDKGKGKKRPNRGKAKPVVSDFDSDEEQDEREQSEGSGTDDE

SEQ ID NO: 70897 - protein, 1668 aa, Homo sapiens
MPPAVRRSACSMGWLWIFGAALGQCLGYSSQQQRVPFLQPPGQSQLQASYVEFRPSQGCSPGYYRDHKGLYTGRCVPCNCNGHSNQCQDGSGICVNCQHNTAGEHCERCQEGYYGNAVHGSCRACPCPHTNSFATGCVVNGGDVRCSCKAGYTGTQCERCAPGYFGNPQKFGGSCQPCSCNSNGQLGSCHPLTGDCINQEPKDSSPAEECDDCDSCVMTLLNDLATMGEQLRLVKSQLQGLSASAGLLEQMRHMETQAKDLRNQLLNYRSAISNHGSKIEGLERELTDLNQEFETLQEKAQVNSRKAQTLNNNVNRATQSAKELDVKIKNVIRNVHMLNRIRTWQKTHQGENNGLANSIRDSLNEYEAKLSDLRARLQEAAAQAKQANGLNQENERALGAIQRQVKEINSLQSDFTKYLTTADSSLLQTNIALQLMEKSQKEYEKLAASLNEARQELSDKVRELSRSAGKTSLVEEAEKHARSLQELAKQLEEIKRNASGDELVRCAVDAATAYENILNAIKAAEDAANRAASASESALQTVIKEDLPRKAKTLSSNSDKLLNEAKMTQKKLKQEVSPALNNLQQTLNIVTVQKEVIDTNLTTLRDGLHGIQRGDIDAMISSAKSMVRKANDITDEVLDGLNPIQTDVERIKDTYGRTQNEDFKKALTDADNSVNKLTNKLPDLWRKIESINQQLLPLGNISDNMDRIRELIQQARDAASKVAVPMRFNGKSGVEVRLPNDLEDLKGYTSLSLFLQRPNSRENGGTENMFVMYLGNKDASRDYIGMAVVDGQLTCVYNLGDREAELQVDQILTKSETKEAVMDRVKFQRIYQFARLNYTKGATSSKPETPGVYDMDGRNSNTLLNLDPENVVFYVGGYPPDFKLPSRLSFPPYKGCIELDDLNENVLSLYNFKKTFNLNTTEVEPCRRRKEESDKNYFEGTGYARVPTQPHAPIPTFGQTIQTTVDRGLLFFAENGDRFISLNIEDGKLMVRYKLNSELPKERGVGDAINNGRDHSIQIKIGKLQKRMWINVDVQNTIIDGEVFDFSTYYLGGIPIAIRERFNISTPAFRGCMKNLKKTSGVVRLNDTVGVTKKCSEDWKLVRSASFSRGGQLSFTDLGLPPTDHLQASFGFQTFQPSGILLDHQTWTRNLQVTLEDGYIELSTSDSGGPIFKSPQTYMDGLLHYVSVISDNSGLRLLIDDQLLRNSKRLKHISSSRQSLRLGGSNFEGCISNVFVQRLSLSPEVLDLTSNSLKRDVSLGGCSLNKPPFLMLLKGSTRFNKTKTFRINQLLQDTPVASPRSVKVWQDACSPLPKTQANHGALQFGDIPTSHLLFKLPQELLKPRSQFAVDMQTTSSRGLVFHTGTKNSFMALYLSKGRLVFALGTDGKKLRIKSKEKCNDGKWHTVVFGHDGEKGRLVVDGLRAREGSLPGNSTISIRAPVYLGSPPSGKPKSLPTNSFVGCLKNFQLDSKPLYTPSSSFGVSSCLGGPLEKGIYFSEEGGHVVLAHSVLLGPEFKLVFSIRPRSLTGILIHIGSQPGKHLCVYLEAGKVTASMDSGAGGTSTSVTPKQSLCDGQWHSVAVTIKQHILHLELDTDSSYTAGQIPFPPASTQEPLHLGGAPANLTTLRIPVWKSFFGCLRNIHVNHIPVPVTEALEVQGPVSLNGCPDQ

SEQ ID NO: 70898 - protein, 350 aa, Homo sapiens
MAACTARRALAVGSRWWSRSLTGARWPRPLCAAAGAGAFSPASTTTTRRHLSSRNRPEGKVLETVGVFEVPKQNGKYETGQARLYDRDVASAAPEKAENPAGHGSKEVKGKTHTYYQVLIDARDCPHISQRSQTEAVTFLANHDDSRALYAIPGLDYVSHEDILPYTSTDQVPIQHELFERFLLYDQTKAPPFVARETLRAWQEKNHPWLELSDVHRETTENIRVTVIPFYMGMREAQNSHVYWWRYCIRLENLDSDVVQLRERHWRIFSLSGTLETVRGRGVVGREPVLSKEQPAFQYSSHVSLQASSGHMWGTFRFERPDGSHFDVRIPPFSLESNKDEKTPPSGLHW

SEQ ID NO: 70899 - protein, 461 aa, Homo sapiens
MPSGFQQIGSEDGEPPQQRVTGTLVLAVFSAVLGSLQFGYNIGVINAPQKVIEQSYNETWLGRQGPEGPSSIPPGTLTTLWALSVAIFSVGGMISSFLIGIISQWLGRKRAMLVNNVLAVLGGSLMGLANAAASYEMLILGRFLIGAYSGLTSGLVPMYVGEIAPTHLRGALGTLNQLAIVIGILIAQVLGLESLLGTASLWPLLLGLTVLPALLQLVLLPFCPESPRYLYIIQNLEGPARKSLKRLTGWADVSGVLAELKDEKRKLERERPLSLLQLLGSRTHRQPLIIAVVLQLSQQLSGINAVFYYSTSIFETAGVGQPAYATIGAGVVNTVFTLVSVLLVERAGRRTLHLLGLAGMCGCAILMTVALLLLERVPAMSYVSIVAIFGFVAFFEIGPGPIPWFIVAELFSQGPRPAAMAVAGFSNWTSNFIIGMGFQYVAVGPPAPASHTVGQRWASHS

SEQ ID NO: 70900 - protein, 322 aa, Homo sapiens
MQPPPPGPLGDCLRDWEDLQQDFQNIQETHRLYRLKLEELTKLQNNCTSSITRQKKRLQELALALKKCKPSLPAEAEGAAQELENQMKERQGLFFDMEAYLPKKNGLYLSLVLGNVNVTLLSKQAKFAYKDEYEKFKLYLTIILILISFTCRFLLNSRVTDAAFNFLLVWYYCTLTIRESILINNGSRWAGRALREGSMEWGARTLREAGTGAGGDGGSLLQDQRLVGVPSLRVHLPVGSHADVARRSHVPEIPEPIPLLFHVPELRAVSPVLLPERLPLPPAGAGRAAHHGPHCGGLPVLDVAGPHLPAAFSFLWTLLAAF

SEQ ID NO: 70901 - protein, 234 aa, Homo sapiens
MVQPFTTIPFPPPPQNGIPTEYGVPHTQDYAGQTGEHNLTLYGSTQAHGEQSSNSPSTQNGSLTTEGGAQTDGQQSQTQSSENSESKSTPKRLHVSNIPFRFRDPDLRQMFGQFGKILDVEIIFNERGSKGFGFVTFENSADADRAREKLHGTVVEGRKIEVNNATARVMTNKKMVTPYANGWKLSPVVGAVYGPELYAASSFQADVSLGNDAAVPLSGRGGINTYIPLIIPGF

SEQ ID NO: 70902 - protein, 13 aa, Homo sapiens
MAELNTHVNVKEK

SEQ ID NO: 70903 - protein, 36 aa, Homo sapiens
MKFQYKEDHPFEYRKKEGEKIRKKYPDRVPLASSTS

SEQ ID NO: 70904 - protein, 347 aa, Homo sapiens
MAAGTAVGAWVLVLSLWGAVVGAQNITARIGEPLVLKCKGAPKKPPQRLEWKLNTGRTEAWKVLSPQGGGPWDSVARVLPNSSLFLPAVGIQDEGIFRCQAMNRNGKETKSNYRVRVYQIPGKPEIVDSASELTAGVPNKVGTCVSEGSYPAGTLSWHLDGKPLVPNEKGVSVKEQTRRHPETGLFTLQSELMVTPARGGDPRPTFSCSFSPGLPRHRALRTAPIQPRVWEPVPLEEVQLVVEPEGGAVAPGGTVTLTCEVPAQPSPQIHWMKDGVPLPLPPSPVLILPEIGPQDQGTYSCVATHSSHGPQESRAVSISIIEPGEEGPTAGEGFDKVREAEDSPQHM

SEQ ID NO: 70905 - protein, 112 aa, Homo sapiens
MATGDLKRSLRNLEQVLRLLNYPEEVDCVGLIKGDPAASLPIISYSFTSYSPYVTELIMESNVELIAKNDLRFIDAVYKLLRDQFNYKPILTKKQFIQCGFAEWKIQIVCDI

SEQ ID NO: 70906 - protein, 95 aa, Homo sapiens
MTLGCLAPYRRLGIGTKMLNHVLNICEKDGTFDNIYLHVQISNESAIDFYRKFGFEIIETKKNYYKRIEPADAHVLQKNLKVPSGQNADVQKTDN

SEQ ID NO: 70907 - protein, 375 aa, Homo sapiens
MSLMVVSMACVGFFLLQGAWPHEGGQDKPLLSAWPSAVVPRGGHVTLLCRSRLGFTIFSLYKEDGVPVPELYNKIFWKSILMGPVTPAHAGTYRCRGSHPRSPIEWSAPSNPLVIVVTGLFGKPSLSAQPGPTVRTGENVTLSCSSRSSFDMYHLSREGRAHEPRLPAVPSVNGTFQADFPLGPATHGGTYTCFGSLHDSPYEWSDPSDPLLVSVTGNSSSSSSSPTEPSSKTGIRRHLHILIGTSVAIILFIILFFFLLHCCCSNKKNAAVMDQEPAGDRTVNREDSDDQDPQEVTYAQLDHCVFTQTKITSPSQRPKTPPTDTTMYMELPNAKPRSLSPAHKHHSQALRGSSRETTALSQNRVASSHVPAAGI

SEQ ID NO: 70908 - protein, 133 aa, Homo sapiens
MTSLRWLKLNRTGLCYLPEELAALQKLEHLSVSHNNLTTLHGELSSLPSLRAIVARANSLKNSGVPDDIFKLDDLSVLDLSHNQLTECPRELENAKNMLVLNLSHNSIDTIPNQLFINLTDLLYLDLSENRLE

SEQ ID NO: 70909 - protein, 784 aa, Homo sapiens
MTSGSVFFYILIFGKYFSHGGGQDVKCSLGYFPCGNITKCLPQLLHCNGVDDCGNQADEDNCGDNNGWSLQFDKYFASYYKMTSQYPFEAETPECSFHFFLFITLLFLVPHCHHALPLPLDSVVGSVPVQCLCQGLELDCDETNLRAVPSVSSNVTAMSLQWNLIRKLPPDCFKNYHDLQKLYLQNNKITSISIYAFRGLNSLTKLYLSHNRITFLKPGVFEDLHRLEWLIIEDNHLSRISPPTFYGLNSLILLVLMNNVLTRLPDKPLCQHMPRLHWLDLEGNHIHNLRNLTFISCSNLTVLVMRKNKINHLNENTFAPLQKLDELDLGSNKIENLPPLIFKDLKELSQLNLSYNPIQKIQANQFDYLVKLKSLSLEGIEISNIQQRMFRPLMNLSHIYFKKFQYCGYAPHVRSCKPNTDGISSLENLLASIIQRVFVWVVSAVTCFGNIFVICMRPYIRSENKLYAMSIISLCCADCLMGIYLFVIGGFDLKFRGEYNKHAQLWMESTHCQLVGSLAILSTEVSVLLLTFLTLEKYICIVYPFRCVRPGKCRTITVLILIWITGFIVAFIPLSNKEFFKNYYGTNGVCFPLHSEDTESIGAQIYSVAIFLGINLAAFIIIVFSYGSMFYSVHQSAITATEIRNQVKKEMILAKRFFFIVFTDALCWIPIFVVKFLSLLQVEIPGTITSWVVIFILPINSALNPILYTLTTRPFKEMIHRFWYNYRQRKSMDSKGQKTYAPSFIWVEMWPLQEMPPELMKPDLFTYPCEMSLISQSTRLNSYS

SEQ ID NO: 70910 - protein, 219 aa, Homo sapiens
MGCCGCSGGCGSGCGGCGSGCGGCGSGCGGCGSGCGGCGSGCGGCGSSCCVPICCCKPVCCCVPACSCSSCGSCGGSKGGYGSCGGSKGGCVSCGGSKGGCGSCGGSKGGCGSCGGSKGGCGSCGGSKGGCGSCGCSQCSCCKPCCFSSGCGSSCCQSSCCKPSCCQSSCCKPYCCQSSCCKPCCSSSGCGSSCCQSSCCNPCCSQSSCCVPVCCQCKI

SEQ ID NO: 70911 - protein, 48 aa, Homo sapiens
MVPWVRTMGQKLKQRLRLDVGREICRQYPLFCFLLLCLSAASLLLNSS

SEQ ID NO: 70912 - protein, 352 aa, Homo sapiens
MTQKPHKKPGPGEPLVFGKTFTDHMLMVEWNDKGWGQPRIQPFQNLTLHPASSSLHYSLQLFEGMKAFKGKDQQVRLFRPWLNMDRMLRSAMRLCLPSFDKLELLECIRRLIEVDKDWVPDAAGTSLYVRPVLIGNEPSLGVSQPTRALLFVILCPVGAYFPGGSVTPVSLLADPAFIRAWVGGVGNYKLGGNYGPTVLVQQEALKRGCEQVLWLYGPDHQLTEVGTMNIFVYWTHEDGVLELVTPPLNGVILPGVVRQSLLDMAQTWGEFRVVERTITMKQLLRALEEGRVREVFGSGTACQVCPVHRILYKDRNLHIPTMENGPELILRFQKELKEIQYGIRAHEWMFPV

SEQ ID NO: 70913 - protein, 196 aa, Homo sapiens
MAVEFDGGVVMGSDSRVSAGEAVVNRVFDKLSPLHEHIYCALSGSAADAQAVADMAAYQLELHGIELEEPPLVLAAANVVRNISYKYREDLSAHLMVAGWDQREGGQVYGTLGGMLTRQPFAIGGSGSTFIYGYVDAAYKPGMSPEECRRFTTDAIALAMSRDGSSGGVIYLVTITAAGVDHRVILGNELPKFYDE

SEQ ID NO: 70914 - protein, 49 aa, Homo sapiens
AVVVPSGEEQRYTCHVQHEGLPKPLTLRWGGKGGSYSQAACSDSAQGSD

SEQ ID NO: 70915 - protein, 81 aa, Homo sapiens
MSSEPPPPYPGGPTAPLLEEKSGAPPTPGRSSPAVMQPPPGMPLPPADIGPPPYEPPGHPMPQPGFIPPHMSADGTYMPPG

SEQ ID NO: 70916 - protein, 807 aa, Homo sapiens
  MOD_RES (1)..(1): Any amino acid
XNGGGGSATARGGEYRLPGEGNAGLLGLGPEAAAPGKRIRKPSLLYEGFESPTMASVPALQLTPANPPPPEVSNPKKPGRVTNQLQYLHKVVMKALWKHQFAWPFRQPVDAVKLGLPDYHKIIKQPMDMGTIKRRLENNYYWAASECMQDFNTMFTNCYIYNKPTDDIVLMAQTLEKIFLQKVASMPQEEQELVVTIPKNSHKKGAKLAALQGSVTSAHQVPAVSSVSHTALYTPPPEIPTTVLNIPHPSVISSPLLKSLHSAGPPLLAVTAAPPAQPLAKKKGVKRKADTTTPTPTAILAPGSPASPPGSLEPKAARLPPMRRESGRPIKPPRKDLPDSQQQHQSSKKGKLSEQLKHCNGILKELLSKKHAAYAWPFYKPVDASALGLHDYHDIIKHPMDLSTVKRKMENRDYRDAQEFAADVRLMFSNCYKYNPPDHDVVAMARKLQDVFEFRYAKMPDEPLEPGPLPVSTAMPPGLAKSSSESSSEESSSESSSEEEEEEDEEDEEEEESESSDSEEERAHRLAELQEQLRAVHEQLAALSQGPISKPKRKREKKEKKKKRKAEKHRGRAGADEDDKGPRAPRPPQPKKSKKASGSGGGSAALGPSGFGPSGGSGTKLPKKATKTAPPALPTGYDSEEEEESRPMSYDEKRQLSLDINKLPGEKLGRVVHIIQAREPSLRDSNPEEIEIDFETLKPSTLRELERYVLSCLRKKPRKPYTIKKPVGKTKEELALEKKRELEKRLQDVSGQLNSTKKPPKKANEKTESSSAQQVAVSRLSASSSSSDSSSSSSSSSSSDTSDSDSG

SEQ ID NO: 70917 - protein, 598 aa, Homo sapiens
MLFVDDMAEPRETPEHPLKQIKFLLGRKEEEAVLVGGEWSPSLDGLDPQADPQVLVRTAIRCAQAQTGIDLSGCTKWWRFAEFQYLQPGPPRRLQTVVVYLPDVWTIMPTLEEWEALCQQKAAEAAPPTQEAQGETEPTEQAPDALEQAADTSRRNAETPEATTQQETDTDLPEAPPPPLEPAVIARPGCVNLSLHGIVEDRRPKERISFEVMVLAELFLEMLQRDFGYRVYKMLLSLPEKVVSPPEPEKEEAAKEEATKEEEAIKEEVVKEPKDEAQNEGPATESEAPLKEDGLLPKPLSSGGEEEEKPRGEASEDLCEMALDPELLLLRDDGEEEFAGAKLEDSEVRSVASNQSEMEFSSLQDMPKELDPSAVLPLDCLLAFVFFDANWCGYLHRRDLERILLTLGIRLSAEQAKQLVSRVVTQNICQYRSLQYSRQEGLDGGLPEEVLFGNLDLLPPPGKSTKPGAAPTEHKALVSHNGSLINVGSLLQRAEQQDSGRLYLENKIHTLELKLEESHNRFSATEVTNKTLAAEMQELRVRLAEAEETARTAERQKSQLQRLLQELRRRLTPLQLEIQRVVEKVRWGWTRRQHSSFP

SEQ ID NO: 70918 - protein, 65 aa, Homo sapiens
MAKLLSCVLGPRLYKIYRERDSERAPASVPETPTAVTAPHSSSWDTYYQPRALEKHADSILALVT

SEQ ID NO: 70919 - protein, 1241 aa, Homo sapiens
MEPIYPFARPQMNTRFPSSRMVPFHFPPSKCALWNPTPTGDFIYLHLSYYRNPKLVVTEKTIRLAYRHAKQNKKNSSCFLLGSLTADEDEEGVTLTVDRFDPGREVPECLEITPTASLPGDFLIPCKVHTQELCSREMIVHSVDDFSSALKALQCHICSKDSLDCALARNLSSNLNISQVQGTYKYGYLTMDETRKLLLLLESDPKVYSLPLVGIWLSGITHIYSPQVWACCLRYIFNSSVQERVFSESGNFIIVLYSMTHKEPEFYECFPCDGKIPDFRFQLLTSKETLHLFKNVEPPDKNPIRCELSAESQNAETEFFSKASKNFSIKRSSQKLSSGKMPIHDHDSGVEDEDFSPRPIPSPHPVSQKISKIQPSVPELSLVLDGNFIESNPLPTPLEMVNNENPPLINHLEHLKPLQPQLYDEKHSPEVEAGEPSLRGIPNQLNQDKPALLRHCKVRQPPAYKKGNPHTRNSIKPSSHNGPSHDIFEKLQTVSAGNVQNEEYPIRPSTLNSRQSSLAPQSQPHDFVFSPHNSGRPMELQIPTPPLPSYCSTNVCRCCQHHSHIQYSPLNSWQGANTVGSIQDVQSEALQKHSLFHPSGCPALYCNAFCSSSSPIALRPQGDMGSCSPHSNIEPSPVARPPSHMDLCNPQPCTVCMHTPKTESDNGMMGLSPDAYRFLTEQDRQLRLLQAQIQRLLEAQSLMPCSPKTTAVEDTVQAGRQMELVSVEAQSSPGLHMRKGVSIAVSTGASLFWNAAGEDQEPDSQMKQDDTKISSEDMNFSVDINNEVTSLPGSASSLKAVDIPSFEESNIAVEEEFNQPLSVSNSSSLVVRKEPDVPVFFPSGQLAESVSMCLQTGPTGGASNNSETSEEPKIEHVMQPLLHQPSDNQKIYQDLLGQVNHLLNSSSKETEQPSTKAVIISHECTRTQNVYHTKKKTHHSRLVDKDCVLNATLKQLRSLGVKIDSPTKVKKNAHNVDHASVLACISPEAVISGLNCMSFANVGMSGLSPNGVDLSMEANAIALKYLNENQLSQLSVTRSNQNNCDPFSLLHINTDRSTVGLSLISPNNMSFATKKYMKRYGLLQSSDNSEDEEEPPDNADSKSEYLLNQNLRSIPEQLGGQKEPSKNDHEIINCSNCESVGTNADTPVLRNITNEVLQTKAKQQLTEKPAFLVKNLKPSPAVNLRTGKAEFTQHPEKENEGDITIFPESLQPSETLKQMNSMNSVGTFLDVKRLRQLPKLF

SEQ ID NO: 70920 - protein, 51 aa, Homo sapiens
MGPEALSSLLLLLLVASGDADMKGHFDPAKCRYALGMQDRTIPDSDISASS

SEQ ID NO: 70921 - protein, 40 aa, Homo sapiens
MTRGNQRELARQKNMKKQSDSVKGKRRDDGLSAAARKQSF

SEQ ID NO: 70922 - protein, 9 aa, Homo sapiens
MSFSATILF

SEQ ID NO: 70923 - protein, 358 aa, Homo sapiens
MSPTVIILACLGFFLDQSVWAHVGGQDKPFCSAWPSAVVPQGGHVTLRCHYRRGFNIFTLYKKDGVPVPELYNRIFWNSFLISPVTPAHAGTYRCRGFHPHSPTEWSAPSNPLVIMVTGLYEKPSLTARPGPTVRTGENVTLSCSSQSSFDIYHLSREGEAHELRLPAVPSINGTFQADFPLGPATHGETYRCFGSFHGSPYEWSDASDPLPVSVTGIARHLHAVIRYSVAIILFTILPFFLLHRWCSKKKNAAVMNQEPAGHRTVNREDSDEQDPQEVTYAQLDHCIFTQRKITGPSQRSKRPSTDTSVCIELPNAEPRALSPAHEHHSQALMGSSRETTALSQTQLASSNVPAAGI

SEQ ID NO: 70924 - protein, 134 aa, Homo sapiens
MANEVQDLLSPRKGGHPPAVKAGGMRISKKQEIGTLERHTKKTGFEKTSAIANVAKIQTLDALNDALEKSFALFAQAGKQWSDLSSLQPPPPGFKWFSCLSLPSSWDYSSTINFQQQCTWRIKNPHLLWKRLFH

SEQ ID NO: 70925 - protein, 367 aa, Homo sapiens
MKTKLNIYNMQFLLFVFLVWDPARLVLANIQEDEAKNNITIFTRILDRLLDGYDNRLRPGLGDSITEVFTNIYVTSFGPVSDTDMEYTIDVFFRQKWKDERLKFKGPMNILRLNNLMASKIWTPDTFFHNGKKSVAHNMTMPNKLLRIQDDGTLLYTMRLTVQAECPMHLEDFPMDAHSCPLKFGSYAYTTSEVTYIWTYNASDSVQVAPDGSRLNQYDLLGQSIGKETIKSSTGEYTVMTAHFHLKRKIGYFVIQTYLPCIMTVILSQVSFWLNRESVPARTVFGVTTVLTMTTLSISARNSLPKVAYATAMDWFIAVCYAFVFSALIEFATVNYFTKRGWAWDGKSVVNDKVSESFRVIIIKKIP

SEQ ID NO: 70926 - protein, 129 aa, Homo sapiens
MTKSNGEEPKMGGRMERFQQGVRKRTLLAKKKVQNITKEDVKSYLFRNAFVLLTVTAVIVGTILGFTLRPYRMSYREVKYFSFPGELLMRMLQMLVLPLIISSLVTDNIWLDSLLAIDARMLVLRTTRT

SEQ ID NO: 70927 - protein, 49 aa, Homo sapiens
MKRAAAKHLIERYYHQLTEGCGNEACTNEFCASCPTFLRMDNNAAAIKA

SEQ ID NO: 70928 - protein, 151 aa, Homo sapiens
  MOD_RES (1)..(1): Any amino acid
XPKVVTEEEVNRMLTPSEFLKEMSLTTEQRLAKTRLMCRPQIIELLDMGETTHQKFSGIDLDQALFQPFPSEIIFQNYTPCEVYEVPLILRNNDKIPRLVKVVEESSPYFKVISPKDIGHKVAPGVPSIFRILFTPEENKAFLYRTSYWNS

SEQ ID NO: 70929 - protein, 291 aa, Homo sapiens
MTNDSEGKMGFKHPKIMGNFRGHALPGTFFFIIGLWWCTKSILKYICKKQKRTCYLGSKTLFYRLEILEGITIVGMALTGMAGEQFIPGGPHLMLYDYKQGHWNQLLGWHHFTMYFFFGLLGVADILCFTISSLPVSLTKLMLSNALFVEAFIFYNHTHGREMLDIFVHQLLVLVVFLTGLVAFLEFLVRNNVLLELLRSSLILLQGSWFFQIGFVLYPPSGGPAWDLMDHENILFLTICFCWHYAVTIVIVGMNYAFITWLVKSRLKRLCSSEVGLLKNAEREQESEEEM

SEQ ID NO: 70930 - protein, 220 aa, Homo sapiens
MGPLSPARTLRLWGPRSLGVALGVFMTIGFALQLLGGPFQRRYFRSCLLTASFFPLSETQRLWLALPSPTINPPHQPSASHHLWLPSWPILEASTGLGPVGTTTLATYYGLTLACPFPQRRGPREGIFIPPETPTPHSCRSCLLVLALEPKPSIPMPSSILFPLLLIIAARYQALPLSIWGLHPSSSGVWHGWTLSLTWSWWLSTSMSHWFCWQMPCAGV

SEQ ID NO: 70931 - protein, 90 aa, Homo sapiens
MAKEEPQSISRDLQELQKKLSLLIDSFQNNSKVVAFMKSPVGQYLDSHPFLAFTLLVFIVMSAVPVGFFLLIVVLTTLAALLGVIILEGH

SEQ ID NO: 70932 - protein, 117 aa, Homo sapiens
MKRSLAGRYRCSYQNGSLWSLPSDQLELVATGVFAKPSLSAQPGPAVSSGGDVTLQCQTRYGFDQFALYKEGDPAPYKNPERWYRASFPIITVTAAHSGTYRCYSFSSRDPYLWSAP

SEQ ID NO: 70933 - protein, 388 aa, Homo sapiens
MARRPRHSIYSSDEDDEDFEMCDHDYDGLLPKSGKRHLGKTRWTREEDEKLKKLVEQNGTDDWKVIANYLPNRTDVQCQHRWQKVLNPELIKGPWTKEEDQRVIELVQKYGPKRWSVIAKHLKGRIGKQCRERWHNHLNPEVKKTSWTEEEDRIIYQAHKRLGNRWAEIAKLLPGRTDNAIKNHWNSTMRRKVEQEGYLQESSKASQPAVATSFQKNSHLMGFAQAPPTAQLPATGQPTVNNDYSYYHISEAQNVSSHVPYPVALHVNIVNVPQPAAAAIQRHYNDEDPEKEKRIKELELLLMSTENELKGQQVLPTQNHTCSYPGWHSTTIADHTRPHGDSAPVSCLGEHHSTPSLPADPGSLPEESASPARCRVSGGPCSTSEGQP

SEQ ID NO: 70934 - protein, 1177 aa, Homo sapiens
  MOD_RES (1)..(1): Any amino acid
XNYYYYLPWAHTKPVVTLTSYWEDISHRLDAVNTLLAMAERLQTNIEALKSGIQGKIPANQLAELWLKLIDEVIEDTRYTLPLTEGKANVTVLDTQIRKLRSRSLSQIHEAAVRMRSEATDVKSTLAEIEDWLDKLMQLTEEPQNSMPDIIIWMIRGEKRLAYARIPAHQVLYSTSGENASGKYCGKTQTIFLKYPQEKNNGPKVPVELRVNIWLGLSAVEKKFNSFAEGTFTVFAEMYENQALMFGKWGTSGLVGRHKFSDVTGKIKLKREFFLPPKGWEWEGEWIVDPERSLLTEADAGHTEFTDEVYQNESRYPGGDWKPAEDTYTDANGDKAASPSELTCPPGWEWEDDAWSYDINRAVDEKGWEYGITIPPDHKPKSWVAAEKMYHTHRRRRLVRKRKKDLTQTASSTARAMEELQDQEGWEYASLIGWKFHWKQRSSDTFRRRRWRRKMAPSETHGAAAIFKLEGALGADTTEDGDEKSLEKQKHSATTVFGANTPIVSCNFDRVYIYHLRCYVYQARNLLALDKDSFSDPYAHICFLHRSKTTEIIHSTLNPTWDQTIIFDEVEIYGEPQTVLQNPPKVIMELFDNDQVGKDEFLGRSIFSPVVKLNSEMDITPKLLWHPVMNGDKACGDVLVTAELILRGKDGSNLPILPPQRAPNLYMVPQGIRPVVQLTAIEILAWGLRNMKNFQMASITSPSLVVECGGERVESVVIKNLKKTPNFPSSVLFMKVFLPKEELYMPPLVIKVIDHRQFGRKPVVGQCTIERLDRFRCDPYAGKEDIVPQLKASLLSAPPCRDIVIEMEDTKPLLASKCLSSMSTALSKMASPATVHLTEKEEEIVDWWSKFYASSGEHEKCGQYIQKGYSKLKIYNCELENVAEFEGLTDFSDTFKLYRGKSDENEDPSVVGEFKGSFRIYPLPDDPSVPAPPRQFRELPDSVPQECTVRIYIVRGLELQPQDNNGLCDPYIKITLGKKVIEDRDHYIPNTLNPVFGRMYELSCYLPQEKDLKISVYDYDTFTRDEKVGETIIDLENRFLSRFGSHCGIPEEYCVSGVNTWRDQLRPTQLLQNVARFKGFPQPILSEDGSRIRYGGRDYSLDEFEANKILHQHLGAPEERLALHILRTQGLVPEHVETRTLHSTFQPNISQILPACDHLEHQGRYLGREKHHRRGNE

SEQ ID NO: 70935 - protein, 172 aa, Homo sapiens
MDHLNEATQGKEHSEMSNNVSDPKGPPAKIARLEQNGSPLGRGRLGSTGAKMQGVPLKHSGHLMKTNLRKGTMLPVFCVVEHYENAIEYDCKEEHAEFVLVRKDMLFNQLIEMALLSLGYSHSSAAQAKGLIQVGKWNPVPLSYVTDAPDATVADMLQDVYHVVTLKIQLHR

SEQ ID NO: 70936 - protein, 198 aa, Homo sapiens
MESPEEPGASMDENYFVNYTFKDRSHSGRVAQGIMKLCLEEELFADVTISVEGREFQLHRLVLSAQSCFFRSMFTSNLKEAHNRVIVLQDVSESVFQLLVDYIYHGTVKLRAEELQEIYEVSDMYQLTSLFEECSRFLARTVQVGNCLQVMWLADRHSDPELYTAAKHCAKTHLAQLQNTEEFLHLPHRLLTDIISGK

SEQ ID NO: 70937 - protein, 175 aa, Homo sapiens
  MOD_RES (1)..(1): Any amino acid
XASQGTLQKFVDDTFQAILSVNRPIPIAVKYLFDLLDELAEKHGIEDPGTLHIWKTNSLLLRFWVNALKNPQLIFDVRVSDNVDAILAVIAQTFIDSCTTSEHKVGRVRAVPAAAAGRGLRRKGLWGKPRGLCTELWVGSGSIMGAPSPPSSCLAPPLPPEQDSPVNKLLYAREI

SEQ ID NO: 70938 - protein, 207 aa, Homo sapiens
MAVRALKLLTTLLAVVAAASQAEVESEAGWGMVTPDLLFAEGTAAYARGDWPGVVLSMERALRSRAALRALRLRCRTQCAADFPWELDPDWSPSPAQASGAAALRDLSFFGGLLRRAACLRRCLGPPAAHSLSEEMELEFRKRSPYNYLQVAYFKDLETQPHMQEFRLGVRLYSEEQPQEAVPHLEAALQEYFVAYEECRALCEGPY

SEQ ID NO: 70939 - protein, 264 aa, Homo sapiens
MSKKPPNRPGITFEIGARLEALDYLQKWYPSRIEKIDYEEGKMLVHFERWSHRYDEWIYWDSNRLRPLERPALRKEGLKDEEDFFDFKAGEEVLARWTDCRYYPAKIEAINKEGTFTVQFYDGVIRCLKRMHIKAMPEDAKGQDWIALVKAAAAAAAKNKTGSKPRTSANSNKDKDKDERKWFKVPSKKEETSTCIATPDVEKKEDLPTSSETFGLHVENVPKMVFPQPESTLSNKRKNNQGNSFQAKRARLNKITGRDQLCIL

SEQ ID NO: 70940 - protein, 54 aa, Homo sapiens
MEDTPPSLSCSDCQRHFPSLPELSRHRELLHPSPNQDSEEADSIPRPYRCQQCG

SEQ ID NO: 70941 - protein, 119 aa, Homo sapiens
MYLPVPWNLDSIIQFGLNDTDTCQDGWIYPDAKKRSLINEFDLVCGMETKKDTAQIMFMAGLPIGSLIFRLITDKMGRYPAILLSLLGLIIFGFGTAFMNSFHLYLFFRFGISQSVVGY

SEQ ID NO: 70942 - protein, 457 aa, Homo sapiens
MRPRGLPPLLVVLLGCWASVSAQTDATPAVTTEGLNSTEAALATFGTFPSTRPPGTPRAPGPSSGPRPTPVTDVAVLCVCDLSPAQCDINCCCDPDCSSVDFSVFSACSVPVVTGDSQFCSQKAVIYSLNFTANPPQRVFELVDQINPSIFCIHITNYKPALSFINPEVPDENNFDTLMKTSDGFTLNAESYVSFTTKLDIPTAAKYEYGVPLQTSDSFLRFPSSLTSSLCTDNNPAAFLVNQAVKCTRKINLEQCEEIEALSMAFYSSPEILRVPDSRKKVPITVQSIVIQSLNKTLTRREDTDVLQPTLVNAGHFSLCVNVVLEVKYSLTYTDAGEVTKADLSFVLGTVSSVVVPLQQKFEIHFLQDSCQLPGALVIEVKWTKYGSLLNPQAKIVNVTANLISSSFPEANSGNERTILISTAVTFVDVSAPAEAGFRAPPAINARLPFNFFFPFV

SEQ ID NO: 70943 - protein, 132 aa, Homo sapiens
  MOD_RES (1)..(1): Any amino acid
XQNVEKQEGGWWRGDYGGKKQLWFPSNYVEEMVNPVALEPEREHLDENSPLGDLLRGVLDVPACQIAIRPEGKNNRLFVFSISMASVAHWSLDVAADSQEELQDWVKKIREVAQTADARDLAAEISGPFQHS

SEQ ID NO: 70944 - protein, 178 aa, Homo sapiens
MERAMEQLNRLTRSLRRARTVELPEDNETAVYTLMPMVMADQHRSVSELLSNSKFDVNYAFGRVKRSLLHIAANCGSVECLVLLLKKGANPNYQDISGCTPLHLAARNGQKKCMSKLLEYSADVNICNNEGLTAIHWLAVNGRTELLHDLVQHVSDVDVEDAMGQTALHVACQNGHKT

SEQ ID NO: 70945 - protein, 306 aa, Homo sapiens
RPFPASHHREPLPVGIEEYSQVLHPGQPFDPTFLIGCAPCNVIADILFRKHFDYNDEKFLRLMYLFNENFHLLSTPWLQLYNNFPSFLHYLPGSHRKVIKNVAEVKEYVSERVKEHHQSLDPNCPRDLTDCLLVEMEKEKHSAERLYTMDGITVTVADLFFAGTETTSTTLRYGLLILMKYPEIEEKLHEEIDRVIGPSRIPAIKDRQEMPYMDAVVHEIQRFITLVPSNLPHEATRDTIFRGYLIPKGTVVVPTLDSVLYDNQEFPDPEKFKPEHFLNENGKFKYSDYFKPFSTGKRVCAGEGLA

SEQ ID NO: 70946 - protein, 167 aa, Homo sapiens
MRVVRLLRLRAALTLLGEVPRRPASRGVPGSRRTQKGSGARWEKEKHEDGVKWRQLEHKGPYFAPPYEPLPDGVRFFYEGRPVRLSVAAEEVATFYGRMLDHEYTTKEVFRKNFFNDWRKEMAVEEREVIKSLDKCDFTEIHRYFVDKAAARKVLSREEKQMVTKKK

SEQ ID NO: 70947 - protein, 322 aa, Homo sapiens
KSRISKKPQVPKKPREWKNPESQRGLSGAQDPFPGPAPVPVEVVQKFCRIDKSRKLPHSKAKTRSRLEVAEAEEEETSIKAARSELLLAEEPGFLEGEDGEDTAKICQADIVEAVDIASAAKFGPYRLNYSRTGRHLAFGGRRGHVAALDWVTKKLMCEINVMEAVRDIRFLHSEALLAVAQNRWLHIYDNQGIELHCIRRCDRVTRLEFLPFHFLLATASETGFLTYLDVSVGKIVAALNARAGRLDVMSQNPYNAVIHLGHSNGTASLWSPAMKEPLAKILCHRGGVRAVAVDSTGTYMATSGLDHQLKIFDLRGTYQPL

SEQ ID NO: 70948 - protein, 607 aa, Homo sapiens
MEGGGKPNSSSNSRDDGNSVFPAKASATGAGPAAAEKRLGTPPGGGGAGAKEHGNSVCFKVDGGGGGGGGGGGGEEPAGGFEDAEGPRRQYGFMQRQFTSMLQPGVNKFSLRMFGSQKAVEKEQERVKTAGFWIIHPYSDFRFYWDLIMLIMMVGNLVIIPVGITFFTEQTTTPWIIFNVASDTVFLLDLIMNFRTGTVNEDSSEIILDPKVIKMNYLKSWFVVDFISSIPVDYIFLIVEKGMDSEVYKTARALRIVRFTKILSLLRLLRLSRLIRYIHQWEEIFHMTYDLASAVVRIFNLIGMMLLLCHWDGCLQFLVPLLQDFPPDCWVSLNEMVNDSWGKQYSYALFKAMSHMLCIGYGAQAPVSMSDLWITMLSMIVGATCYAMFVGHATALIQSLDSSRRQYQEKYKQVEQYMSFHKLPADMRQKIHDYYEHRYQGKIFDEENILNELNDPLREEIVNFNCRKLVATMPLFANADPNFVTAMLSKLRFEVFQPGDYIIREGAVGKKMYFIQHGVAGVITKSSKEMKLTDGSYFGEICLLTKGRRTASVRADTYCRLYSLSVDNFNEVLEEYPMMRRAFETVAIDRLDRIAKQTDFPTDAKTI

SEQ ID NO: 70949 - protein, 176 aa, Homo sapiens
  MOD_RES (1)..(1): Any amino acid
XWLSCFCYPLLSISLLGKPPHSSIMSMATGKNLQSIPKKSFCDSSRDRNLTNCSSVMLPSNDDRAPAWFEDFANGLLSAQKLTAALIVLHTVFISITHVHRTKPLWRKSPLTNLWWAVTVPVVLLGQVVQTAVDLQLWTHRDSHVHFGLEDVPLLTWLLGCLSLVLVVVTNEIVKL

SEQ ID NO: 70950 - protein, 1064 aa, Homo sapiens
MARQVSITFKDLAVRFSEEEWRLLEEGQREFYRDVMRENYETLVSVGTAELLPLSAFLSPSEPGRAVGGGSHADEGQEPAGCGDPQGGQPRHSLHLTALVQLVKEIPEFLFGEVKGAMDSPESESRGASLDGERASPEAAAREPCPLRGLLSCLPDGPTSQPHLATTPTDSSCSSGPTGDGVQGSPLPIKTADKPWPTRKEGPGALGGEPSPPTHSPSRRKSHRGQERGTSEAGISPGNSPLQGLINCLKEILVPGPRHPETSPSFLPPLPSLGTSRLTRADLGPGSPPWAVKTEAVSGDCPLQGLLHCLKELPEAQDRHPSPSGVGNRRLQENPGAWKRGSGGPGYLLTPPPHPDLGAGGLLSVKMENSWVQSPPGPASCQPGRQPLSPSATGDTRGVPQPSWGPEAQAASASSSPLEALEACLKGIPPNGSSPSQLPPTSCSQNPQPGDSRSQKPELQPHRSHSEEATREPVLPLGLQSCVRDGPSRPLAPRGTPTSFSSSSSTDWDLDFGSPVGNQGQHPGKGSPPGSSPLQGLENCLKEIPVPVLRPAWPCSSAADRGPRRAEPRNWTADKEGLRAEACESARLGQGRGEAPTRSLHLVSPQVFTSSCVPACHQRGFKDPGATRPGVWRWLPEGSAPKPSPLHCLESALRGILPVRPLRFACVGGPSPSPSPGSSSSFSGSEGEDPRPEPDLWKPLPQERDRLPSCKPPVPLSPCPGGTPAGSSGGSPGEDPRRTEPRYCSGLGAGTAQDPCPVSQLEKRPRVSEASRGLELGHGRPRVAAKTHERLLPQGPPELPSESPPPELPPPEAAPPVLPASSLQPPCHCGKPLQQELHSLGAALAEKLDRLATALAGLAQEVATMRTQVNRLGRRPQGPGPMGQASWMWTLPRGPRWAHGPGHRHLPYWRQKGPTRPKPKILRGQGESCRAGDLQGLSRGTARRARPLPPDAPPAEPPGLHCSSSQQLLSSTPSCHAAPPAHPLLAHTGGHQSPLPPLVPAALPLQGASPPAASADADVPTSGVAPDGIPERPKEPSSLLGGVQRALQEELWGGEHRDPRWGAH

SEQ ID NO: 70951 - protein, 103 aa, Homo sapiens
  MOD_RES (1)..(1): Any amino acid
XFIYQLYSEEGKGVFDCRKNVLGHMQQGGAPSPFDRNFGTKISARAMEWITAKLKEARGRGKKFTTDDSICVLGISKRNVIFQPVAELKKQTDFETVSMQPPR

SEQ ID NO: 70952 - protein, 63 aa, Homo sapiens
MAAEKQVPGGGGGGGSGGGGGSGGGGSGGGRGAGGEENKENERPSAGSKANKEFGDSLSLENY

SEQ ID NO: 70953 - protein, 126 aa, Homo sapiens
MIEAQPPKVSEGKDVLLLVHNLPQNLTGYIWYKGQIRDLYHYITSYVVDGQIIIYGPAYSGRETVYSNASLLIQNVTREDAGSYTLHIIKRGDGTRGVTGYFTFTLYRHSLDSALSLEVTGSSQSL

SEQ ID NO: 70954 - protein, 218 aa, Homo sapiens
MPVKGGTKCIKYLLFGFNFIFWLAGIAVLAIGLWLRFDSQTKSIFEQETNNNNSSFYTGVYILIGAGALMMLVGFLGCCGAVQESQCMLGLFFGFLLVIFAIEIAAAIWGYSHKDEVIKEVQEFYKDTYNKLKTKDEPQRETLKAIHYALNCCGLAGGVEQFISDICPKKDVLETFTVKSCPDAIKEVFDNKFHIIGAVGIGIAVVMVSGRTSSQEGD

SEQ ID NO: 70955 - protein, 663 aa, Homo sapiens
MLGICRGRRKFLAASLSLLCIPAITWIYLFSGSFEDGKPVSLSPLESQAHSPRYTASSQRERESLEVRMREVEEENRALRRQLSLAQGRAPSHRRGNHSKTYSMEEGTGDSENLRAGIVAGNSSECGQQPVVEKCETIHVAIVCAGYNASRDVVTLVKSVLFHRRNPLHFHLIADSIAEQILATLFQTWMVPAVRVDFYNADELKSEVSWIPNKHYSGIYGLMKLVLTKTLPANLERVIVLDTDITFATDIAELWAVFHKFKGQQVLGLVENQSDWYLGNLWKNHRPWPALGRGYNTGVILLLLDKLRKMKWEQMWRLTAERELMGMLSTSLADQDIFNAVIKQNPFLVYQLPCFWNVQLSDHTRSEQCYRDVSDLKVIHWNSPKKLRVKNKHVEFFRNLYLTFLEYDGNLLRRELFGCPSEADVNSENLQKQLSELDEDDLCYEFRRERFTVHRTHLYFLHYEYEPAADSTDVTLVAQLSMDRKSVIQLDLANTKKAMIVPAFETLRYRLSFPKSKAELLSMLDMGTLFTFRYHVWTKGHAPTNFAKWRTATTPYRVEWEADFEPYVVVRRDCPEYDRRFVGFGWNKVAHIMELDVQEYEFIVLPNAYMIHMPHAPSFDITKFRSNKQYRICLKTLKEEFQQDMSRRYGFAALKYLTAENNS

SEQ ID NO: 70956 - protein, 299 aa, Homo sapiens
  MOD_RES (1)..(1): Any amino acid
XREEDIYQFAYCYPYTYTRFQHYLDSLQKRNMDYFFREQLGQSVQQRKLDLLTITSPDNLREGAEQKVVFITGRVHPGETPSSFVCQGIIDFLVSQHPIACVLREYLVFKIAPMLNPDGVYLGNYRCSLMGFDLNRHWLDPSPWVHPTLHGVKQLIVQMYNDPKTSLEFYIDIHAHSTMMNGFMYGNIFEDEERFQRQAIFPKLLCQNAEDFSYSSTSFNRDAVKAGTGRRFLGGLLDHTSYCYTLEVSFYSYIISGTTAAVPYTEEACILSPHPALGQPSSSREYPSLTGQELGPQLR

SEQ ID NO: 70957 - protein, 146 aa, Homo sapiens
MNSGRPETMENLPALYTIFQGEVAMVTDYGAFIKIPGCRKQGLVHRTHMSSCRVDKPSEIVDVGDKVWVKLIGREMKNDRIKVSLSMKVVNQGTGKDLDPNNVIIEQEERRRRSFQDYTGQKITLEAVLNTTCKKCGCKGEEEKET

SEQ ID NO: 70958 - protein, 126 aa, Homo sapiens
MAPSRNGMVLKPHFHKDWQRRVATWFNQPARKIRRRKARQAKARRIAPRPASGPIRPIVRCPTVRYHTKVRAGRGFSLEELRVAGIHKKVARTIGISVDPRRRNKSTESLQANVQRLKEYRSKLIL

SEQ ID NO: 70959 - protein, 73 aa, Homo sapiens
MPSPDSMTFEDIIVDFTQEEWALLDTSQRKLFQDVMLENISHLVSIGKQLCKSVVLSQLEQVEKLSTQRISLL

SEQ ID NO: 70960 - protein, 148 aa, Homo sapiens
MSSTQFNKGPSYGLSAEVKNRLLSKYDPQKEAELRTWIEGLTGLSIGPDFQKGLKDGTILCTLMNKLQPGSVPKINRSMQNWHQLENLSNFIKAMVSYGMNPVDLFEANDLFESGNMTQVQVSLLALAGKVRPREGQPPAQSHTARWM

SEQ ID NO: 70961 - protein, 82 aa, Homo sapiens
MDDDANGDVDVEESDEFLREDLNYHDPTVKHSTFHGEDKLISVEDLWKAWKSSEVYNWTVDEVVQWLITYVELPQYEETFRK

SEQ ID NO: 70962 - protein, 172 aa, Homo sapiens
CKQSTKTEEKLRPTRTSSESIYSRPGSSIPGSPGHTIYAKVDNEILDYKDLAAIPKVKAIYDIERPDLITYEPFYTSGYDDKQERQSLGESPRTLSPTPSAEGYQDVRDRMIHRSTSQGSINSPVYSRHSYTPTTSRSPQHFHRPDQGINIYRKPPIYKQHVLFEVILLLLI

SEQ ID NO: 70963 - protein, 81 aa, Homo sapiens
MAKVSVLNVAVLENPSPFHSPFRFEISFECSEALADDLEWKIIYVGSAESEEFDQILDSVLVGPVPAGRHMFVFQRLMPWV

SEQ ID NO: 70964 - protein, 194 aa, Homo sapiens
MAACGGTCKNKVTVSKPVWDFLSKETPARLARLREEHRVSILIDGETSDIYVLQLSPQGPPPAPPNGLYLARKALKGLLKEAEKELKKAQRQGELMGCLALGGGGEHPEMHRAGPPPLRAAPLLPPGARGLPPPPPPLPPPLPPRLREEAEEQESTCPICLGEIQNAKTLEKCRHSFCEGCITRALQVKKACPM

SEQ ID NO: 70965 - protein, 35 aa, Homo sapiens
MANLFIRKMVNPLLYLSRHTVKPRALSTFLFGSIR

SEQ ID NO: 70966 - protein, 964 aa, Homo sapiens
MAPAEILNGKEISAQIRARLKNQVTQLKEQVPGFTPRLAILQVGNRDDSNLYINVKLKAAEEIGIKATHIKLPRTTTESEVMKYITSLNEDSTVHGFLVQLPLDSENSINTEEVINAIAPEKDVDGLTSINAGKLARGDLNDCFIPCTPKGCLELIKETGVPIAGRHAVVVGRSKIVGAPMHDLLLWNNATVTTCHSKTAHLDEEVNKGDILVVATGQPEMVKGEWIKPGAIVIDCGINYVPDDKKPNGRKVVGDVAYDEAKERASFITPVPGGVGPMTVAMLMQSTVESAKRFLEKFKPGKWMIQYNNLNLKTPVPSDIDISRSCKPKPIGKLAREIGLLSEEVELYGETKAKVLLSALERLKHRPDGKYVVVTGITPTPLGEGKSTTTIGLVQALGAHLYQNVFACVRQPSQGPTFGIKGGAAGGGYSQVIPMEEFNLHLTGDIHAITAANNLVAAAIDARIFHELTQTDKALFNRLVPSVNGVRRFSDIQIRRLKRLGIEKTDPTTLTDEEINRFARLDIDPETITWQRVLDTNDRFLRKITIGQAPTEKGHTRTAQFDISVASEIMAVLALTTSLEDMRERLGKMVVASSKKGEPVSAEDLGVSGALTVLMKDAIKPNLMQTLEGTPVFVHAGPFANIAHGNSSIIADRIALKLVGPEGFVVTEAGFGADIGMEKFFNIKCRYSGLCPHVVVLVATVRALKMHGGGPTVTAGLPLPKAYIQENLELVEKGFSNLKKQIENARMFGIPVVVAVNAFKTDTESELDLISRLSREHGAFDAVKCTHWAEGGKGALALAQAVQRAAQAPSSFQLLYDLKLPVEDKIRIIAQKIYGADDIELLPEAQHKAEVYTKQGFGNLPICMAKTHLSLSHNPEQKGVPTGFILPIRDIRASVGAGFLYPLVGTITIHLQEATLKVWPVSIQAHWELGSISKPREVSPCPEDLKLIVGVSPEVIFSLNSHHV

SEQ ID NO: 70967 - protein, 74 aa, Homo sapiens
MCDLRRPAAGGMMDLAYVCEWEKWSKSTHCPSVPLACAWSCRNLIAFTMDLRSDDQGLLCSCGGTACSLSCRLG

SEQ ID NO: 70968 - protein, 211 aa, Homo sapiens
MAADVSRNSLQAHDNFLAEKTEVLSEDLLQIERRLDTVRSICHHSHKRLVACFQGQHGTDAERRHKKLPLTALAQNMQEASTQLEDSLLGKMLETCGDAENQLALELSQHEVFVEKEIVDPLYGIAEVEIPNIQKQRKQLARLVLDWDSVRARWNQAHKSSGTNFQGLPSKIDTLKEEMDEAGNKVEQCKDQLAADMYNFMAKEGEYGKFF

SEQ ID NO: 70969 - protein, 91 aa, Homo sapiens
  MOD_RES (1)..(1): Any amino acid
XVISIKNYHPKIRIITQMLQYHNKAHLLNIPSWNWKEGDDAICLAELKLGFIAQSCLAQGLSTMLANLFSMRSFIKVSSLIQAALILHGWN

SEQ ID NO: 70970 - protein, 121 aa, Homo sapiens
MATVPGLQPLPTLEQDLEQEEILIVKVEEDFCLEEEPSVETEDPSPETFRQLFRLFCYQEVAGPREALSRLWELCCRWLRPELRTKEQILELLVLEQFLTVLPGEIQARVREQQPESGEEA

SEQ ID NO: 70971 - protein, 1970 aa, Homo sapiens
MHGGGPPSGDSACPLRTIKRVQFGVLSPDELKRMSVTEGGIKYPETTEGGRPKLGGLMDPRQGVIERTGRCQTCAGNMTECPGHFGHIELAKPVFHVGFLVKTMKVLRCVCFFCSKLLVDSNNPKIKDILAKSKGQPKKRLTHVYDLCKGKNICEGGEEMDNKFGVEQPEGDEDLTKEKGHGGCGRYQPRIRRSGLELYAEWKHVNEDSQEKKILLSPERVHEIFKRISDEECFVLGMEPRYARPEWMIVTVLPVPPLSVRPAVVMQGSARNQDDLTHKLADIVKINNQLRRNEQNGAAAHVIAEDVKLLQFHVATMVDNELPGLPRAMQKSGRPLKSLKQRLKGKEGRVRGNLMGKRVDFSARTVITPDPNLSIDQVGVPRSIAANMTFAEIVTPFNIDRLQELVRRGNSQYPGAKYIIRDNGDRIDLRFHPKPSDLHLQTGYKVERHMCDGDIVIFNRQPTLHKMSMMGHRVRILPWSTFRLNLSVTTPYNADFDGDEMNLHLPQSLETRAEIQELAMVPRMIVTPQSNRPVMGIVQDTLTAVRKFTKRDVFLERGEVMNLLMFLSTWDGKVPQPAILKPRPLWTGKQIFSLIIPGHINCIRTHSTHPDDEDSGPYKHISPGDTKVVVENGELIMGILCKKSLGTSAGSLVHISYLEMGHDITRLFYSNIQTVINNWLLIEGHTIGIGDSIADSKTYQDIQNTIKKAKQDVIEVIEKAHNNELEPTPGNTLRQTFENQVNRILNDARDKTGSSAQKSLSEYNNFKSMVVSGAKGSKINISQVIAVVGQQNVEGKRIPFGFKHRTLPHFIKDDYGPESRGFVENSYLAGLTPTEFFFHAMGGREGLIDTAVKTAETGYIQRRLIKSMESVMVKYDATVRNSINQVVQLRYGEDGLAGESVEFQNLATLKPSNKAFEKKFRFDYTNERALRRTLQEDLVKDVLSNAHIQNELEREFERMREDREVLRVIFPTGDSKVVLPCNLLRMIWNAQKIFHINPRLPSDLHPIKVVEGVKELSKKLVIVNGDDPLSRQAQENATLLFNIHLRSTLCSRRMAEEFRLSGEAFDWLLGEIESKFNQAIAHPGEMVGALAAQSLGEPATQMTLNTFHYAGVSAKNVTLGVPRLKELINISKKPKTPSLTVFLLGQSARDAERAKDILCRLEHTTLRKVTANTAIYYDPNPQSTVVAEDQEWVNVYYEMPDFDVARISPWLLRVELDRKHMTDRKLTMEQIAEKINAGFGDDLNCIFNDDNAEKLVLRIRIMNSDENKMQEEEEVVDKMDDDVFLRCIESNMLTDMTLQGIEQISKVYMHLPQTDNKKKIIITEDGEFKALQEWILETDGVSLMRVLSEKDVDPVRTTSNDIVEIFTVLGIEAVRKALERELYHVISFDGSYVNYRHLALLCDTMTCRGHLMAITRHGVNRQDTGPLMKCSFEETVDVLMEAAAHGESDPMKGVSENIMLGQLAPAGTGCFDLLLDAEKCKYGMEIPTNIPGLGAAGPTGMFFGSAPSPMGGISPAMTPWNQGATPAYGAWSPSVGSGMTPGAAGFSPSAASDASGFSPGYSPAWSPTPGSPGSPGPSSPYIPSPGGAMSPSYSPTSPAYEPRSPGGYTPQSPSYSPTSPSYSPTSPSYSPTSPNYSPTSPSYSPTSPSYSPTSPSYSPTSPSYSPTSPSYSPTSPSYSPTSPSYSPTSPSYSPTSPSYSPTSPSYSPTSPSYSPTSPSYSPTSPSYSPTSPSYSPTSPSYSPTSPNYSPTSPNYTPTSPSYSPTSPSYSPTSPNYTPTSPNYSPTSPSYSPTSPSYSPTSPSYSPSSPRYTPQSPTYTPSSPSYSPSSPSYSPTSHKYTPTSPSYSPSSPEYTPTSPKYSPTSPKYSPTSPKYSPTSPTYSPTTPKYSPTSPTYSPTSPVYTPTSPKYSPTSPTYSPTSPKYSPTSPTYSPTSPKGSTYSPTSPGYSPTSPTYSLTSPAISPDDSDEEN

SEQ ID NO: 70972 - protein, 156 aa, Homo sapiens
MERLSVDYGKKSKLEFSIYPAPQVSTAVVEPYNSILTTHTTLEHSDCAFMVDNEAIYDICRRNLDIERPTYTNLNRLISQIVSSITASLRFDGALNVDLTEFQTNLVPYPRIHFPLATYAPVISAEKAYHEQLSVAEITNACFEPANQMVKCDPRH

SEQ ID NO: 70973 - protein, 2624 aa, Homo sapiens
QLKNPKGGAEIGINDSVTITILSNDDAYGIVAFAQNSLYKQVEEMEQDSLVTLNVERLKGTYGRITIAWEADGSISDIFPTSGVILFTEGQVLSTITLTILADNIPELSEVVIVTLTRITTEGVEDSYKGATIDQDRSKSVITTLPNDSPFGLVGWRAASVFIRVAEPKENTTTLQLQIARDKGLLGDIAIHLRAQPNFLLHVDNQATENEDYVLQETIIIMKENIKEAHAEVSILPGAGEVITAYEVPPPLNVLQVPVVRLAGSFGAVNVYWKASPDSAGLEDFKPSHGILEFADKQVTAMIEITIIDDAEFELTETFNISLISVAGGGRLGDDVVVTVVIPQNDSPFGVFGFEEKTVMIDESLSSDDPDSYVTLTVVRSPGGKGTVRLEWTIDEKAKHNLSPLNGTLHFDETESQKTIVLHTLQDTVLEEDRRFTIQLISIDEVEISPVKGSASIIIRGDKRASGEVGIAPSSRHILIGEPSAKYNGTAIISLVRGPGILGEVTVFWRIFPPSVGEFAETSGKLTMRDEQSAVIVVIQALNDDIPEEKSFYEFQLTAVSEGGVLSESSSTANITVVASDSPYGRFAFSHEQLRVSEAQRVNITIIRSSGDFGHVRLWYKTMSGTAEAGLDFVPAAGELLFEAGEMRKSLHVEILDDDYPEGPEEFSLTITKVELQGRGYDFTIQENGLQIDQPPEIGNISIVRIIIMKNDNAEGIIEFDPKYTAFEVEEDVGLIMIPVVRLHGTYGYVTADFISQSSSASPGGVDYILHGSTVTFQHGQNLSFINISIIDDNESEFEEPIEILLTGATGGAVLGRHLVSRIIIAKSDSPFGVIRFLNQSKISIANPNSTMILSLVLERTGGLLGEIQVNWETVGPNSQEALLPQNRDIADPVSGLFYFGEGEGGVRTIILTIYPHEEIEVEETFIIKLHLVKGEAKLDSRAKDVTLTIQEFGDPNGVVQFAPETLSKKTYSEPLALEGPLLITFFVRRVKGTFGEIMVYWELSSEFDITEDFLSTSGFFTIADGESEASFDVHLLPDEVPEIEEDYVIQLVSVEGGAELDLEKSITWFSVYANDDPHGVFALYSDRQSILIGQNLIRSIQINITRLAGTFGDVAVGLRISSDHKEQPIVTENAERQLVVKDGATYKVDVVPIKNQVFLSLGSNFTLQLVTVMLVGGRFYGMPTILQEAKSAVLPVSEKAANSQVGFESTAFQLMNITAGTSHVMISRRGTYGALSVAWTTGYAPGLEIPEFIVVGNMTPTLGSLSFSHGEQRKGVFLWTFPSPGWPEAFVLHLSGVQSSAPGGAQLRSGFIVAEIEPMGVFQFSTSSRNIIVSEDTQMIRLHVQRLFGFHSDLIKVSYQTTAGSAKPLEDFEPVQNGELFFQKFQTEVDFEITIINDQLSEIEEFFYINLTSVEIRGLQKFDVNWSPRLNLDFSVAVITILDNDDLAGMDISFPETTVAVAVDTTLIPVETESTTYLSTSKTTTILQPTNVVAIVTEATGVSAIPEKLVTLHGTPAVSEKPDVATVTANVSIHGTFSLGPSIVYIEEEMKNGTFNTAEVLIRRTGGFTGNVSITVKTFGERCAQMEPNALPFRGIYGISNLTWAVEEEDFEEQTLTLIFLDGERERKVSVQILDDDEPEGQEFFYVFLTNPQGGAQIVEEKDDTGFAAFAMVIITGSDLHNGIIGFSEESQSGLELREGAVMRRLHLIVTRQPNRAFEDVKVFWRVTLNKTVVVLQKDGVNLVEELQSVSGTTTCTMGQTKCFISIELKPEKVPQVEVYFFVELYEATAGAAINNSARFAQIKILESDESQSLVYFSVGSRLAVAHKKATLISLQVARDSGTGLMMSVNFSTQELRSAETIGRTIISPAISGKDFVITEGTLVFEPGQRSTVLDVILTPETGSLNSFPKRFQIVLFDPKGGARIDKVYGTANITLVSDADSQAIWGLADQLHQPVNDDILNRVLHTISMKVATENTDEQLSAMMHLIEKITTEGKIQAFSVASRTLFYEILCSLINPKRKDTRGFSHFAEVTENFAFSLLTNVTCGSPGEKSKTILDSCPYLSILALHWYPQQINGHKFEGKEGDYIRIPERLLDVQDAEIMAGKSTCKLVQFTEYSSQQWFISGNNLPTLKNKVLSLSVKGQSSQLLTNDNEVLYRIYAAEPRIIPQTSLCLLWNQAAASWLSDSQFCKVVEETADYVECACSHMSVYAVYARTDNLSSYNEAFFTSGFICISGLCLAVLSHIFCARYSMFAAKLLTHMMAASLGTQILFLASAYASPQLAEESCSAMAAVTHYLYLCQFSWMLIQSVNFWYVLVMNDEHTERRYLLFFLLSWGLPAFVVILLIVILKGIYHQSMSQIYGLIHGDLCFIPNVYAALFTAALVPLTCLVVVFVVFIHAYQVKPQWKAYDDVFRGRTNAAEIPLILYLFALISVTWLWGGLHMAYRHFWMLVLFVIFNSLQGLYVFMVYFILHNQMCCPMKASYTVEMNGHPGPSTAFFTPGSGMPPAGGEISKSTQNLIGAMEEVPPDWERASFQQGSQASPDLKPSPQNGATFPSSGGYGQGSLIADEESQEFDDLIFALKTGAGLSVSDNESGQGSQEGGTLTDSQIVELRRIPIADTHL

SEQ ID NO: 70974 - protein, 59 aa, Homo sapiens
MATYLEFIQQNEERDGVRFSWNVWPSSRLEATRMVVPLACLLTPLKERPDLPPVQYEPV

SEQ ID NO: 70975 - protein, 192 aa, Homo sapiens
MHTLLAATKDSLAMDPPVVNRPKKSKTKKAPIKTITKAAPAAPPVPAANEIATNKPKITWQALNLPVITQISQALPTTEVTNTQASSVTAQPKKANKMKRVTAKAAQGSQSPTGHEGGTIQLKSPLQVLKLPVISQNIHAPIANESASSQALITSIKPKKASKAKKAANKAIASATEVSLAATATHTATTQG

SEQ ID NO: 70976 - protein, 158 aa, Homo sapiens
MRRNPFGVDICCRKGSRSPLQELYNPIQLELSNTAVLHQMRRDQVTDTCRANSATSRKRRVLTPNDLKHLVVDEDHELIYCYVPKVACTNWKRLMMVLTGRGKYSDPMEIPANEAHVSANLKTLNQYSIPEINHRLKSYMKFLFVREPFERLVSAYRN

SEQ ID NO: 70977 - protein, 80 aa, Homo sapiens
  MOD_RES (1)..(1): Any amino acid
XTKTSKGPFQSQKKNLFHKIVSKYKHKKEKPNVPEKGSGDKWSNKQLFLDAIHPTEEPTTTQEPLVGSQKRKARKTKITH

SEQ ID NO: 70978 - protein, 221 aa, Homo sapiens
MLKNKGHSSKKDNLAVNAVALQDHILHDLQLRNLSVADHSKTQVQKKENKSLKRDTKAIIDTGLKKTTQCPKLEDSEKEYVLDPKPPPLTLAQKLGLIGPPPPPLSSDEWEKVKQRSLLQGDSVQPCPICKEEFELRPQVLLSCSHVFHKACLQAFEKFTNKKTCPLCRKNQYQTRVIHDGARLFRIKCVTRIQAYWRGCVVRKWYRNLRKTVPPTDAKLR

SEQ ID NO: 70979 - protein, 837 aa, Homo sapiens
MAAATRRVFHLQPCENSPTMSQNGYFEDSSYYKCDTDDTFEAREEILGDEAFDTANSSIVSGESIRFFVNVNLEMQATNTENEATSGGCVLLHTSRKYLKLKNFKEEIRAHRDLDGFLAQASIVLNETATSLDNVLRTMLRRFARDPDNNEPNCNLDLLMAMLFTDAGAPMRGKVHLLSDTIQGVTATVTGVRYQQSWLCIICTMKALQKRHVCISRLVRPQNWGENSCEVRFVILVLAPPKMKSTKTAMEVARTFATMFSDIAFRQKLLETRTEEEFKEALVHQRQLLTMVSHGPVAPRTKERSTVSLPAHRHPEPPKCKDFVPFGKGIREDIARRFPLYPLDFTDGIIGKNKAVGKYITTTLFLYFACLLPTIAFGSLNDENTDGAIVIRVICDDYDLDFNSFYAWTGLWNSFFLALYAFFNLSLVMSLFKRSTEEIIALFISITFVLDAVKGTVKIFWKYYYGHYLDDYHTKRTSSLVSLSGLGASLNASLHTALNASFLASPTELPSATHSGQATAVLSLLIMLGTLWLGYTLYQFKKSPYLHPCVREILSDCALPIAVLAFSLISSHGFREIEMSKFRYNPSESPFAMAQIQSLSLRAVSGAMGLGFLLSMLFFIEQNLVAALVNAPENRLVKGTAYHWDLLLLAIINTGLSLFGLPWIHAAYPHSPLHVRALALVEERVENGHIYDTIVNVKETRLTSLGASVLVGLSLLLLPVPLQWIPKPVLYGLFLYIALTSLDGNQLVQRVALLLKEQTAYPPTHYIRRVPQRKIHYFTGLQVLQLLLLCAFGMSSLPYMKMIFPLIMIAMIPIRYILLPRIIEAKYLDVMDAEHRP

SEQ ID NO: 70980 - protein, 58 aa, Homo sapiens
  MOD_RES (1)..(1): Any amino acid
XREAAVRAGVRNAALLRRAGCCDRQRRPPPCGEEAAAAPGQASMTYEPSRGSIFSWTP

SEQ ID NO: 70981 - protein, 92 aa, Homo sapiens
MTELPAPLSYFQNAQMSEDNHLSNTNDNRERQEHNDRRSLGHPEPLSNGRPQGNSRQVVEQDEEEDEELTLKYGAKHVIMLFVPVTLCMVVV

SEQ ID NO: 70982 - protein, 142 aa, Homo sapiens
MEQPSKDFCDSHKKSSKSSTYSASSYSSSGKRQNLACFLTNPHCGSLVNADGHGEVWTDWNNMSKFFQYGWRCTTNENTYSNRTLMGNWNQERYDLRNIVQPKPLPSQFGHYFETTYDTSYNNKMPLSTHRFKREPHWFPGH

SEQ ID NO: 70983 - protein, 661 aa, Homo sapiens
MEDGKPVWAPHPTDGFQMGNIVDIGPDSLTIEPLNQKGKTFLALINQVFPAEEDSKKDVEDNCSLMYLNEATLLHNIKVRYSKDRIYTYVANILIAVNPYFDIPKIYSSEAIKSYQGKSLGTRPPHVFAIADKAFRDMKVLKMSQSIIVSGESGAGKTENTKFVLRYLTESYGTGQDIDDRIVEANPLLEAFGNAKTVRNNNSSRFGKFVEIHFNEKSSVVGGFVSHYLLEKSRICVQGKEERNYHIFYRLCAGASEDIREKLHLSSPDNFRYLNRGCTRYFANKETDKQILQNRKSPEYLKAGSMKDPLLDDHGDFIRMCTAMKKIGLDDEEKLDLFRVVAGVLHLGNIDFEEAGSTSGGCNLKNKSAQSLEYCAELLGLDQDDLRVSLTTRVMLTTAGGTKGTVIKVPLKVEQANNARDALAKTVYSHLFDHVVNRVNQCFPFETSSYFIGVLDIAGFEYFEHNSFEQFCINYCNEKLQQFFNERILKEEQELYQKEGLGVNEVHYVDNQDCIDLIEAKLVGILDILDEENRLPQPSDQHFTSAVHQKHKDHFRLTIPRKSKLAVHRNIRDDEGFIIRHFAGAVCYETTQFVEKNNDALHMSLESLICESRDKFIRELFESSTNNNKDTKQKAGKLSFISVGNKFKRFCFSWSSPARDG

SEQ ID NO: 70984 - protein, 52 aa, Homo sapiens
MSTEGGFGGTSSSDAQQSLQSFWPRVMEEIRNLTVKDFRVQELPLARIKKIM

SEQ ID NO: 70985 - protein, 122 aa, Homo sapiens
MSKKKGLSAEEKRTRMMEIFSETKDVFQLKDLEKIAPKEKGITAMSVKEVLQSLVDDGMVDCERIGTSNYYWAFPSKALHARKHKLEVLESQLSEGSQKHASLQKSIEKAKIGRCETAKQIK

SEQ ID NO: 70986 - protein, 59 aa, Homo sapiens
SCGDSSPDTFSDGLSSSTLPDDHSSYTVPGYMQDLEVEQALTPGELVQVWQETPQGILG

SEQ ID NO: 70987 - protein, 48 aa, Homo sapiens
MSRNLRTALIFGGFISLIGAAFYPIYFRPLMRLEEYRLKVWSDPFGRK

SEQ ID NO: 70988 - protein, 100 aa, Homo sapiens
MTGGTNKTSSSISEILDKVQEDAEDVLFSLGFGQEDHKDTSRIPARFFTTPSQAKGIDFQLFLKSQVRRIEMEDPCLMLASFLHHHNSMWSDRIGFKEET

SEQ ID NO: 70989 - protein, 60 aa, Homo sapiens
MLLSLKPSEAPELDEDEGFGDWSQRPEQRQQHEGAQGALDSGEPPQCRSPEGEQEDRPGL

SEQ ID NO: 70990 - protein, 3062 aa, Homo sapiens
MEEFLQRAKSKLNRSKRLEKVHVVIGPKSCDLDSLISTFTYAYFLDKVSPPGVLCLPVLNIPRTEFNYFTETRFILEELNISESFHIFRDEINLHQLNDEGKLSITLVGSSVLASEDKTLESAVVKVINPVEQSDANVEFRESSSSLVLKEILQEAPELITEQLAHRLRGSILFKWMTMESEKISEKQEEILSILEEKFPNLPPREDIINVLQETQFSAQGLSIEQTMLKDLKELSDGEIKVAISTVSMNLENCLFHSNITSDLKAFTDKFGFDVLILFSSYLSEEQQPRRQIAVYSENMELCSQICCELEECQNPCLELEPFDCGCDEILVYQQEDPSVTCDQVVLVVKEVINRRCPEMVSNSRTSSTEAVAGSAPLSQGSSGIMELYGSDIEPQPSSVNFIENPPDLNDSNQAQVDANVDLVSPDSGLATIRSSRSSKESSVFLSDDSPVGEGAGPHHTLLPGLDSYSPIPEGAVAEEHAWSGEHGEHFDLFNFDPAPMASGQSQQSSHSADYSPADDFFPNSDLSEGQLPAGPEGLDGMGTNMSNYSSSSLLSGAGKDSLVEHDEEFVQRQDSPRDNSERNLSLTDFVGDESPSPERLKNTGKRIPPTPMNSLVESSPSTEEPASLYTEDMTQKATDTGHMGPPQTHARCSSWWGGLEIDSKNIADAWSSSEQESVFQSPESWKEHKPSSIDRRASDSVFQPKSLEFTKSGPWESEFGQPELGSNDIQDKNEESLPFQNLPMEKSPLPNTSPQGTNHLIEDFASLWHSGRSPTAMPEPWGNPTDDGEPAAVAPFPAWSAFGKEDHDEALKNTWNLHPTSSKTPSVRDPNEWAMAKSGFAFSSSELLDNSPSEINNEAAPEIWGKKNNDSRDHIFAPGNPSSDLDHTWTNSKPPKEDQNGLVDPKTRGKVYEKVDSWNLFEENMKKGGSDVLVPWEDSFLSYKCSDYSASNLGEDSVPSPLDTNYSTSDSYTSPTFAGDEKETEHKPFAKEEGFESKDGNSTAEETDIPPQSLQQSSRNRISSGPGNLDMWASPHTDNSSEINTTHNLDENELKTEHTDGKNISMEDDVGESSQSSYDDPSMMQLYNETNRQLTLLHSSTNSRQTAPDSLDLWNRVILEDTQSTATISDMDNDLDWDDCSGGAAIPSDGQTEGYMAEGSEPETRFTVRQLEPWGLEYQEANQVDWELPASDEHTKDSAPSEHHTLNEKSGQLIANSIWDSVMRDKDMSSFMLPGSSHITDSEQRELPPEIPSHSANVKDTHSPDAPAASGTSESEALISHLDKQDTERETLQSDAASLATRLENPGYFPHPDPWKGHGDGQSESEKEAQGATDRGHLDEEEVIASGVENASGISEKGQSDQELSSLVASEHQEICIKSGKISSLAVTFSPQTEEPEEVLEYEEGSYNLDSRDVQTGMSADNLQPKDTHEKHLMSQRNSGETTETSDGMNFTKYVSVPEKDLEKTEECNFLEPENVGGGPPHRVPRSLDFGDVPIDSDVHVSSTCSEITKNLDVKGSENSLPGAGSSGNFDRDTISSEYTHSSASSPELNDSSVALSSWGQQPSSGYQEENQGNWSEQNHQESELITTDGQVEIVTKVKDLEKNRINEFEKSFDRKTPTFLEIWNDSVDGDSFSSLSSPETGKYSEHSGTHQESNLIASYQEKNEHDISATVQPEDARVISTSSGSDDDSVGGEESIEEEIQVANCHVAEDESRAWDSLNESNKFLVTADPKSENIYDYLDSSEPAENENKSNPFCDNQQSSPDPWTFSPLTETEMQITAVEKEKRSSPETGTTGDVAWQISPKASFPKNEDNSQLEMLGFSADSTEWWKASPQEGRLIESPFERELSDSSGVLEINSSVHQNASPWGVPVQGDIEPVETHYTNPFSDNHQSPFLEGNGKNSHEQLWNIQPRQPDPDADKFSQLVKLDQIKEKDSREQTFVSAAGDELTPETPTQEQCQDTMLPVCDHPDTAFTHAEENSCVTSNVSTNEGQETNQWEQEKSYLGEMTNSSIATENFPAVSSPTQLIMKPGSEWDGSTPSEDSRGTFVPDILHGNFQEGGQLASAAPDLWIDAKKPFSLKADGENPDILTHCEHDSNSQASDSPDICHDSEAKQETEKHLSACMGPEVESSELCLTEPEIDEEPIYEPGREFVPSNAELDSENATVLPPIGYQADIKGSSQPASHKGSPEPSEINGDNSTGLQVSEKGASPDMAPILEPVDRRIPRIENVATSIFVTHQEPTPEGDGSWISDSFSPESQPGARALFDGDPHLSTENPALVPDALLASDTCLDISEAAFDHSFSDASGLNTSTGTIDDMSKLTLSEGHPETPVDGDLGKQDICSSEASWGDFEYDVMGQNIDEDLLREPEHFLYGGDPPLEEDSLKQSLAPYTPPFDLSYLTEPAQSAETIEEAGSPEDESLGCRAAEIVLSALPDRRSEGNQAETKNRLPGSQLAVLHIREDPESVYLPVGAGSNILSPSNVDWEVETDNSDLPAGGDIGPPNGASKEISELEEEKTIPTKEPEQIKSEYKEERCTEKNEDRHALHMDYILVNREENSHSKPETCEERESIAELELYVGSKETGLQGTQLASFPDTCQPASLNERKGLSAEKMSSKSDTRSSFESPAQDQSWMFLGHSEVGDPSLDARDSGPGWSGKTVEPFSELGLGEGPQLQILEEMKPLESLALEEASGPVSQSQKSKSRGRAGPDAVTLQAVTHDNEWEMLSPQPVQKNMIPDTEMEEETEFLELGTRISRPNGLLSEDVGMDIPFEEGVLSPSAADMRPEPPNSLDLNDTHPRRIKLTAPNINLSLDQSEGSILSDDNLDSPDEIDINVDELDTPDEADSFEYTGHDPTANKDSGQESESIPEYTAEEEREDNRLWRTVVIGEQEQRIDMKVIEPYRRVISHGGDSGYYGDGLNAIIVFAACFLPDSSRADYHYVMENLFLYVISTLELMVAEDYMIVYLNGATPRRRMPGLGWMKKCYQMIDRRLRKNLKSFIIVHPSWFIRTILAVTRPFISSKFSSKIKYVNSLSELSGLIPMDCIHIPESIINIDLKLKEKP

SEQ ID NO: 70991 - protein, 20 aa, Homo sapiens
MEVSSPSPAQRLRRKKRPMV

SEQ ID NO: 70992 - protein, 532 aa, Homo sapiens
MFGKWKYEKPDGSPVFIAFRSSTKKSVQYDDVPEYKDRLNLSENYTLSISNARISDEKRFVCMLVTEDNVFEAPTIVKVFKQPSKPEIVSKALFLETEQLKKLGDCISEDSYPDGNITWYRNGKVLHPLEGAVVIIFKKEMDPVTQLYTMTSTLEYKTTKADIQMPFTCSVTYYGPSGQKTIHSEQAVFDIYYPTEQVTIQVLPPKNAIKEGDNITLKCLGNGNPPPEEFLFYLPGQPEGIRSSNTYTLTDVRRNATGDYKCSLIDKKSMIASTAITVHYLDLSLNPSGEVTRQIGDALPVSCTISASRNATVVWMKDNIRLRSSPSFSSLHYQDAGNYVCETALQEVEGLKKRESLTLIVEGKPQIKMTKKTDPSGLSKTIICHVEGFPKPAIQWTITGSGSVINQTEESPYINGRYYSKIIISPEENVTLTCTAENQLERTVNSLNVSAISIPEHDEADEISDENREKVNDQAKLIVGIVVGLLLAALVAGVVYWLYMKKSKTASKHVNKDLGNMEENKKLEENNHKTEA

SEQ ID NO: 70993 - protein, 345 aa, Homo sapiens
MMIISTMEPQVSNGPTSNTSNGPSSNNRNCPSPMQTGATTDDSKTNLIVNYLPQNMTQEEFRSLFGSIGEIESCKLVRDKITGQSLGYGFVNYIDPKDAEKAINTLNGLRLQTKTIKVSYARPSSASIRDANLYVSGLPKTMTQKELEQLFSQYGRIITSRILVDQVTGVSRGVGFIRFDKRIEAEEAIKGLNGQKPSGATEPITVKFANNPSQKSSQALLSQLYQSPNRRYPGPLHHQAQRFRLDNLLNMAYGVKRFSPITIDGMTSLVGMNIPGHTGTGWCIFVYNLSPDSDESVLWQLFGPFGAVNNVKVIRDFNTNKCKGFGFVTMTNYDEAAMAIASLNG

SEQ ID NO: 70994 - protein, 86 aa, Homo sapiens
MKVEREIAILKLIEHPHVLKLHDVYENKKYLYLVLEHVSGGELFDYLVKKGRLTPKEARKFFRQIISALDFCHSHSICHRDLKPEN

SEQ ID NO: 70995 - protein, 321 aa, Homo sapiens
SHTDSHLHTRQHCSLFDVSHMLQTKILGSDRVKLMESLVVGDIAELRPNQGTLSLFTNEAGGILDDLIVTNTSEGHLYVVSNAGCWEKDLALMQDKVRELQNQGRDVGLEVLDNALLALQGPTAAQVLQAGVADDLRKLPFMTSAVMEVFGVSGCRVTRCGYTGEDGVEISVPVAGAVHLATAILKNPEVKLAGLAARDSLRLEAGLCLYGNDIDEHTTPVEGSLSWTLGKRRRAAMDFPGAKVIVPQLKGRVQRRRVGLMCEGAPMRAHSPILNMEGTKIGTVTSGCPSPSLKKNVAMGYVPCEYSRPGTMLLVEDPASE

SEQ ID NO: 70996 - protein, 854 aa, Homo sapiens
MHEGSWGISHTRVPTESRPGHVALIAGFYEDVSAVAKGWKENPVEFDSLFNESKYTWSWGSPDILPMFAKGASGDHVYTYSYDAKREDFGAQDATKLDTWVFDNVKDFFHHARNNQSLFSKINEEKIVFFLHLLGIDTNGHAHRPSSRDYKHNIKKVDDGVKEIVSMFNHFYGNDGKTTFIFTSDHGMTDWGSHGAGHPSETLTPLVTWGAGIKYPQRVSAQQFDDAFLKEWRLENWKRLDVNQADIAPLMTSLIGVPFPLNSVGILPVDYLNNTDLFKAESMFTNAVQILEQFKVKMTQKKEVTLPFLFTPFKLLSDSKQFNILRKARSYIKHRKFDEVVSLCKELIHLALKGLSYYHTYDRFFLGVNVVIGFVGWISYASLLIIKSHSNLIKGVSKEVKKPSHLLPCSFVAIGILVAFFLLIQACPWTYYVYGLLPLPIWYAVLREFQVIQDLVVSVLTYPLSHFVGYLLAFTLGIEVLVLSFFYRYMLTAGLTAFAAWPFLTRLWTRAKMTSLSWTFFSLLLAVFPLMPVVGRKPDISLVMGAGLLVLLLSLCVVTSLMKRKDSFIKEELLVHLLQVLSTVLSMYVVYSTQSSLLRKQGLPLMNQIISWATLASSLVVPLLSSPVLFQRLFSILLSLMSTYLLLSTGYEALFPLVLSCLMFVWINIEQETLQQSGVCCKQKLTSIQFSYNTDITQFRQLYLDDIRRAFFLVFFLVTAFFGTGNIASINSFDLASVYCFLTVFSPFMMGALMMWKILIPFVLVMCAFEAVQLTTQLSSKSLFLIVLVISDIMALHFFFLVKDYGSWLDIGTSISHYVIVMSMTIFLVFLNGLAQLLTTKKLRLCGKPKSHFM

SEQ ID NO: 70997 - protein, 101 aa, Homo sapiens
  MOD_RES (1)..(1): Any amino acid
XEEQSRLAARKYARVVQKLGFPAKFLDFKIQNMVGSCDVKFPISYEPELFPGLIYRMIKPRIVLLIFVSGKVVLTGAKVRAEIYEAFENIYPILKGFRKTT

SEQ ID NO: 70998 - protein, 4444 aa, Homo sapiens; identical to SEQ ID NO: 24947

SEQ ID NO: 70999 - protein, 82 aa, Homo sapiens
VDIFNKELLLIPIHLEVHWSLISVDVRRRTITYFDSQRTLNRRCPKYCKHLALSQPFSFTQQDMPKLRRQIYKELCHCKLTV

SEQ ID NO: 71000 - protein, 92 aa, Homo sapiens
MPKGRQKVPHLDAPLGLPTCLWLELAGLFLLVPWVMGLAGTGGPDGQGTGGPSWAVHLESLEGDGEEETLEQQADALAQAAGLVNAGRIGEL

SEQ ID NO: 71001 - protein, 108 aa, Homo sapiens
MATLSVKPSRRFQLPDWHTNSYLLSTNAQLQRDASHQIRQEARVLRNETNNQTIWDEHDNRTRLVERIDTVNRWKEMLDKCLTDLDAEIDALTQRRGFTILARLFSNS

SEQ ID NO: 71002 - protein, 1367 aa, Homo sapiens
MLDRCALVEQRKRSPSVSRDQNRRYDQREEREEYSQYATSDTAMPRSPSDYADRRSQHEPQFYEDSDHLSYRDSNRRSHRHSKEYIVDDEDVESRDEYERQRREEEYQSRYRSDPNLARYPVKPQPYEEQMRIHAEVSRARHERRHSDVSLANADLEDSRISMLRMDRPSRQRSISERRAAMENQRSYSMERTREAQGPSSYAQRTTNHSPPTPRRSPLPIDRPDLRRTDSLRKQHHLDPSSAVRKTKREKMETMLRNDSLSSDQSESVRPPPPKPHKSKKGGKMRQISLSSSEEELASTPEYTSCDDVEIESESVSEKGDMDYNWLDHTSWHSSEASPMSLHPVTWQPSKDGDRLIGRILLNKRLKDGSVPRDSGAMLGLKVVGGKMTESGRLCAFITKVKKGSLADTVGHLRPGDEVLEWNGRLLQGATFEEVYNIILESKPEPQVELVVSRPIGDIPRIPDSTHAQLESSSSSFESQKMDRPSISVTSPMSPGMLRDVPQFLSGQLSSQSLSRRTTPFVPRVQIKLWFDKVGHQLIVTILGAKDLPSREDGRPRNPYVKIYFLPDRSDKNKRRTKTVKKTLEPKWNQTFIYSPVHRREFRERMLEITLWDQARVREEESEFLGEILIELETALLDDEPHWYKLQTHDVSSLPLPHPSPYMPRRQLHGESPTRRLQRSKRISDSEVSDYDCDDGIGVVSDYRHDGRDLQSSTLSVPEQVMSSNHCSPSGSPHRVDVIGRTRSWSPSVPPPQSRNVEQGLRGTRTMTGHYNTISRMDRHRVMDDHYSPDRDSHFLTLPRSRYSQTIDHHHRDGRSHPRTGSVQTSPSSTPVAGRRGRQLPQLPPKGTLDRNNGVKEIEPYEEELDSTRRRYAGTMDIEERNRQMKINKYKQVAGSDPRLEQDYHSKYRSGWDPHRGADNVSTKSSDSDVSDISAVSRTSSASRFSSTSYMSVQSERPGGNKKIRPKGIEEGGKEGDKHEEIVHEKEEVKEERINENEKGKEIAKTCNKEKNRESGDEEKTQDIHEQGKEKEQWNKEDLQRRFSQDDTSVFTSKMQSRQMGISGKNMTKSTSISGDMCSLEKNDGSQSDTAVGTLGTSGKKRRSSLGAKMVAIVGLSRKSRSASQLSQTEAGGKKLRSTVQRSTETGLAVEMRNWMTRQASRESTDGSMNSYSSEGNLIFPGVRLASDSQFSDFLDGLGPAQLVGRQTLATPAMGDIQVGMMDKKGQLEVEIIRARGLVVKPGSKTLPAPYVKVYLLDNGVCIAKKKTKVARKTLEPLYQQLLSFEESPQGKVLQIIVWGDYGRMDHKSFMGVAQILLDELELSNMVIGWFKLFPPSSLVDPTLAPLTRRASQSSLESSTGPSYSRS

SEQ ID NO: 71003 - protein, 152 aa, Homo sapiens
  MOD_RES (1)..(1): Any amino acid
XPEQIGLDESGGGGGSDPGEAPTRAAPGELRSARGPLSSAPEIVHEDLKMGSDGESDQASATSSDEVQSPVRDINKRLSLPADIRLPEGYLEKLTLNSPIFDKPLSRRLRRVSLSEIGFGKLETYIKLDKLGEGTYATVYKGKSKLTDNLVA

SEQ ID NO: 71004 - protein, 248 aa, Homo sapiens
MREEMSLGCQEAFEIFKRDHADSVTIDDNKQILKQRFSEAKALGESINEARSKIGHLKEEITQRHIQQVALGISENMAVPLMPDQQEEKLRSQLEEEKRRYKTMFTRLKALKVEIEHLQLLMDKAKVKLQKEFEVWWAEEATNLQVNSPAVNSLDHTKPFLQTSDSQHEWSQLLSNKSDVNARKILPSPCPSPHSQKQSSTSTPLEDSIPKRPVSSIPLTGDSQTDSDIIAFIKARQSILQKQCLGSN

SEQ ID NO: 71005 - protein, 71 aa, Homo sapiens
  MOD_RES (1)..(1): Any amino acid
XQIYSKDPQNCQEFLGSPELINWKQHLQIQSLIGSQCYKQRATAGFCLRVCHDPSCPSGDGNTCWKVAEIT

SEQ ID NO: 71006 - protein, 114 aa, Homo sapiens
MTPPQQPPPLRSEPGTLGSAASSYSPLGLNGVPGSIWDFVSGSFSPSPSPILSAGPPSSSSASPNGAELARVRRQLDEAKRKIRQWEESWQQVKQVCDAWQREAQEAKERARVA

SEQ ID NO: 71007 - protein, 663 aa, Homo sapiens
MGDSGSRRSTLVSRLPIFRRSINRRHDSLPSSPSSSNTVGVHSSSPSSTNSSSGSTGKRRSIFRTPSISFHHKKGSEPKQEPTNQNLSISNGAQPGHSNMQKLSLEEHIKTRGRHSVGFSSSRNKKITRSLTEDFEREKEHSTNKNVFINCLSSGKSEGDDSGFTEDQTRRSVKQSTRKLLPKSFSSHYKFSKPVLQSQSISLVQQSEFSLEVTQYQEREPVLVRASPSCSVDVTERAGSSLQSPLLSADLTTAQTPSEFLALTEDSVSEMDAFSKSGSMASHCDNFGHNDSTSQMSLNSAAVTKTTTELTGTVPCAIMSPGKYRLEGQCSTESNSLPETSAANQKEVLLQIAELPATSVSHSESNLPADSEREENIGLQNGETMLGTNSPRKLGFYEQHKAIAEHVKGIHPISDSKIIPTSGDHHIFNKTSHGYEANPAKVLASSLSPFREGRFIERRLRSSSEGTAGSSRMILKPKDGNIEEVNSLRKQRAGSSSSKMNSLDVLNNLGSCELDEDDLMLDLEFLEEQSLHPSVCREDSYHSVVSCAAVVLTPMEPMIEMKKREEPEFPEPSKQNLSLKLTKDVDQEARCSHISRMPNSPSADWPLQGVEENGGIDSLPFRLMLQDCTAVKTLLLKMKRVLQEVHLSRMSVSNSTNKNCIIF

SEQ ID NO: 71008 - protein, 94 aa, Homo sapiens
KILDAMNRDCGIPLSHLQVDGGMTSNKILMQLQADILYIPVVKPSMPETTALGAAMAAGAAEGVGVWSLEPEDLSAVTMERFEPQINAEGTFKE

SEQ ID NO: 71009 - protein, 52 aa, Homo sapiens
MTVLQEPVQAAIWQALNHYAYRDAVFLAERLYAEARQIGLPKDQNVTKRALV

SEQ ID NO: 71010 - protein, 114 aa, Homo sapiens
MRRTAFILGSGLLSFVAFWNSVTWHLQRFWGASGYFWQAQWERLLTTFEGKEWILFFIGAIQVPCLFFWSFNGLLLVVDTTGKPNFISRYRIQVGKNEPAGETWPRNGMEVNKE

SEQ ID NO: 71011 - protein, 92 aa, Homo sapiens
MLSSFNEWFWQDRFWLPPNVTWTELEDRDGRVYPHPQDLLAALPLALVLLAMRLAFERFIGLPLSRWLGVRDQTRRQVKPNATLEKHFLTEG

SEQ ID NO: 71012 - protein, 250 aa, Homo sapiens
MQEVETLTSHWTLYMNVGGFLVGLFSSTLLGAWSDSVGRRPLLVLASLGLLLQALVSVFVVQLQLHVGYFVLGRILCALLGDFGGLLAASFASVADVSSSRSRTFRMALLEASIGVAGMLASLLGGHWLRAQGYANPFWLALALLIAMTLYAAFCFGETLKEPKSTRLFTFRHHRSIVQLYVAPAPEKSRKHLALYSLAIFVVITVHFGAQDILTLYELSTPLCWDSKLIGYGSAAQHLPYLTSLLALKL

SEQ ID NO: 71013 - protein, 143 aa, Homo sapiens
MAPKPGAEWSTALSHLVLGVVSLHAAVSTAEASRGAAAGFLLQVLAATTTLAPGLSTHEDCLAGAWVATVIGLPLLAFDFHWVNGDRSSANLLLGGGMVLAVAGGHLGPEGRSVAGQAMLLVVAVTILIVAVFTANTYGMWGG

SEQ ID NO: 71014 - protein, 319 aa, Homo sapiens
  MOD_RES (1)..(1): Any amino acid
XEKKSNYEVLEKDVGLKRFFPKSLLDSVKAKTLRKLIQQTFRQFANLNREESILKFFEILSPVYRFDKECFKCALGSSWIISVELAIGPEEGISYLTDKGCNPTHLADFTQVQTIQYSNSEDKDRKGMLQLKIAGAPEPLTVTAPSLTIAENMADLIDGYCRLVNGTSQSFIIRPQKEGERALPSIPKLANSEKQGMRTHAVSVSETDDYAEIIDEEDTYTMPSTRDYEIQRERIELGRCIGEGQFGDVHQGIYMSPENPALAVAIKTCKNCTSDSVREKFLQEACHYTSLHWNWCRYISDPNVDAAQTPGMQSNNASV

SEQ ID NO: 71015 - protein, 84 aa, Homo sapiens
MLSPERLALPDYEYLGMLETITLLNVRYMKGHTSSALLVKWRGCQNRSAPWFSCPKVLQIDTSATCPHLHGGCSVPAARKQGRY

SEQ ID NO: 71016 - protein, 320 aa, Homo sapiens
  MOD_RES (1)..(1): Any amino acid
XEPPTPPSPAPAPAVAPGGSSESSSGRAAGDTPERKEAAGTGKKVKVRPPPLKKTFDSVDNRVLSEVDFEERFAELPEFRPEEVLPSPTLQSLATSPRAILGSYRKKRKNSTDLDSAPEDPTSPKRKMRRRSSCSSEPNTPKSAKCEGDIFTFDRTEAEDVLGELEYDKVPYSSLRRTLDQRRALVMQLFQDHGFFPSAQATAAFQARYADIFPSKVCLQLKIREVRQKIMQAATPTEQPPGAEAPLPVPPPTGTAAAPAPTPSPAGGPDPTSPSSDSGTAQAAPPLPPPPESGPGQPGWEGAPQPSPPPPGPSTAATGR

SEQ ID NO: 71017 - protein, 76 aa, Homo sapiens
MNDDPSMEENGVERVCPESLLQSREYSSLPLPRHTSSTDGTITSSDPGLEILNMASCDLDRNSLCKKEEDTRSASP

SEQ ID NO: 71018 - protein, 117 aa, Homo sapiens
MDTKEEKKERKQSYFARLKKKKQAKQNAETASAVATRTHTGKEDNNTVVLEPDKCNIAVEEEYMTDEKKKRKSNQLKEIRRTELKRYYSIDDNQNKTHDKKEKKMVVQKPHGTMEYT

SEQ ID NO: 71019 - protein, 1286 aa, Homo sapiens
GPGARGRRRRRRPMSPPPPPPPVRALPLLLLLAGPGAAAPPCLDGSPCANGGRCTQLPSREAACLCPPGWVGERCQLEDPCHSGPCAGRGVCQSSVVAGTARFSCRCPRGFRGPDCSLPDPCLSSPCAHGARCSVGPDGRFLCSCPPGYQGRSCRSDVDECRVGEPCRHGGTCLNTPGSFRCQCPAGYTGPLCENPAVPCAPSPCRNGGTCRQSGDLTYDCACLPGFEGQNCEVNVDDCPGHRCLNGGTCVDGVNTYNCQCPPEWTGQFCTEDVDECQLQPNACHNGGTCFNTLGGHSCVCVNGWTGESCSQNIDDCATAVCFHGATCHDRVASFYCACPMGKTGLLCHLDDACVSNPCHEDAICDTNPVNGRAICTCPPGFTGGACDQDVDECSIGANPCEHLGRCVNTQGSFLCQCGRGYTGPRCETDVNECLSGPCRNQATCLDRIGQFTCICMAGFTGTYCEVDIDECQSSPCVNGGVCKDRVNGFSCTCPSGFSGSTCQLDVDECASTPCRNGAKCVDQPDGYECRCAEGFEGTLCDRNVDDCSPDPCHHGRCVDGIASFSCACAPGYTGTRCESQVDECRSQPCRHGGKCLDLVDKYLCRCPSGTTGVNCEVNIDDCASNPCTFGVCRDGINRYDCVCQPGFTGPLCNVEINECASSPCGEGGSCVDGENGFRCLCPPGSLPPLCLPPSHPCAHEPCSHGICYDAPGGFRCVCEPGWSGPRCSQSLARDACESQPCRAGGTCSSDGMGFHCTCPPGVQGRQCELLSPCTPNPCEHGGRCESAPGQLPVCSCPQGWQDPCLNGGSCQDGVGSFSCSCLPGFAGPRCARDVDECLSNPCGPGTCTDHVASFTCTCPPGYGGFHCEQDLPDCSPSSCFNGGTCVDGVNSFSCLCRPGYTGAHCQHEADPCLSRPCLHGGVCSAAHPGFRCTCLESFTGPQCQTLVDWCSRQPCQNGGRCVQTGAYCLCPPGWSGRLCDIRSLPCREAAAQIGVRLEQLCQAGGQCVDEDSSHYCVCPEGRTGSHCEQEVDPCLAQPCQHGGTCRGYMGGYMCECLPGYNGDNCEDDVDECASQPCQHGGSCIDLVARYLCSCPPGTLGVLCEINEDDCGPGPPLDSGPRCLHNGTCVDLVGGFRCTCPPGYTGLRCEADINECRSGACHAAHTRDCLQDPGGGFRCLCHAGFSGPRCQTVLSPCESQPCQHGGQCRPSPGPGGGLTFTCHCAQPFWGPRCERVARSCRELQCPVGVPCQQTPRGPRCACPPGLSGPSCRSFPGSPPGASNASC

SEQ ID NO: 71020 - protein, 25 aa, Homo sapiens
MGDPFMLQQSTNPAPGILGPPPPSF

SEQ ID NO: 71021 - protein, 51 aa, Homo sapiens
  MOD_RES (1)..(1): Any amino acid
XQLRVFRSGRPRRLRVLRINRTSVALRLAGTGRFVAKTPGHPGSWEMNCLG

SEQ ID NO: 71022 - protein, 70 aa, Homo sapiens
MLDKWEEKAREGKSFDIFCDVGHMALNTLMKCTFGRGDTGLGHSRDSSYYLAVSDLTLLMQQRLVSFQYH

SEQ ID NO: 71023 - protein, 51 aa, Homo sapiens
MYPESTTGSPARLSLRQTGSPGMIYSTRYGSPKRQLQFYRNLGKSGLRVSC

SEQ ID NO: 71024 - protein, 105 aa, Homo sapiens
  MOD_RES (1)..(1): Any amino acid
XGLRKRGRSGSAAQAEGLCKQWLQRAWQERRLLLREPRYTLLVAACLCLAEVGITFWVIHRVACTQLVSCTSLWGCTMPPAEALTSAWPRTSLLCSTWLPCCLSS

SEQ ID NO: 71025 - protein, 50 aa, Homo sapiens
MEAGEGKERVPKQRKYHSWNYFLNRTCPGLGCRNQQSPKLHNQSQFPLSS

SEQ ID NO: 71026 - protein, 815 aa, Homo sapiens
MERGKMAEAESLETAAEHERILREIESTDTACIGPTLRSVYDGEEHGRFMEKLETRIRNHDREIEKMCNFHYQGFVDSITELLKVRGEAQKLKNQVTDTNRKLQHEGKELVIAMEELKQCRLQQRNISATVDKLMLCLPVLEMYSKLRDQMKTKRHYPALKTLEHLEHTYLPQVSHYRFCKVMVDNIPKLREEIKDVSMSDLKDFLESIRKHSDKIGETAMKQAQQQRNLDNIVLQQPRIGSKRKSKKDAYIIFDTEIESTSPKSEQDSGILDVEDEEDDEEVPGAQDLVDFSPVYRCLHIYSVLGARETFENYYRKQRRKQARLVLQPPSNMHETLDGYRKYFNQIVGFFVVEDHILHTTQGLVNRAYIDELWEMALSKTIAALRTHSSYCSDPNLVLDLKNLIVLFADTLQVYGFPVNQLFDMLLEIRDQYSETLLKKWAGIFRNILDSDNYSPIPVTSEEMYKKVVGQFPFQDIELEKQPFPKKFPFSEFVPKVYNQIKEFIYACLKFSEDLHLSSTEVDDMIRKSTNLLLTRTLSNSLQNVIKRKNIGLTELVQIIINTTHLEKSCKYLEEFITNITNVLPETVHTTKLYGTTTFKDARHAAEEEIYTNLNQKIDQFLQLADYDWMTGDLGNKASDYLVDLIAFLRSTFAVFTHLPGKVAQTACMSACKHLATSLMQLLLEAEVRQLTLGALQQFNLDVRECEQFARSGPVPGFQEDTLQLAFIDLRQLLDLFIQWDWSTYLADYGQPNCKYLRVNPVTALTLLEKISREMKDTSRKNNMFAQFRKNERDKQKLIDTVAKQLRGLISSHHS

SEQ ID NO: 71027 - protein, 189 aa, Homo sapiens
  MOD_RES (1)..(1): Any amino acid
XATLQQLEPVTGQVSVLVMCHTRELAFQISKEYERFSKYMPNVKVAVFFGGLSIKKDEEVLKKNCPHIVVGTPGRILALARNKSLNLKHIKHFILDECDKMLEQLDMRRDVQEIFRMTPHEKQVMMFSATLSKEIRPVCRKFMQDPMEIFVDDETKLTLHGLQQYYVKLKDNEKNRKLFDLLDVLEFNQ

SEQ ID NO: 71028 - protein, 1283 aa, Homo sapiens
MAKQLNLPENTDDWTKEDVNQWLESHKIDQKHREILTEQDVNGAVLKWLKKEHLVDMGITHGPAIQIEELFKELRKTAIEDSIQTSKMGKPSKNAPKDQTVSQKERRETSKQKQKGKENPDMANPSAMSTTAKGSKSLKVELIEDKIDYTKERQPSIDLTCVSYPFDEFSNPYRYKLDFSLQPETGPGNLIDPIHEFKAFTNTATATEEDVKMKFSNEVFRFASACMNSRTNGTIHFGVKDKPHGKIVGIKVTNDTKEALINHFNLMINKYFEDHQVQQAKKCIREPRFVEVLLPNSTLSDRFVIEVDIIPQFSECQYDYFQIKMQNYNNKIWEQSKKFSLFVRDGTSSKDITKNKVDFRAFKADFKTLAESRKAAEEKFRAKTNKKEREGPKLVKLLTGNQDLLDNSYYEQYILVTNKCHPDQTKHLDFLKEIKWFAVLEFDPESNINGVVKAYKESRVANLHFPSVYVEQKTTPNETISTLNLYHQPSWIFCNGRLDLDSEKYKPFDPSSWQRERASDVRKLISFLTHEDIMPRGKFLVVFLLLSSVDDPRDPLIETFCAFYQDLKGMENILCICVHPHIFQGWKDLLEARLIKHQDEISSQCISALSLEEINGTILKLKSVTQSSKRLLPSIGLSTVLLKKEEDIMTALEIICENECEGTLLEKDKNKFLEFKASKEEDFYRGGKVSWWNFYFSSESYSSPFVKRDKYERLEAMIQNCADSSKPTSTKIIHLYHHPGCGGTTLAMHILWELRKKFRCAVLKNKTVDFSEIGEQVTSLITYGAMNRQEYVPVLLLVDDFEEQDNVYLLQYSIQTAIAKKYIRYEKPLVIILNCMRSQNPEKSARIPDSIAVIQQLSPKEQRAFELKLKEIKEQHKNFEDFYSFMIMKTNFNKEYIENVVRNILKGQNIFTKEAKLFSFLALLNSYVPDTTISLSQCEKFLGIGNKKAFWGTEKFEDKMGTYSTILIKTEVIECGNYCGVRIIHSLIAEFSLEELKKSYHLNKSQIMLDMLTENLFFDTGMGKSKFLQDMHTLLLTRHRDEHEGETGNWFSPFIEALHKDEGNEAVEAVLLESIHRFNPNAFICQALARHFYIKKKDFGNALNWAKQAKIIEPDNSYISDTLGQVYKSKIRWWIEENGGNGNISVDDLIALLDLAEHASSAFKESQQQSEDREYEVKERLYPKSKRRYDTYNIAGYQGEIEVGLYTIQILQLIPFFDNKNELSKRYMVNFVSGSSDIPGDPNNEYKLALKNYIPYLTKLKFSLKKSFDFFDEYFVLLKPRNN

SEQ ID NO: 71029 - protein, 251 aa, Homo sapiens
MSSFGYRTLTVALFTLICCPGSDEKVFEVHVRPKKLATSLDKILLDEQAQWKHYLVSNISHDTVLQCHFTCSGKQESMNSNVSVYQPPRQVILTLQPTLVAVGKSFTIECRVPTVEPLDSLTLFLFRGNETLHYETFGKAAPAPQEATATFNSTADREDGHRNFSCLAVLDLMSRGGNIFHKHSAPKMLEIYEPVSDSQMVIIVTVVSVLLSLFVTSVLLCFIFGQHLRQQRMGTYGVRAAWRRLPQAFRP

SEQ ID NO: 71030 - protein, 274 aa, Homo sapiens
MSCPVPACCALLLVLGLCRARPRNALLLLADRALSVSHLTQRMTEALRVARTTTAPSPPRTWTPWPAAASSFAMPSPRSAAALPAAPASSLACPSIRMGCTGCTRTCTTSTPSTRCGACRCCSAKLVCAQASSGRSTWGRRPCTRLTLRTRRRMAPSSRWGGTSLELSCSSGNSCRLRMTGLSSSTSPSTTPTAVGTPSPSTEPSVRSLATERAAWVVSQTGPPRPTTHWTCWCLTSSPTPRQPEPTWPLSTPPSAAWTKELDWCSRSCVTPVS

SEQ ID NO: 71031 - protein, 132 aa, Homo sapiens
EEQYRIRQVNIYYYLEDDSMSVIEPVVENSGILQGKLIKRQRLAKNDRGDHYHWKDLNRGINITIYGKTFRVVDCDQFTQVFLESQGIELNPPEKMALDPYTELRKQPLRKYVTPSDFDQLKQFLTFDKQDS

SEQ ID NO: 71032 - protein, 402 aa, Homo sapiens
MVGQRVLLLVAFLLSGVLLSEAAKILTISTLDIKEEEKSYQVIRWFSPEDHQKRIKKHFDSYIETALDGRKESEALVKLMEIFGTQCSYLLSRKDIMDSLKNENYDLVFVEAFDFCSFLIAEKLVKPFVAILPTTFGSLDFGLPSPLSYVPVFPSLLTDHMDFWGRVKNFLMFFSFSRSQWDMQSTFDNTIKEHFPEGSRPVLSHLLLKAELWFVNSDFAFDFARPLLPNTVYIGGLMEKPIKPVPQDLDNFIANFGDAGFVLVAFGSMLNTHQSQEVLKKMHNAFAHLPQGVIWTCQSSHWPRDVHLATNVKIVDWLPQSDLLAHPSIRLFVTHGGQNSVMEAIRHGVPMVGLPVNGDQHGNMVRVVAKNYGVSIRLNQVTADTLTLTMKQVIEDKRYVAL

SEQ ID NO: 71033 - protein, 300 aa, Homo sapiens
  MOD_RES (1)..(1): Any amino acid
XTEAQSEGEVPARESGRSDAICSFVICNDSSLRGQPIIFNPDFFVEKLRHEKPEIFTELVVSNITRLIDLPGTELAQLMGEVDLKLPGGAGPASGFFRSLMSLKRKEKGVIFGSPLTEEGIAQIYQLIEYLHKNLRVEGLFRVPGNSVRQQILRDALNNGTDIDLESGEFHSNDVATLLKMFLGELPEPLLTHKHFNAHLKIADLMQFDDKGNKTNIPDKDRQIEALQLLFLILPPPNRNLLKLLLDLLYQTAKKQDKNKMSAYNLALMFAPHVLWPKNGLVLLPTLEESNTITTHCSLI

SEQ ID NO: 71034 - protein, 775 aa, Homo sapiens
MSHHTWPSPALNLDFATYLLRDLGAHFFLEIEGFEPNPTVAKTSPPVFSKPMDSNIRQCISGNCDDMDSPQSPQDDVTETPSNPNSPSAQLAKEEQRRKKRRLKKRIFAAVSEGCVEELVELLVELQELCRRRHDEDVPDFLMHKLTASDTGKTCLMKALLNINPNTKEIVRILLAFAEENDILGRFINAEYTEEAYEGQTALNIAIERRQGDIAALLIAAGADVNAHAKGAFFNPKYQHEGFYFGETPLALAACTNQPEIVQLLMEHEQTDITSRDSRGNNILHALVTVAEDFKTQNDFVKRMYDMILLRSGNWELETTRNNDGLTPLQLAAKMGKAEILKYILSREIKEKRLRSLSRKFTDWAYGPVSSSLYDLTNVDTTTDNSVLEITVYNTNIDNRHEMLTLEPLHTLLHMKWKKFAKHMFFLSFCFYFFYNITLTLVSYYRPREEEAIPHPLALTHKMGWLQLLGRMFVLIWAMCISVKEGIAIFLLRPSDLQSILSDAWFHFVFFIQAVLVILSVFLYLFAYKEYLACLVLAMALGWANMLYYTRGFQSMGMYSVMIQKVILHDVLKFLFVYIVFLLGFGVALASLIEKCPKDNKDCSSYGSFSDAVLELFKLTIGLGDLNIQQNSKYPILFLFLLITYVILTFVLLLNMLIALMGETVENVSKESERIWRLQRARTILEFEKMLPEWLRSRFRMGELCKVAEDDFRLCLRINEVKWTEWKTHVSFLNEDPGPVRRTADFNKIQDSSRNNSKTTLNAFEEVEEFPETSV

SEQ ID NO: 71035 - protein, 1283 aa, Homo sapiens
MSAVVAQTLHVFGLRSHVANNIFYFDEQIIIFPSGNHCVKYNVDQKWQKFIPGSEKSQGMLALSISPNRRYLAISETVQEKPAITIYELSSIPCRKRKVLNNFDFQVQKFISMAFSPDSKYLLAQTSPPESNLVYWLWEKQKVMAIVRIDTQNNPVYQVSFSPQDNTQVCVTGNGMFKLLRFAEGTLKQTSFQRGEPQNYLAHTWVADDKIVVGTDTGKLFLFESGDQRWETSIMVKEPTNGSKSLDVIQESESLIEFPPVSSPLPSYEQMVAASSHSQMSMPQVFAIAAYSKGFACSAGPGRVLLFEKMEEKDFYRESREIRIPVDPQSNDPSQSDKQDVLCLCFSPSEETLVASTSKNQLYSITMSLTEISKGEPAHFEYLMYPLHSAPITGLATCIRKPLIATCSLDRSIRLWNYETNTLELFKEYQEEAYSISLHPSGHFIVVGFADKLRLMNLLIDDIRSFKEYSVRGCGECSFSNGGHLFAAVNGNVIHVYTTTSLENISSLKGHTGKIRSIVWNADDSKLISGGTDGAVYEWNLSTGKRETECVLKSCSYNCVTVSPDAKIIFAVGSDHTLKEIADSLILREISAFDVTYTAIVISHSGRMMFVGTSVGTIRAMKYPLPLQKEFNEYQAHAGPITKMLLTFDDQFLLTAAEDGCLFTWKVFDKDGRGIKREREVGFAEEVLVTKTDMEEKAQVMLELKTRVEELKMENEYQLRLKDMNYSEKIKELTDKFIQEMESLKTKNQVLRTEKEKQDVYHHEHIEDLLDKQSRELQDMECCNNQKLLLEYEKYQELQLKSQRMQEEYEKQLRDNDETKSQALEELTEFYEAKLQEKTTLLEEAQEDVRQQLREFEETKKQIEEDEDREIQDIKTKYEKKLRDEKESNLRLKGETGIMRKKFSSLQKEIEERTNDIETLKGEQMKLQGVIKSLEKDIQGLKREIQERDETIQDKEKRIYDLKKKNQELGKFKFVLDYKIKELKKQIEPRENEIRVMKEQIQENDPILKWPQRVEIHLYNFRKQVRKVLLWGTLPQMEAELENFHKQNTQLELNITELWQKLRATDQEMRRERQKERDLEALVKRFKTDLHNCVAYIQEPRLLKEKVRGLFEKYVQRADMVEIAGLNTDLQQEYTRQREHLERNLATLKKKVVKEGELHRTDYVRIMQENVSLIKEINELRRELKFTRSQVYDLEAALKLTKKVRPQEVSETEPSRDMLSTAPTARLNEQEETGRIIEMQRLEIQRLRDQIQEQEQVTGFHTLAGVRLPSLSNSEVDLEVKTN

SEQ ID NO: 71036 - protein, 102 aa, Homo sapiens
MAQVFTEGKLNLGYFMHGVCKEGDNCRYSHDLSDSPYSVVCKYFQRGYCIYGDRCRYEHSKPLKQEEATATELTTKSSLAASSSLSSIVGPLVEMNTGEAES

SEQ ID NO: 71037 - protein, 121 aa, Homo sapiens
MSLLATLGLELDRALLPASGLGWLVDYGKLPPAPAPLAPYEVLGGALEGGLPVGGEPLAGDGFSDWMTERVDFTALLPLEPPLPPGTLPQPSPTPPDLEAMASLLKKELEQMEDFFLDAPP

SEQ ID NO: 71038 - protein, 158 aa, Homo sapiens
QALQMLFKPLGKCISHLTLHELLQGLQGLTLLPPGSSERPVTVVLQNQDRHGGSDCLGDSPNAYSLSGRTPSFPQQPTSPVLSPRGQTIGSAAGGQDGVCLDLLICLFWNTCMWEVESSDTSYIDYVYRDPESLKTFLMPLYIGEPFPIFISFLQKSK

SEQ ID NO: 71039 - protein, 401 aa, Homo sapiens
MSSKIIGINGDFFANMVVDAVLAIKYTDIRGQPRYPVNSVNILKAHGRSQMESMLISGYALNCVVGSQGMPKRIVNAKIACLDFSLQKTKMKLGVQVVITDPEKLDQIRQRESDITKERIQKILATGANVILTTGGIDDMCLKYFVEAGAMAVRRVLKRDLKRIAKASGATILSTLANLEGEETFEAAMLGQAEEVVQERICDDELILIKNTKARTSASIILRGANDFMCDEMERSLHDALCVVKRVLESKSVVPGGGAVEAALSIYLENYATSMGSREQLAIAEFARSLLVIPNTLAVNAAQDSTDLVAKLRAFHNEAQVNPERKNLKWIGLDLSNGKPRDNKQAGVFEPTIVKVKSLKFATEAAITILRIDDLIKLHPESKDDKHGSYEDAVHSGALND

SEQ ID NO: 71040 - protein, 135 aa, Homo sapiens [sequence omitted]

SEQ ID NO: 71041 - protein, 127 aa, Homo sapiens
MGLTISSLFSRLFGKKQMRILMVGLDAAGKTTILYKLKLGEIVTTIPTIGFNVETVEYKNICFTVWDVGGQDRIRPLWKHYFQNTQGLIFVVDSNDRERIQEVADELQKMLLVDELRDAVLLLFANK

SEQ ID NO: 71042 - protein, 341 aa, Homo sapiens
MSRPKMTSLYPEKTQRIYKLPELIIQQGHQIQEPKLQGPWIVKGKRARAESIDPVQDHPHEHTHGRPSPQARMGGSEGDTRSSDDQKDDIPVENYVAQRYIENPYLIGGRKFDLRVYVLVMSYIPLRAWLYRDGFARFSNTRFTLNSIDDQYVHLTNVAVQKTSPDYHPKKGCKWTLQRFRQYLASKHGPEAVETLFRDIDNIFVKSLQSVQKVIISDKHCFELYGYDILIDQDLKPWLLEVNASPSLTASSQEDYELKTCLLEDTLHVVDMEARLTGREKRVGGFDLMWNDGPVSREEGAPDLSGMGNFVTNTHLGCVNDRKKQLRQLFCSLQVQKKASS

SEQ ID NO: 71043 - protein, 199 aa, Homo sapiens
  MOD_RES (1)..(1): Any amino acid
XIKEHTTKYNEIQNDYLRRRAALEKSAKKDSKKKSEPSSPDHGSSTIEQDLAALDAEMTQKLIDLKDKQQQQLLNLRQEQYYSEKYQKREHIKLLIQKLTDVAEECQNNQLKKLKEICEKEKKELKKKMDKKRQEKITEAKSKDKSQMEEEKTEMIRSYIQEVVQYIKRLEEAQSKRQEKLVEKHKEIRQQILDEKPKS

SEQ ID NO: 71044 - protein, 181 aa, Homo sapiens
MDDTLFQLKFTAKQLEKLAKKAEKDSKAEQAKVKKALLQKNVECARVYAENAIRKKNEGVNWLRMASRVDAVASKVQTAVTMKGVTKNMAQVTKALDKALSTMDLQKVSSVMDRFEQQVQNLDVHTSVCGPYPWGCGLGTRSVCGQLIGRGGSQADVLSLHTCGCSLTSPSILCAGSLPGP

SEQ ID NO: 71045 - protein, 193 aa, Homo sapiens
  MOD_RES (1)..(1): Any amino acid
XDLECENTICALNIRKQTSWDDFSKAVSQALTNHFQAISSDGWWSLEDVTCNNTTDSNIGLSARSIRSITLGNVPWSVGQSFAQSPWDFMRKNKAEHITVLLSGPQEGCLSSVTYASMIPLQMMQNYLRLHRQMAAGFSCEIVRAEVDAGFSKEQLLDLFISSACLIPVKQSPSKKKIIIILENLEKSSLSEL

SEQ ID NO: 71046 - protein, 167 aa, Homo sapiens
MEVGGDTAAPAPGGAEDLEDTQFPSEEAREGGGVHAVPPDPEDEGLEETGSKDKDQPPSPSPPPQSEALSSTSRLWSPAAPENSPTCSPESSSGGQGGDPSDEEWRSQRKHVFVLSEAGKPIYSRYGSVEALSATMGVMTALVSFVQSAGDAIRAIYAEDHKLVFLQ

SEQ ID NO: 71047 - protein, 197 aa, Homo sapiens
MVGQPQPRDDVGSPRPRVIVGTIRPRVIVGTIRPRVIVGSARARPPPDGTPRPQLAAEESPRPRVIFGTPRARVILGSPRPRVIVSSPWPAVVVASPRPRTPVGSPWPRVVVGTPRPRVIVGSPRARVADADPASAPSQGALQGRRQDEHSGTRAEGSRPGGAAPVPEEGGRFARAQRLPPPRHLRLPGAPDRHRGI

SEQ ID NO: 71048 - protein, 115 aa, Homo sapiens
SPRPRDARSFTPGRRNTAPSPGPSVIRRGRRQSAKPGFKHAGSEGELYPPESQPPVSGSAPPEDLEDAGPPTLDPSGTSITEEILELLNQRGLRDPGESMGLHRAQGAPDAPFHM

SEQ ID NO: 71049 - protein, 247 aa, Homo sapiens
MDALNRNQIGPGCQTQTMVQKGPLDLIETGKGLKVQTDKPHLVSLGSGRLSTAITLLPLEEGRTVIGSAARDISLQGPGLAPEHCYIENLRGTLTLYPCGNACTIDGLPVRQPTRLTQGCMLCLGQSTFLRFNHPAEAKWMKSMIPAGGRAPGPPYSPVPAESESLVNGNHTPQTATRGPSACASHSSLVSSIEKDLQEIMDSLVLEEPGAAGKKPAATSPLSPMANGGRYLLSPPTSPGHVCGLQL

SEQ ID NO: 71050 - protein, 158 aa, Homo sapiens
  MOD_RES (1)..(1): Any amino acid
XGNKAAIQGNGDVGAAAATAHNGFSCSNCSMLSERKDVLTAHPAAPGPVSRVYSRDRNQKSHASYYGRMNVREVLREDGHLSVNGEALCDDCKGKRHLDAHTAAHSQSPRLPGRAGTLWHIWACAGYFLLQILRRIGAVGQAVSRTAWSALWLAVVAP

SEQ ID NO: 71051 - protein, 94 aa, Homo sapiens
GHTAGHMSYFLWEDDCPDPPALFSGTRSAERAHPASRRPRPICSDPPSPARRRAVGGRLRLVPGGQRPADVPEPGRAGYPAPRDEGVLRPRAHA

SEQ ID NO: 71052 - protein, 140 aa, Homo sapiens
MASRGRRPEHGGPPELFYDETEARKYVRNSRMIDIQTRMAGRALELLYLPENKPCYLLDIGCGTGLSGSYLSDEGHYWVGLDISPAMLDEAVDREIEGDLLLGDMGQGIPFKPGTFDGCIRSGDPELSCSCTLRTQSSWS

SEQ ID NO: 71053 - protein, 160 aa, Homo sapiens
  MOD_RES (1)..(1): Any amino acid
XQDALAQPQPWWKTQLFMWEPVLFGTWDGVFTSCMINIFGVVLFLRTGWLVGNTGVLLGMFLVSFVILVALVTVLSGIGVGERSSIGSGGVYSMISSVLGGQTGGTIGLLYVFGQVPCISPALLNPSRICWASGISGLCEEFQLRCFWPCWALTSQVSNG

SEQ ID NO: 71054 - protein, 123 aa, Homo sapiens
MIDAATLKSRKMLEEIMKYEASILTHDSSIRYLQEIYNSNNQKIVNLKEKVAQLEAQCQEPCKDTVQIHDITGKDCQDIANKGAKQSGLYFIKPLKANQQFLVYCEIDGSGNGWTVFQKRLDG

SEQ ID NO: 71055 - protein, 159 aa, Homo sapiens
MADRLTQLQDAVNSLADQFCNAIGVLQQCGPPASFNNIQTAINKDQPANPTEEYAQLFAALIARTAKDIDVLIDSLPSEESTAALQAASLYKLEEENHEAATCLEDVVYRGDMLLEKIQSALADIAQSQLKTRSGEVSVTQAEVQFCDHGSLQLHPGFR

SEQ ID NO: 71056 - protein, 41 aa, Homo sapiens
MNKGWLELESDPGLFTLLVEDFGVKGVQVEEIYDLQSKCQG

SEQ ID NO: 71057 - protein, 269 aa, Homo sapiens
  MOD_RES (1)..(1): Any amino acid
XTGLLEHYGQGGNCLEDAAPFSYHSTFLLADRTEAWVLETAGRLWAAQRIQEGARNISNQLSIGTDISAQHPELRTHAQAKGWWDGQGAFDFAQIFSLTQQPVRMEAAKARFQAGRELLRQRQGGITAEVMMGILRDKESGICMDSGGFRTTASMVSVLPQDPTQPCVHFLTATPDPSRSVFKPFIFGMGVAQAPQVLSPTFGAQDPVRTLPRFQTQDRGQQLQQKQQDLEQEGLEATQGLLAGEWAPPLWELGSLFQAFVKRESQAYA

SEQ ID NO: 71058 - protein, 34 aa, Homo sapiens
MGNPENIEDAYVAVIRPKNTASLNSREYRAKSYE

SEQ ID NO: 71059 - protein, 63 aa, Homo sapiens
MPSRGTRPEDSSVLIPTDNSTPHKEDLSSKIKEQKIVVDELSNLKKNRTEQKCCLRARIYWMN

SEQ ID NO: 71060 - protein, 130 aa, Homo sapiens
MKNAVIGNNKQKANLIVLGAVPRLLYLLQQETSSTELKTECAVVLGSLAMGTENNVKSLLDCHIIPALLQGLLSPDLKFIEACLRCLRTIFTSPVTPEELLYTDATVIPHLMALLSRSRYTQEYICQIFS

SEQ ID NO: 71061 - protein, 114 aa, Homo sapiens
  MOD_RES (1)..(1): Any amino acid
XQSETRRGEYVLTFNFQGKAKHLRLSLNEEGQCRVQHLWFQSIFDMLEHFRVHPIPLESGGSSDVVLVSYVPSSQRQQGEQSRSAGEEVPVHPRSEVCVPERWGGEGGLSQGEA

SEQ ID NO: 71062 - protein, 897 aa, Homo sapiens
MLRHWREQGFYYNTRDTDDIESPKRSIRDSGYIDCWDSERSDSLSPPRHGRDDSFDSLDSFGSRSRQTPSPDVVLRGSSDGRGSDSESDLPHRKLPDVKKDDMSARRTSHGEPKSAVPFNQYLPNKSNQTAYVPAPLRKKKAEREEYRKSWSTATSPLGGERPFRSTSMFDMRCEEEAAVQPHSRARQEQLQLINNQLREEDDKWQDDLARWKSRRRSVSQDLIKKEEERKKMEKLLAGEDGTSERRKSIKTYREIVQEKERRERELHEAYKNARSQEEAEGILQQYIERFTISEAVLERLEMPKILERSHSTEPNLSSFLNDPNPMKYLRQQSLPPPKFTATVETTIARASVLDTSMSAGSGSPSKTVTPKAVPMLTPKPYSQPKNSQDVLKTFKVDGKVSVNGETVHREEEKERECPTVAPAHSLTKSQMFEGVARVHGSPLELKQDNGSIEINIKKPNSVPQELAATTEKTEPNSQEDKNDGGKSRKGNIELASSEPQHFTTTVTRCSPTVAFVEFPSSPQLKNDVSEEKDQKKPENEMSGKVELVLSQKVVKPKSPEPEATLTFPFLDKMPEANQLHLPNLNSQVDSPSSEKSPVMTPFKFWAWDPEEERRRQEKWQQEQERLLQERYQKEQDKLKEEWEKAQKEVEEEERRYYEEERKIIEDTVVPFTVSSSSADQLSTSSSMTEGSGTMNKIDLGNCQDEKQDRRWKKSFQGDDSDLLLKTRESDRLEEKGSLTEGALAHSGNPVSKGVHEDHQLDTEAGAPHCGTNPQLAQDPSQNQQTSNPTHSSEDVKPKTLPLDKSINHQIESPSERRKSISGKKLCSSCGLPLGKGAAMIIETLNLYFHIQCFRCGICKGQLGDAVSGTDVRIRNGLLNCNDCYMRSRSAGQPTTL

SEQ ID NO: 71063 - protein, 52 aa, Homo sapiens
  MOD_RES (1)..(1): Any amino acid
XQKASAELIEEEVAKLLKLKAQLGPDESKQKFVLKTPKRRGFTMLARLVSNP

SEQ ID NO: 71064 - protein, 261 aa, Homo sapiens
MEALIPVINKLQDVFNTVGADIIQLPQIVVVGTQSSGKSSVLESLVGRDLLPRGTGIVTRRPLILQLVHVSQEDKRKTTGEENGVEAEEWGKFLHTKNKLYTDFDEIRQEIENETERISGNNKVPVGDQPKDIELQIRELILRFISNPNSIILAVTAANTDMATSEALKISREVDPDGRRTLAVITKLDLMDAGTDAMDVLMGRVIPVKLGIIGVVNRSQLDINNKKSVTDSIRDEYAFLQKKYPSLANRNGTKYLARTLN

SEQ ID NO: 71065 - protein, 111 aa, Homo sapiens
APMAEGGGQNHHEVVKFMDVYQRSYCHPIETLVDIFQEYPDEIEYIFKPSCVPLMRCGGCCNDEGLECVPTEESNITMQTCKCSCKNTDSRCKARQLELNERTCRCDKPRR

SEQ ID NO: 71066 - protein, 37 aa, Homo sapiens
MNLAISIALLLTGLPRAEGDQPNGLPSGPEPSSGLPP

SEQ ID NO: 71067 - protein, 134 aa, Homo sapiens
FIAKSFYDLSAISLDGEKENCQNEEILNSLKYVRPGGGYQPTFTLVQKCEVNGQNEHPVFAYLKDKLPYPYDDPFSLMTDPKLIIWSPVRRSDVAWNFEKFLIGPEGEPFRRYSRTFPTINIEPDIKRLLKVAI

SEQ ID NO: 71068 - protein, 192 aa, Homo sapiens
MDPLSELQDDLTLDDTSEALNQLKLASIDEKNWPSDEMPDFPKSDDSKSSSPELVTHLKWDDPYYDIARHQIVEVAGDDKYGRKIIVFSACRMPPSHQLDHSKLLGYLKHTLDQYVESDYTLLYLHHGLTSDNKPSLSWLRDAYREFDRKYKKNIKALYIVHPTMFIKTLLILFKPLISFKFGQKIFYVNYL

SEQ ID NO: 71069 - protein, 104 aa, Homo sapiens
MMCTPSNTPATPPNFPDALAMFSKLRASEGLQSSNSPMTAAACSPPANFSPFWASSPPSHQAPWIPPSSPTTFHHLHRPQPTWPPGAQQGGAQQKAMAAMDGQR

SEQ ID NO: 71070 - protein, 74 aa, Homo sapiens
MASPDRSKRKILKAKKTMPLSCRKQVEMLNKSRNVEALKTAIGSNVPSGNQSFSPSVITRTTEITKCSPSENGA

SEQ ID NO: 71071 - protein, 54 aa, Homo sapiens
  MOD_RES (1)..(1): Any amino acid
XTNKICWQKKSWQGNQKLKTISQNMQIILFLKTEHQGEAPPLADSQGHLPSRGC

SEQ ID NO: 71072 - protein, 369 aa, Homo sapiens
MGVGDRCFSVMQIKIMRSKPHEEVGDRCYEEGMYEAAKLLYSNVSNFARLASTLVHLGEYQAAVDNSRKASSTRTWKEVCFACMDGQEFRFAQLCGLHIVIHADELEELMCYYQDRGYFEELILLLEAALGLERAHMGMFTELAILYSKFKPQKMLEHLELFWSRVNIPKVLRAAEQAHLWAELVFLYDKYEEYDNAVLTMMSHPTEAWKEGQFKDIITKVANVELCYRALQFYLDYKPLLINDLLLVLSPRLDHTWTVSFFSKDAMQHAAESRDAELAQKLLQWFLEEGKRECFAACLFTCYDLLRPDMVLELAWRHNLVDLAMPYFIQVMREYLSKVDKLDALESLRKQEEHVTEPAPLVFDFDGHE

SEQ ID NO: 71073 - protein, 519 aa, Homo sapiens
  MOD_RES (1)..(1): Any amino acid
XLAQGTPEELTFEVAGLNATFSHEQVSFGEPFGICRLAVPVEGTFLVTMLVRNAFSNLSLEIGNITITAPSGLQEPSGMNAEGKSKDKGDMEVYIQPGPYVDPFTTVTLGWPDNDKELRFQWSCGSCWALWSSCVERQLLRTDQRELVVPASCLPPPDSAVTLRLAVLRGQELENRAEQCLYVSAPWELRPRVSCERNCRPVNASKDILLRVTMGEDSPVAMFSWYLDNTPTEQAEPLLDACRLRGFWPRSLTLLQSNTSTLLLNSSFLQSRGEVIRIRATALTRHAYGEDTYVISTVPPREVPACTIAPEEGTVLTSFAIFCNASTALGPLEFCFCLESGSCLHCGPEPALPSVYLPLGEENNDFVLTVVISATNRAGDTQQTQAMAKVALGDTCVEDVAFQAAVSEKIPTALQGEGGPEQLLQLAKAVSSMLNQEHESQGSGQSLSIDVRQKVREHVLGSLSAVTTGLEDVQRVQELAEVLREVTCRSKELTPSAQGSCMGDSWEGAPPAAHVSHAR

SEQ ID NO: 71074 - protein, 52 aa, Homo sapiens
  MOD_RES (1)..(1): Any amino acid
XCPARNRRTSLWAVSLSSALLLAIAGGGCFFYWQRKKEAVKQEQGSPHVFQK

SEQ ID NO: 71075 - protein, 514 aa, Homo sapiens
MSGGEQKPERYYVGVDVGTGSVRAALVDQSGVLLAFADQPIKNWEPQFNHHEQSSEDIWAACCVVTKKVVQGIDLNQIRGLGFDATCSLVVLDKQFHPLPVNQEGDSHRNVIMWLDHRAVSQVNRINETKHSVLQYVGGVMSVEMQAPKLLWLKENLREICWDKAGHFFDLPDFLSWKATGVTARSLCSLVCKWTYSAEKGWDDSFWKMIGLEDFVADNYSKIGNQVLPPGASLGNGLTPEAARDLGLLPGIAVAASLIDAHAGGLGVIGADVRGHGLICEGQPVTSRLAVICGTSSCHMGISKDPIFVPGVWGPYFSAMVPGFWLNEGGQSVTGKLIDHMVQGHAAFPELQVKATARCQSIYAYLNSHLDLIKKAQPVGFLTVDLHVWPDFHGNRSPLADLTLKGMVTGLKLSQDLDDLAILYLATVQAIALGTRFIIEAMEAAGHSISTLFLCGGLSKNPLFVQMHADITGMPVVLSQEVESVLVGAAVLGACASGDFASVQIRKTKHRAIK

SEQ ID NO: 71076 - protein, 79 aa, Homo sapiens
  MOD_RES (1)..(1): Any amino acid
XPGRSVSLSLPSASQAPPVPLASPEGRPHTVGAPHASTWKRTRGRQRARPPNASGKVETRFRESPVQPAQPPGLKRAMP

SEQ ID NO: 71077 - protein, 366 aa, Homo sapiens
MLAAVALHDLGCLVLHCPHQSFYAALLFCLSPANVFLAAGYSEALFALLTFSAMGQLERGRVWTSVLLFAFATGVRSNGLVSVGFLMHSQCQGFFSSLTMLNPLRQLFKLMASLFLSVFTLGLPFALFQYYAYTQFCLPGSARPIPEPLVQLAVDKGYRIAEGNEPPWCFWDVPLIYSYIQDVYWNVGFLKYYELKQVPNFLLAAPVAILVAWATWTYVTTHPWLCLTLGLQRSKNNKTLEKPDLGFLSPQVFVYVVHAAVLLLFGGLCMHVQVLTRFLGSSTPIMYWFPAHLLQDQEPLLRSLKTVPWKPLAEDSPPGQKVPRNPIMGLLYHWKTCSPVTRYILGYFLTYWLLGLLLHCNFLPWT

SEQ ID NO: 71078 - protein, 732 aa, Homo sapiens
MPGGGPQGAPAAAGGGGVSHRAGSRDCLPPAACFRRRRLARRPGYMRSSTGPGIGFLSPAVGTLFRFPGGVSGEESHHSESRARQCGLDSRGLLVRSPVSKSAAAPTVTSVRGTSAHFGIQLRGGTRLPDRLSWPCGPGSAGWQQEFAAMDSSETLDASWEAACSDGARRVRAAGSLPSAELSSNSCSPGCGPEVPPTPPGSHSAFTSSFSFIRLSLGSAGERGEAEGCPPSREAESHCQSPQEMGAKAASLDGPHEDPRCLSRPFSLLATRVSADLAQAARNSSRPERDMHSLPDMDPGSSSSLDPSLAGCGGDGSSGSGDAHSWDTLLRKWEPVLRDCLLRNRRQMEVISLRLKLQKLQEDAVENDDYDKAETLQQRLEDLEQEKISLHFQLPSRQPALSSFLGHLAAQVQAALRRGATQHLQERIKSLNLSLKEITTKVCMSEKFCSTLRKKVNDIETQLPALLEAKMHAISGNHFWTAKDLTEEIRSLTSEREGLEGLLSKLLVLSSRNVKKLGSVKEDYNRLRREVEHQETAYETSVKENTMKYMETLKNKLCSCKCPLLGKVWEADLEACRLLIQSLQLQEARGSLSVEDERQMDDLEGAAPPIPPRLHSEDKRKTPLKVLEEWKTHLIPSLHCAGGEQKEESYILSAELGEKCEDIGKKLLYLEDQLHTAIHSHDEDLIHSLRRELQMVKETLQAMILQLQPAKEAGEREAAASCMTAGVHEAQA

SEQ ID NO: 71079 - protein, 46 aa, Homo sapiens
MPYANQPTVRITELTDENVKFIIENTDLAVANSIRRVFIAEVPIIG

SEQ ID NO: 71080 - protein, 169 aa, Homo sapiens
MISFCPDCGKSIQAAFKFCPYCGNSLPVEEHVGSQTFVNPHVSSFQGSKRGLNSSFETSPKKVKWSSTVTSPRLSLFSDGDSSESEDTLSSSERSKGSGSRPPTPKSSPQKTRKSPQVTRGSPQKTSCSPQKTRQSPQTLKRSRVTTSLEALPTGTVLTDKSGRQWKLK

SEQ ID NO: 71081 - protein, 423 aa, Homo sapiens
MRHLGAFLFLLGVLGALTEMCEIPEMDSHLVEKLGQHLLPWMDRLSLEHLNPSIYVGLRLSSLQAGTKEDLYLHSLKLGYQQCLLGEDDGDCQGKPSMGQLALYLLALRANCEFVRGHKGDRLVSQLKWFLEDEKRAIGHDHKGHPHTSYYQYGLGILALCLHQKRVHDSVVDKLLYAVEPFHQGHHSVDTAAMAGLAFTCLKRSNFNPGRRQRITMAIRTVREEILKAQTPEGHFGNVYSTPLALQFLMTSPMRGAELGTACLKARVALLASLQDGAFQNALMISQLLPVLNHKTYIDLIFPDCLAPRVMLEPAAETIPQTQEIISVTLQVLSLLPPYRQSISVLAGSTVEDVLKKAHELGGFTYETQASLSGPYLTSVMGKAAGEREFWQLLRDPNTPLLQGIADYRPKDGETIELRLVSW

SEQ ID NO: 71082 - protein, 111 aa, Homo sapiens
MEAARRSLCFRLEQGYTSRGSPLSPQSSIDSELSTSELEDDSISMGYKLQDLTDVQIMARLQEESLRQDYASTSASVSRHSSSVSLSSGKKGTCSDQEYDQYSLEDEEEFD

SEQ ID NO: 71083 - protein, 691 aa, Homo sapiens
MATMIPPVKLKWLEHLNSSWITEDSESIATREGVAVLYSKLVSNKEVVPLPQQVLCLKGPQLPDFERESLSSDEQDHYLDALLSSQLALAKMVCSDSPFAGALRKRLLVLQRVFYALSNKYHDKGKVKQQQHSPESSSGSADVHSVSERPRSSTDALIEMGVRTGLSLLFALLRQSWMMPVSGPGLSLCNDVIHTAIEVVSSLPPLSLANESKIPPMGLDCLSQVTTFLKGVTIPNSGADTLGRRLASELLLGLAAQRGSLRYLLEWIEMALGASAVVHTMEKGKLLSSQEGMISFDCFMTILMQMRRSLISENQDSADVDPQEHSFTRTIDEEAEMEEQAERDREEGHPEPEDEEEEREHEVMTAGKIFQCFLSAREVARSRDRDRMNSGAGSGARADDPPPQSQQERRVSTDLPEGQDVYTAACNSVIHRCALLILGVSPVIDELQKRREEGQLQQPSTSASEGGGLMTRSESLTAESRLVHTSPNYRLIKSRSESDLSQPESDEEGYALSGRRNVDLDLAASHRKRGPMHSQLESLSDSWARLKHSRDWLCNSSYSFESDFDLTKSLGVHTLIENVVSFVSGDVGNAPGFKEPEESMSTSPQASIIAMEQQQLRAELRLEALHQILVLLSGMEEKGSISLAGSRLSSGFQSSTLLTSVRLQFLAGCFGLGTVGHTGGKGESGRLHHYQ

SEQ ID NO: 71084 - protein, 243 aa, Homo sapiens
  MOD_RES (1)..(1): Any amino acid
XEKHKKGPMETGLFPGSNATFRILEVGCGAGNSVFPILNTLENSPESFLYCCDFASGAVELVKVCYSWESYQLMPKSHSSYRATQCFAFVHDVCDDGLPYPFPDGILDVILLVFVLSSIHPDRMQGVVNRLSKLLKPGGMLLFRDYGRYDKTQLRFKKGHCLSENFYVRGDGTRAYFFTKGEVHSMFCKASLDEKQNLVDRRLQVNRKKQVKMHRVWIQGKFQKPLHQTQNSSNMVSTLLSQD

SEQ ID NO: 71085 - protein, 271 aa, Homo sapiens
  MOD_RES (1)..(1): Any amino acid
XRHSTTCFAVPCSVPSSTFFTCRDSRDQQKDMPPLLFEVSSLENAFQIGGHPWHYIVTPNKKKQKGVFHICALKDNSLAKNGIQEMDCCSLESDWIYFHPDASGRIIHVGPNQVKVLKLTEIENNSSQHQISEDFVILANRENHKNENVLTVTASGRVVKKSFNLLDDDPEQETFKIVDYEDELDLLSVVAVTQIDAEGKAHLDFHCNEYGTLLKSIPLVESWDVTYSHEVYFDRDLVLHIEQKPNRVFSCYVYQMICDTGEEEETINRSC

SEQ ID NO: 71086 - protein, 76 aa, Homo sapiens
  MOD_RES (1)..(1): Any amino acid
XSLTFRDVAIEFSLEEWQCLDTAQQNLYRNVMLENYRNLVFLGIAAFKPDLIIFLEEGKESWNMKRHEMVEESPGR

SEQ ID NO: 71087 - protein, 121 aa, Homo sapiens
MAARDATSGSLSEESSALDLPSACDIRDYVLQGPSQEANSEAFSSLEFHSFPYSSDVDPDTSNLNIEQNNSWTAENFWLDPAVKGQSEKEEDDGLRKSLDRFYEMFGHPQPGSANSLSASV

SEQ ID NO: 71088 - protein, 162 aa, Homo sapiens
MDIIFGRNRKEQLEPVRAKVTGKIPAWLQGTLLRNGPGMHTVGESRYNHWFDGLALLHSFTIRDGEVYYRSKYLRSDTYNTNIEANRIVVSEFGTMAYPDPCKNIFSKAFSYLSHTIPDFTDNCLINIMKCGEDFYATSETNYIRKINPQTLETLEKVSTHM

SEQ ID NO: 71089 - protein, 90 aa, Homo sapiens
MAAPGPALCLFDVDGTLTAPRQKITKEMDDFLQKLRQKIKIGVVGGSDFEKVQEQLGNDERKYKTKVCSRSTERVCWKRPHVFHRRPDQL

SEQ ID NO: 71090 - protein, 62 aa, Homo sapiens
MAAVLALRVVAGLAAAALVAMLLEHYGLAGQPSPLPRPAPPRRPHPAPGPGDSNIFWGLQET

SEQ ID NO: 71091 - protein, 208 aa, Homo sapiens
  MOD_RES (1)..(1): Any amino acid
XEHSLKVHGKALTLPRPRIVSLLSSHSHHSSQKATPAEEVEDSNDSSYSEPPDVQQQLNHYQSAALARNNSRVSPVPLSGAAAGTEQKTEAVLHCEFCEFSSGYIQSIRRHYRDKHGGKKLFKCKDCSFYTGFKSAFTMHVEAGHSAVPEEGPKDLRCPLCLYHTKYKRNMIDHIVLHRGNLSNLVFLDAAGGRQQRWPSRDALSEWQ

SEQ ID NO: 71092 - protein, 91 aa, Homo sapiens
  MOD_RES (1)..(1): Any amino acid
XGDRSRISKENRQKKTGFTVEATGRQGRGMTGNLPLDSDQESQEARLPERGTALPTARWPPRRSLERLPSPDPGAEGHGQSRQSDQDITKT

SEQ ID NO: 71093 - protein, 40 aa, Homo sapiens
  MOD_RES (1)..(1): Any amino acid
XGYEAGTKPRDSGVVPVGTEEAPKLFCSELPLRCGFLRMG

SEQ ID NO: 71094 - protein, 136 aa, Homo sapiens
MESMRQADLKNWSLDQVQFADLCSSLNQFFTQTGLIHSQSNVQQNVCHGAMHPTKPSQHIGTGNLYIDSRQNLPPSVMPPPGYPHIPQALSTPGTTMAGHHRAMNQQHMMPSQAFQMRRSLPPDDIQDDFDWDSIV

SEQ ID NO: 71095 - protein, 159 aa, Homo sapiens
SPDLPFLTIVLIIVSWTTCGALAILLSYLYYVFKVVHLQASLTTFKNSQPVNPKHSRRSEKKSNHHKDSSIHHLRLSANDAEDSLRMHSTVINLLTWIVLLSMPSLIYWLKNLSKLLKTTSQFPLPLAVGVIAFGSAHLYRLPCFVFIPLLLHALCNFM

SEQ ID NO: 71096 - protein, 118 aa, Homo sapiens
MADIQTERAYQKQPTIFQNKKRVLLGETGKEKLPRYYKNIGLGFKTPKEAIEGTYIDKKCPFTGNVSIRGRILSGVVTKMKMQRTIVIRRDYLHYIRKYNRFEKRHKNMSVHLSPCFR

SEQ ID NO: 71097 - protein, 190 aa, Homo sapiens
MDQSGMEIPVTLIIKAPNQKYSDQTISCFLNWTVGKLKTHLSNVYPSKPQDEYHMVHLVCTSRTPPSSPKSSTNRESHEALASSSNSSSDHSGSTTPSSGQETLSLAVGSSSEGLRQRTLPQAQTDQAQSHQFPYVMQGNVDNQFPGQAAPPGFPVYPAFSPLQMLWWQQMYAHQYYMQYQAAVSAQATS

SEQ ID NO: 71098 - protein, 307 aa, Homo sapiens
MDATSERDFVAEFLFWASLCMTHLSRMAEDLILYCTKEFSFVQLSDAYSTGSSLMPQKKNPDSLELIRSKAGRVFGRCAGLLMTLKGLPSTYNKDLQEDKEAVFEVSDTMSAVLQVATGVISTLQIHQENMGQALSPDMLATDLAYYLVRKGMPFRQAHEASGKAVFMAETKGVALNQLSLQELQTIRKDANSALLSNYEVFQLLTDLKEQRKESGKNKHSSGQQNLNTITYETLKYISKTPCRHQSPEIVREFLTALKSHKLTKAEKLQLLNHRPVTAVEIQLMVEESEERLTEEQIEALLHTVTS

SEQ ID NO: 71099 - protein, 128 aa, Homo sapiens
MSSTSPNLQKAIDLASKAAQEDKAGNYEEALQLYQHAVQYFLHVVKYEAQGDKAKQSIRAKCTEYLDRAEKLKEYLKNKEKKAQKPVKEGQPSPADEKGNDSDGEGESDDPEKKKLQNQLQGCFRFHF

SEQ ID NO: 71100 - protein, 163 aa, Homo sapiens
MAGQDPALSTSHPFYDVARHGILQVAGDDRFGRRVVTFSCCRMPPSHELDHQRLLEYLKYTLDQYVENDYTIVYFHYGLNSRNKPSLGWLQSAYKEFDRKDGLTQPPWLTPVIPVLWEAKVQEELEGPLRGAPHQLHQGPVEHLEAPHQSQVWEESHLFQLPE

SEQ ID NO: 71101 - protein, 178 aa, Homo sapiens
NIKPGEGLGMYIKSTYDGLHVITGTTENVGWQLKNLVKKLRENPTGVVLLLKKRPTGSFNFTPAPLKNLRWKPPLVQTSPPPATTQSPESTMDTSLKKEKSAILDLYIPPPPAVPYSPRDENGSFVYGGSSKCKQPLPGPKGSESPNSFLDQESRRRRFTIADSDQLPGYSVETNILP

SEQ ID NO: 71102 - protein, 144 aa, Homo sapiens
  MOD_RES (1)..(1): Any amino acid
XPKVFRQYWDIPDGTDCHRKAYSTTSIASVAGLTAAAYRVTLNPPGTFLEGVAKVGQYTFTAAAVGAVFGLTTCISAHVREKPDDPLNYFLGGCAGGLTLGARTTLTHGSPGPSQATVAVAPLSGRAAVSAAGGCVFLLLPACV

SEQ ID NO: 71103 - protein, 149 aa, Homo sapiens
MDAEGLALLLPPVTLAALVDSWLREDCPGLNYAALAVRAARQAADFTLKVEVECSSLQEAVQAAEAGADLVLLDNFKPEELHPTATVLKAQFPSVAVEASGGITLDNLPQFCGPHIDVISMGMLTQAAPALDFSLKLFAKEVAPVPKIH

SEQ ID NO: 71104 - protein, 134 aa, Homo sapiens
MGKEEIPRPTLTSVKTLLYTKEFPQTVKVPRNQDWLGVSRQLRTKAWNRQLYPEWTEAQRLDCWRGGQVSLKVSNDGPTLIGANASFSIALNFPGSQKVLPDGQVIWVNNTIINGSQVWGGQPVYPQETDDACI

SEQ ID NO: 71105 - protein, 71 aa, Homo sapiens
QSDESDRYIAPTVLVDVQEMEPVMQEEIFGPILPIVNVQSLDEAIEFINRREKPLALYAFSNSSQERIPQR

SEQ ID NO: 71106 - protein, 106 aa, Homo sapiens
MAENSVLTSTTGRTSLADSSIFDSKVTEISKENLLIGSTSYVEEEMPQIETRVILVQEAGKQEELIKALKDIKVGFVKMESVEEFEGLDSPEFENVFVVTDFQDSV

SEQ ID NO: 71107 - protein, 168 aa, Homo sapiens
  MOD_RES (1)..(1): Any amino acid
XRVTKTKDGHEVRSCKVADKTGSITISVWDEIGGLIQPGDIIRLTRGYASMWKGCLTLYTGRGGELQKIGEFCMVYSEVPNFSEPNPDYRGQQNKGAQSEQKNNSMNSNMGTGNGVHTGPESREHQFSHAGRSNGRGLINPQLQGTASNQTVMTTISNGRDPRRAFKR

SEQ ID NO: 71108 - protein, 189 aa, Homo sapiens
MWTLVSWVALTAGLVAGTRCPDGQFCPVACCLDPGGASYSCCRPLLDKWPTTLSRHLGGPCQVDAHCSAGHSCIFTVSGTSSCCPFPEAVACGDGHHCCPRGFHCSADGRSCFQRSGNNSVGAIQCPDSQFECPDFSTCCVMVDGSWGCCPMPQGALLSARCLLRPGSHPLHHTHGHPPPGKEAPCPED

SEQ ID NO: 71109 - protein, 145 aa, Homo sapiens
  MOD_RES (1)..(1): Any amino acid
XQNPFPIENRDVLGETQDFHSLATYLSQNTSSVFLDTISDFHLLLFLVTNEVMPLQDSISLLLEAVRTRNEELAQTWKRSEQWATIEQLCTSRVAGITDVYHHTWRCHLYAQLAGSSQVSMSTAPSGAPHTRPLQPCGPVSTARS

SEQ ID NO: 71110 - protein, 72 aa, Homo sapiens
MLRPALPWLYLGLCSLLVGEAEAPSPVDPLERSRPYAVLRGQNLVLMGTIFSILLVTVILMAFCVYKPIRRR

SEQ ID NO: 71111 - protein, 125 aa, Homo sapiens
MEICDIINETEEGPKDALRAVKKRIVGNKNFHEVMLALTVLETCVKNCGHRFHVLVASQDFVESVLVRTILPKNNPPTIVHDKVLNLIQSWADAFRSSPDLTGVVTIYEDLRRKGLEFPMTDLDM

SEQ ID NO: 71112 - protein, 137 aa, Homo sapiens
  MOD_RES (1)..(1): Any amino acid
XADQAQRRDDMLRMYHALKEALNIIGDISTSTVSTPVPPPVDDTWLQSASSHSPTPQRRPVSSIHPPGRPPAVRGPTPGPPLIPVPVGAAASFSAPPIPSRPGPQSVFANSDLFPAPPQIPSRPVRIPPGIPPGVPR

SEQ ID NO: 71113 - protein, 109 aa, Homo sapiens
MSPDEIKIPPEPPGRCSNHLQDKIQKLYERKIKEGMDMNYIIQRKKEFRNPSIYEKLIQFCAIDELGTNYPKDMFDPHGWSEDSYYEALAKAQKIEMDKLEKAKKERTK

SEQ ID NO: 71114 - protein, 72 aa, Homo sapiens
  MOD_RES (1)..(1): Any amino acid
XRRARIKHSEGGDIPPKYFVVTNNQLLRVKYLLVYSQKPPKRASSQLSWFSSHWFTVMISLYLLLLLIALGI

SEQ ID NO: 71115 - protein, 102 aa, Homo sapiens
MGRDQRAVAGPALRRWLLLGTVTVGFLAQSVLAGVKKFDVPCGGRDCSGGCQCYPEKGGRGQPGPVGPQGYNGPPGLQGFPGLQGRKGDKGERGAPGVTGPK

SEQ ID NO: 71116 - protein, 86 aa, Homo sapiens
MAAPEGSGLGEDARLDQETAQWLRWDKNSLTLEAVKRLIAEGNKEELRKCFGARMEFGTAGLRAAMGPGISRMNDLTIIQTTQYHI

SEQ ID NO: 71117 - protein, 90 aa, Homo sapiens
MSQLKNVEARILQCLQNKFLARYVSLPNQNKIWTVTVSPEQNDRTPLVMVHGFGGGVGLWILNMDSLSARRTLHTFDLLGFGRSSRPAFP

SEQ ID NO: 71118 - protein, 642 aa, Homo sapiens
MREPEELMPDSGAVFTFGKSKFAENNPGKFWFKNDVPVHLSCGDEHSAVVTGNNKLYMFGSNNWGQLGLGSKSAISKPTCVKALKPEKVKLAACGRNHTLVSTEGGNVYATGGNNEGQLGLGDTEERNTFHVISFFTSEHKIKQLSAGSNTSAALTEDGRLFMWGDNSEGQIGLKNVSNVCVPQQVTIGKPVSWISCGYYHSAFVTTDGELYVFGEPENGKLGLPNQLLGNHRTPQLVSEIPEKVIQVACGGEHTVVLTENAVYTFGLGQFGQLGLGTFLFETSEPKVIENIRDQTISYISCGENHTALITDIGLMYTFGDGRHGKLGLGLENFTNHFIPTLCSNFLRFIVKLERSPDSFSMRRTLPPIEGTLGLSACFLPNSVFPRCSERNLQESVLSEQDLMQPEEPDYLLDEMTKEAEIDNSSTVESLGETTDILNMTHIMSLNSNEKSLKLSPVQKQKDHEFSKTEELKLEDVDEEINAENVESKKKTVGDDESVPTGYHSKTEGAERTNDDSSAETIEKKEKANLEERAICEYNENPKGYMLDDADSSSLEILENSETTPSKDMKKTKKIFLFKRVPSINQKIVKNNNEPLPEIKSIGDQIILKSDNKDADQNHMSQNHQNIPPTNTERRSKSCTIL

SEQ ID NO: 71119 - protein, 873 aa, Homo sapiens
MGNHSGRPEDPEPGAFTTTKRTGIPAPREFSVTVSRERSVPRGPSNPRKSVSSPTSSNTPTPTKHLRTPSTKPKQENEGGEKAALESQVRELLAEAKAKDSEINRLRSELKKYKEKRTLNAEGTDALGPNVDGTSVSPGDTEPMIRALEEKNKNFQKELSDLEEENRVLKEKLIYLEHSPNSEGAASHTGDSSCPTSITQESSFGSPTGNQMSSDIDEYKKNIHGNALRTSGSSSSDVTKASLSPDASDFEHITAETPSRPLSSTSNPFKSSKCSTAGSSPNSVSELSLASLTEKIQKMEENHHSTAEELQATLQELSDQQQMVQELTAENEKLVDEKTILETSFHQHRERAEQLSQENEKLMNLLQERVKNEEPTTQEGKIIELEQKCTGILEQGRFEREKLLNIQQQLTCSLRKVEEENQGALEMIKRLKEENEKLNEFLELERHNNNMMAKTLEECRVTLEGLKMENGSLKSHLQGEKQKATEASAVEQTAESCEVQEMLKVARAEKDLLELSCNELRQELLKANGEIKHVSSLLAKVEKDYSYLKEICDHQAEQLSRTSLKLQEKASESDAEIKDMKETIFELEDQVEQHRAVKLHNNQLISELESSVIKLEEQKSDLERQLKTLTKQMKEETEEWRRFQADLQTAVVVANDIKCEAQQELRTVKRKLLEEEEKNARLQKELGDVQGHGRVVTSRAAPPPVDEEPESSEVDAAGRWPGVCVSRTSPTPPESATTVKSLIKSFDLGRPGGAGQNISVHKTPRSPLSGIPVRTAPAAAVSPMQNIDITNFSSSWSDGLAFCALLHTYLPAHIPYQELNSQEKKRNLLLAFEAAESVGIKPSLELSEMLYTDRPDWQSVMQYVAQIYKYFET

SEQ ID NO: 71120 - protein, 175 aa, Homo sapiens
MAAEIHSRPQSSRPVLLSKIEGHQDAVTAALLIPKEDGVITASEDRTIRVWLKRDSGQYWPSIYHTMASPCSAMAYHHDSRRIFVGQDNGAVMEFHVSEDFNKMNFIKTYPAHQNRVSAIIFSLATEWVISTGHDKCVSWMCTRSGNMLGRHFFTSWASCLHMLSLVIILGRSPC

SEQ ID NO: 71121 - protein, 166 aa, Homo sapiens
MATPLGWSKAGSGSVCLALDQLRDVIESQEELIHQLRNVEEKAAHAKTKVLLAKEEEKLQFALGEVEVLSKQLEKEKLAFEKALSSVKSKVLQESSKKDQLITKCNGRREARALHHGYINGLFPNHPVPVSKAGFHSNTCPQLRIQAGPGGPHLRKGLKGPGRPRK

SEQ ID NO: 71122 - protein, 91 aa, Homo sapiens
  MOD_RES (1)..(1): Any amino acid
XCVYIESRRPNTPYFICSIQDFKLSKRDHLLMNVKWYYRQSEVPDSVYQHLVQDRHNENDSGRELVITDPVIKNRELFISDYVDTYHAAAL

SEQ ID NO: 71123 - protein, 132 aa, Homo sapiens
RETGQQFAVKIVDVAKFTSSPGLSTEDLKREASICHMLKHPHIVELLETYSSDGMLYMVFEFMDGADLCFEIVKRADAGFVYSEAVASHYMRQILEALRYCHDNNIIHRDVKARWLMPVIPALWEAEAGGSP

SEQ ID NO: 71124 - protein, 938 aa, Homo sapiens
NSTMILSLVLERTGGLLGEIQVNWETVGPNSQEALLPQNRDIADPVSGLFYFGEGEGGVRTIILTIYPHEEIEVEETFIIKLHLVKGEAKLDSRAKDVTLTIQEFGDPNGVVQFAPETLSKKTYSEPLALEGPLLITFFVRRVKGTFGEIMVYWELSSEFDITEDFLSTSGFFTIADGESEASFDVHLLPDEVPEIEEDYVIQLVSVEGGAELDLEKSITWFSVYANDDPHGVFALYSDRQSILIGQNLIRSIQINITRLAGTFGDVAVGLRISSDHKEQPIVTENAERQLVVKDGATYKVDVVPIKNQVFLSLGSNFTLQLVTVMLVGGRFYGMPTILQEAKSAVLPVSEKAANSQVGFESTAFQLMNITAGTSHVMISRRGTYGALSVAWTTGYAPGLEIPEFIVVGNMTPTLGSLSFSHGEQRKGVFLWTFPSPGWPEAFVLHLSGVQSSAPGGAQLRSGFIVAEIEPMGVFQFSTSSRNIIVSEDTQMIRLHVQRLFGFHSDLIKVSYQTTAGSAKPLEDFEPVQNGELFFQKFQTEVDFEITIINDQLSEIEEFFYINLTSVEIRGLQKFDVNWSPRLNLDFSVAVITILDNDDLAGMDISFPETTVAVAVDTTLIPVETESTTYLSTSKTTTILQPTNVVAIVTEATGVSAIPEKLVTLHGTPAVSEKPDVATVTANVSIHGTFSLGPSIVYIEEEMKNGTFNTAEVLIRRTGGFTGNVSITVKTFGERCAQMEPNALPFRGIYGISNLTWAVEEEDFEEQTLTLIFLDGERERKVSVQILDDDEPEGQEFFYVFLTNPQGGAQIVEEKDDTGFAAFAMVIITGSDLHNGIIGFSEESQSGLELREGAVMRRLHLIVTRQPNRAFEDVKVFWRVTLNKTVVVLQKDGVNLVEELQSVSGTTTCTMGQTKCFISIELKPEKRNATEPIIKSFS

SEQ ID NO: 71125 - protein, 58 aa, Homo sapiens
MLSRCRSGLLHVLGLSFLLQTRRPILLCSPRLMKPLVVFVLGGPGAGKGTQCARIVEG

SEQ ID NO: 71126 - protein, 148 aa, Homo sapiens
MAVPETRPNHTIYINNLNEKIKKDELKKSLYAIFSQFGQILDILVSRSLKMRGQAFVIFKEVSSATNALRSMQGFPFYDKPMRIQYAKTDSDIIAKMKGTFVERDRKREKRKPKSQETPATKKAVQGGGATPVVGAVQGPVPGMPPMT

SEQ ID NO: 71127 - protein, 265 aa, Homo sapiens
MAAEREPPPLGDGKPTDFEDLEDGEDLFTSTVSTLESSPSSPEPASLPAEDISANSNGPKPTEVVLDDDREDLFAATEEVSLDSPEREPILSSEPSPAVTPVTPTTLIAPRIESKSMSAPVIFDRSREEIEEEANGDIFDIEIGVSDPEKVGDGMNAYMAYRVTTKTSLSMFSKSEFSVKRRFSDFLGLHSKLASKYLHVGYIVPPAPEKSIVGMTKVKVGKEDSSSTEFVEKRRAALERYLQRTVKHPTLLQDPDLRQFLESSE

SEQ ID NO: 71128 - protein, 149 aa, Homo sapiens
MEKTELIQKAKLAEQAERYDDMATCMKAVTEQGAELSNEERNLLSVAYKNVVGGRRSAWRVISSIEQKTDTSDKKLQLIKDYREKVESELRSICTTVLELLDKYLIANATNPESKVFYLKMKGDYFRYLAEVACGDDRKQTIDNSQGAY

SEQ ID NO: 71129 - protein, 123 aa, Homo sapiens
MEGAALLRVSVLCIWVQQNVPSGTDTGDPQSKPLGDWAAGTMDPGPAGSRGDSGEPCTLRPACRGQRQHGGASRISAEGPAPMPRRRTPSTAHLRVPKTSRRNLLCMRAVSLLRMPLSISRKK

SEQ ID NO: 71130 - protein, 2340 aa, Homo sapiens
MTEGARAADEVRVPLGAPPPGPAALVGASPESPGAPGREAERGSELGVSPSESPAAERGAELGADEEQRVPYPALAATVFFCLGQTTRPRSWCLRLVCNPWFEHVSMLVIMLNCVTLGMFRPCEDVECGSERCNILEMVIKMVALGLFGQKCYLGDTWNRLDFFIVVAGMMEYSLDGHNVSLSAIRTVRVLRPLRAINRVPSMRILVTLLLDTLPMLGNVLLLCFFVFFIFGIVGVQLWAGLLRNRCFLDSAFVRNNNLTFLRPYYQTEEGEENPFICSSRRDNGMQKCSHIPGRRELRMPCTLGWEAYTQPQAEGVGAARNACINWNQYYNVCRSGDSNPHNGAINFDNIGYAWIAIFQVITLEGWVDIMYYVMDAHSFYNFIYFILLIIVGSFFMINLCLVVIATQFSETKQRESQLMREQRARHLSNDSTLASFSEPGSCYEELLKYVGHIFRKVKRRSLRLYARWQSRWRKKVDPSAVQGQGPGHRQRRAGRHTASVHHLVYHHHHHHHHHYHFSHGSPRRPGPEPGACDTRLVRAGAPPSPPSPGRGPPDAESVHSIYHADCHIEGPQERARVAHAAATAAASLRLATGLGTMNYPTILPSGVGSGKGSTSPGPKGKWAGGPPGTGGHGPLSLNSPDPYEKIPHVVGEHGLGQAPGHLSGLSVPCPLPSPPAGTLTCELKSCPYCTRALEDPEGELSGSESGDSDGRGVYEFTQDVRHGDRWDPTRPPRATDTPGPGPGSPQRRAQQRAAPGEPGWMGRLWVTFSGKLRRIVDSKYFSRGIMMAILVNTLSMGVEYHEQPEELTNALEISNIVFTSMFALEMLLKLLACGPLGYIRNPYNIFDGIIVVISVWEIVGQADGGLSVLRTFRLLRVLKLVRFLPALRRQLVVLVKTMDNVATFCTLLMLFIFIFSILGMHLFGCKFSLKTDTGDTVPDRKNFDSLLWAIVTVFQILTQEDWNVVLYNGMASTSSWAALYFVALMTFGNYVLFNLLVAILVEGFQAEGDANRSDTDEDKTSVHFEEDFHKLRELQTTELKMCSLAVTPNGHLEGRGSLSPPLIMCTAATPMPTPKSSPFLDAAPSLPDSRRGSSSSGDPPLGDQKPPASLRSSPCAPWGPSGAWSSRRSSWSSLGRAPSLKRRGQCGERESLLSGEGKGSTDDEAEDGRAAPGPRATPLRRAESLDPRPLRPAALPPTKCRDRDGQVVALPSDFFLRIDSHREDAAELDDDSEDSCCLRLHKVLEPYKPQWCRSREAWALYLFSPQNRFRVSCQKVITHKMFDHVVLVFIFLNCVTIALERPDIDPGSTERVFLSVSNYIFTAIFVAEMMVKVVALGLLSGEHAYLQSSWNLLDGLLVLVSLVDIVVAMASAGGAKILGVLRVLRLLRTLRPLRVISRAPGLKLVVETLISSLRPIGNIVLICCAFFIIFGILGVQLFKGKFYYCEGPDTRNISTKAQCRAAHYRWVRRKYNFDNLGQALMSLFVLSSKDGWVNIMYDGLDAVGVDQQPVQNHNPWMLLYFISFLLIVSFFVLNMFVGVVVENFHKCRQHQEAEEARRREEKRLRRLERRRRSTFPSPEAQRRPYYADYSPTRRSIHSLCTSHYLDLFITFIICVNVITMSMEHYNQPKSLDEALKYCNYVFTIVFVFEAALKLVAFGFRRFFKDRWNQLDLAIVLLSLMGITLEEIEMSAALPINPTIIRIMRVLRIARVLKLLKMATGMRALLDTVVQALPQVGNLGLLFMLLFFIYAALGVELFGRLECSEDNPCEGLSRHATFSNFGMAFLTLFRVSTGDNWNGIMKDTLRECSREDKHCLSYLPALSPVYFVTFVLVAQFVLVNVVVAVLMKHLEESNKEAREDAELDAEIELEMAQGPGSARRVDADRPPLPQESPGARDAPNLVARKVSVSRMLSLPNDSYMFRPVVPASAPHPRPLQEVEMETYGAGTPLGSVASVHSPPAESCASLQIPLAVSSPARSGEPLHALSPRGTARSPSLSRLLCRQEAVHTDSLEGKIDSPRDTLDPAEPGEKTPVRPVTQGGSLQSPPRSPRPASVRTRKHTFGQRCVSSRPAAPGGEEAEASDPADEEVSHITSSACPWQPTAEPHGPEASPVAGGERDLRRLYSVDAQGFLDKPGRADEQWRPSAELGSGEPGEAKAWGPEAEPALGARRKKKMSPPCISVEPPAEDEGSARPSAAEGGSTTLRRRTPSCEATPHRDSLEPTEGSGAGGDPAAKGERWGQASCRAEHLTVPSFAFEPLDLGVPSGDPFLDGSHSVTPESRASSSGAIVPLEPPESEPPMPVGDPPEKRRGLYLTVPQCPLEKPGSPSATPAPGGGADDPV

SEQ ID NO: 71131 - protein, 157 aa, Homo sapiens
MCAARLAAAAAAAQSVYAFSARPLAGGEPVSLGSLRGKENAKNEEILNSLKYVRPGGGFEPNFMLFEKCEVNGAGAHPLFAFLREALPAPSDDATALMTDPKLITWSPVCRNDVAWNFEKFLVGPDGVPLRRYSRRFQTIDIEPDIEALLSQGPSCA

SEQ ID NO: 71132 - protein, 273 aa, Homo sapiens
MFLVEHVLTLIKQFKDKKKKNQKKPENDDDVEIKKQLSKYESQLSTNEEKVDTDDRTEGYLRADSQEPSHFDSQQPAVLEEEEVMIAHAHPQEVYNEYVPRGCKNKCHSHFHDTLGQSDDLIHHHHDYHHILHHHHHQNHHPHSHSQRYSREELKDAGVATLAWMVIMGDGLHNFSDGLAIGAAFTEGLSSGLSTSVAVFCHELPHELGDFAVLLKAGMTVKQAVLYNALSAMLAYLGMATGIFIGHYAENVSMWIFALTAGLFMYVALVDMV

SEQ ID NO: 71133 - protein, 74 aa, Homo sapiens
MSRKQNQKDSSGFIFDLQSNTVLAQGGAFENMKEKINAVRAIVPNKSNNEIILVLQHFDNCVDKTVQAFMEGSA

SEQ ID NO: 71134 - protein, 40 aa, Homo sapiens
MNGRVDYLVTEEEINLTRGPSGKWPRPKEPAAPGCCRPLS

SEQ ID NO: 71135 - protein, 233 aa, Homo sapiens
MGDGAVKQGFLYLQQQQTFGKKWRRFGASLYGGSDCALARLELQEGPEKPRRCEAARKVIRLSDCLRVAEAGGEASSPRDTSAFFLETKERLYLLAAPAAERGDWVQAICLLAFPGQRKELSGPEGKQSRPCMEENELYSSAVTVGPHKEFAVTMRPTEASERCHLRGSYTLRAGESALELWGGPEPGTQLYDWPYRFLRRFGRDKAVAASLERATLSSKPGKAMRSSWPWKR

SEQ ID NO: 71136 - protein, 1718 aa, Homo sapiens
MSGTSSPEAVKKLLENMQSDLRALSLECKKKFPPVKEAAESGIIKVKTIAARNTEILAALKENSSEVVQPFLMGCGTKEPKITQLCLAAIQRLMSHEVVSETAAGNIINMLWQLMENSLEELKLLQTVLVLLTTNTVVHDEALSKAIVLCFRLHFTKDNITNNTAAATVRQVVTVVFERMVAEDERHRDIIEQPVLVQGNSNRRSVSTLKPCAKDAYMLFQDLCQLVNADAPYWLVGMTEMTRTFGLELLESVLNDFPQVFLQHQEFSFLLKERVCPLVIKLFSPNIKFRQGSSTSSSPAPVEKPYFPICMRLLRVVSVLIKQFYSLLVTECEIFLSLLVKFLDADKPQWLRAVAVESIHRFCVQPQLLRSFCQSYDMKQHSTKVFRDIVNALGSFIQSLFLVPPTGNPATSNQAGNNNLGGSVSAPANSGMVGIGGGVTLLPAFEYRGTWIPILTITVQGSAKATYLEMLDKVEPPTIPEGYAMSVAFHCLLDLVRGITSMIEGELGELETECQTTTEEGSSPTQSTEQQDLQSTSDQMDKEIVSRAVWEEMVNACWCGLLAALSLLLDASTDEAATENILKAELTMAALCGRLGLVTSRDAFITAICKGSLPPHYALTVLNTTTAATLSNKSYSVQGQSVMMISPSSESHQQVVAVGQPLAVQPQGTVMLTSKNIQCMRTLLNLAHCHGAVLGTSWQLVLATLQHLVWILGLKPSSGGALKPGRAVEGPSTVLTTAVMTDLPVISNILSRLFESSQYLDDVSLHHLINALCSLSLEAMDMAYGNNKEPSLFAVAKLLETGLVNMHRIEILWRPLTGHLLEKVCQHPNSRMREWGAEALTSLIKAGLTFNHDPPLSQNQRLQLLLLNPLKEMSNINHPDIRLKQLECVLQILQSQGDSLGPGWPLVLGVMGAIRNDQGESLIRTAFQCLQLVVTDFLPTMPCTCLQIVVDVAGSFGLHNQELNISLTSIGLLWNISDYFFQRGETIEKELNKEEAAQQKQAEEKGVVLNRPFHPAPPFDCLWLCLYAKLGELCVDPRPAVRKSAGQTLFSTIGAHGTLLQHSTWHTVIWKVLFHLLDRVRESSTTADKEKIESGGGNILIHHSRDTAEKQWAETWVLTLAGVARIFNTRRYLLQPLGDFSRAWDVLLDHIQSAALSKNNEVSLAALKSFQEILQIVSPVRDSDKPETPPVVNVPVPVLIGPISGMSRPFVRTDSIGEKLGRYSSSEPPIVTDELEDLNLWWAAWNTWYRIGSESTKPPITFDKLTFIPSQPFLTALIQIFPALYQHIKTGFNMDDLQKLGVILHSAISVPISSDASPFILPSYTEAVLTSLQEAVLTALDVLQKAICVGPENMQIMYPAIFDQLLAFVEFSCKPPQYGQLETKHIANAKYNQIQLFAPAEWVALNYVPFAERSLEVVVDLYQKTACHKAVVNEKVLQNIIKTLRVPLSLKYSCPSESTWKLAVSSLLRVLSIGLPVARQHASSGKFDSMWPELANTFEDFLFTKSIPPDNLSIQEFQRNENIDVEVVQLISNEILPYANFIPKEFVGQIMTMLNKGSIHSQSSSFTEAEIDIRLREEFSKMCFETLLQFSFSNKVTTPQEGYISRMALSVLLKRSQDVLHRYIEDERLSGKCPLPRQQVTEIIFVLKAVSTLIDSLKKTQPENVDGNTWAQVIALYPTLVECITCSSSEVCSALKEALVPFKDFMQPPASRVQNGES

SEQ ID NO: 71137 - protein, 1556 aa, Homo sapiens
  MOD_RES (1)..(1): Any amino acid
XKFDDSLVHINIFLVDKKHPEFSSSYNRVNRSIDVDFNCLDVLITLQTWVVILDFFGIGSTADNHAMRLPPEGILHNVKLEPHASMESGLQDPVNTKLDLKVHSLSLVLNKTTSELAKANVSKLVAHLEMIEGDLALQGSIGSLSLSDLTCHGEFYRERFTTSGEEALIFQTFKYGRPDPLLRREHDIRVSLRMASVQYVHTQRFQAEVVAFIQHFTQLQDVLGRQRAAIEGQTVRDQAQRCSRVLLDIEAGAPVLLIPESSRSNNLIVANLGKLKVKNKFLFAGFPGTFSLQDKESVPSASPTGIPKHSLRKTTSTEEPRGTHSQGQFTMPLAGMSLGSLKSEFVPSTSTKQQGPQPTLSVGQESSSPEDHVCLLDCVVVDLQDMDIFAAERHPREYSKAPEDSSGDLIFPSYFVRQTGGSLLTEPCRLKLQVERNLDKEISHTVPDISIHGNLSSVHCSLDLYKYKLIRGLLENNLGEPIEEFMRPYDLQDPRIHTVLSGEVYTCMCFLIDMVNVSLELKDPKRKEGAGSLARFDFKKCKLLYESFSNQTKSINLVSHSMMAFDTRYAGQKTSPGMTNVFSCIFQPAKNSSTTQGSIQIELHFRSTKDSSCFTVVLNNLRVFLIFDWLLLVHDFLHTPSDIKKQNHVTPSRHRNSSSESAIVPKTVKSGVVTKRSSLPVSNERHLEVKVNVTGTEFVVIEDVSCFDTNAIILKGTTVLTYKPRFVDRPFSGSLFGIEVFSCRLGNEHDTALSIVDPVQIQMELVGNSSYQNSSGLMDAFNSEDFPPVLEIQLQALDIRLSYNDVQLFLAIAKSIPEQANAAVPDSVALESDSVGTYLPGASRVGEEIREGTRHTLDPVLELQLARLQELGFSMDDCRKALLACQGQLKKAASWLFKNAEPLKSLSLASTSRDSPGAVAAPLISGVEIKAESVCICFIDDCMDCDVPLAELTFSRLNFLQRVRTSPEGYAHFTLSGDYYNRALSGWEPFIEPWPCSVSWQQQAASRLHPPRLKLEAKAKPRLDINITSVLIDQYVSTKESWMADYCKDDKDIESAKSEDWMGSSVDPPCFGQSLPLVYLRTRSTASLTNLEHQIYAREVKTPKRRQPFVPFALRNHTGCTLWFATLTTTPTRAALSHSGSPGVVPEGNGTFLDDTHNVSEWREVLTGEEIPFEFEARGKLRHRHTHDLRIHQLQVRVNGWEQVSPVSVDKVGTFFRYAAPDKNSSSSTIGSPSSRTNIIHPQVYFSSLPPVRVVFAVTMEGSARKVITVRSALIVRNRLETPMELRLDSPSAPDKPVVLPAIMPGDSFAVPLHLTSWRLQARPKGLGVFFCKAPIHWTNVVKTAEISSSKRECHSMDTEKSRFFRFCVAIKKENYPDYMPSNIFSDSAKQIFRQPGHTIYLLPTVVICNLLPCELDFYVKGMPINGTLKPGKEAALHTADTSQNIELGVSLENFPLCKELLIPPGTQNYMVRMRLYDVNRRQLNLTIRIVCRAEGSLKIFISAPYWLINKTGLPLIFRQDNAKTDAAGQFEEHELARSLSPLLFCYADKEQPNLY

SEQ ID NO: 71138 - protein, 233 aa, Homo sapiens
MWQLLLPTALLLLVSAGMRTEDLPKAVVFLEPQWYSVLEKDSVTLKCQGAYSPEDNSTQWFHNENLISSQASSYFIDAATVNDSGEYRCQTNLSTLSDPVQLEVHIGWLLLQAPRWVFKEEDPIHLRCHSWKNTALHKVTYLQNGKDRKYFHHNSDFHIPKATLKDSGSYFCRGLVGSKNVSSETVNITITQGLAVSTISSFSPPGYQVSFCLVMVLLFAVDTGLYFSVKTNI

SEQ ID NO: 71139 - protein, 138 aa, Homo sapiens
MDGTETRQRRLDSCGKPGELGLPHPLSTGGLPVASEDGALRAPESQSVTPKPLETEPSRETTWSIGLQVTVPFMFAGLGLSWAGMLLDYFQHWPVFVEVKDLLTLVPPLVGLKGNLEMTLASRLSTAANTGQIDDPQE

SEQ ID NO: 71140 - protein, 811 aa, Homo sapiens
MKDVNVENVNQQRGEKSIFKGKSPSKIMGKENLEALQRPTLLHLIHGKVKEFYSYQNEAVAIENIKRGLASLFQTQLSSGTTNEVDISGNCKVTYQAHQDKVIKIKALDSCKIARSGFTTPNQVLGVSSKATSVTTYKIEDSFVIAVLAEETHNFGLNFLQTIKGKIVSKQKLELKTTEAGPRLMSGKQAAAIIKAVDSKYTAIPIVGQVFQSHCKGCPSLSELWRSTRKYLQPDNLSKAEAVRNFLAFIQHLRTAKKEEILQILKMENKEVLPQLVDAVTSAQTSDSLEAILDFLDFKSDSSIILQERFLYACGFASHPNEELLRALISKFKGSIGSSDIRETVMIITGTLVRKLCQNEGCKLKAVVEAKKLILGGLEKAEKKEDTRMYLLALKNALLPEGIPSLLKYAEAGEGPISHLATTALQRYDLPFITDEVKKTLNRIYHQNRKVHEKTVRTAAAAIILNNNPSYMDVKNILLSIGELPQEMNKYMLAIVQDILRFEMPASKIVRRVLKEMVAHNYDRFSRSGSSSAYTGYIERSPRSASTYSLDILYSGSGILRRSNLNIFQYIGKAGLHGSQVVIEAQGLEALIAATPDEGEENLDSYAGMSAILFDVQLRPVTFFNGYSDLMSKMLSASGDPISVVKGLILLIDHSQELQLQSGLKANIEVQGGLAIDISGAMEFSLWYRESKTRVKNRVTVVITTDITVDSSFVKAGLETSTETEAGLEFISTVQFSQYPFLVCMQMDKDEAPFRQFEKKYERLSTGRGYVSQKRKESVLAGCEFPLHQENSEMCKVVFAPQPDSTSSGWF

SEQ ID NO: 71141 - protein, 172 aa, Homo sapiens
MGSPLRFDGRVVLVTGAGAGLGRAYALAFAERGALVVVNDLGGDFKGVGKGSLAADKVVEEIRRRGGKAVANYDSVEEGEKVVKTALDAFGRIDVVVNNAGILRDRSFARISDEDWDIIHRVHLRGSFQVTRAAWEHMKKQKYGRLEYSGMNMAHCSLTSWAQAVLPPQPPK

SEQ ID NO: 71142 - protein, 187 aa, Homo sapiens
MAALDSLSLFTSLGLSEQKARETLKNSALSAQLREAATQQTLGSTIDKATGILLYGLASRLRDTRRLSFLVSYIASKKIHTEPQLSAALEYVRSHPLDPIDTVDFERECGVGVIVTPEQIEEAVEAAINRHRPQLLVERYHFNMGLLMGEARAVLKWADGKMIKNEVDMQVLHLLGPKLEADLEKKF

SEQ ID NO: 71143 - protein, 177 aa, Homo sapiens
DSSALLPCDLLSDQSEDEVTPSDDEGLSVVEYVKGYPPNSPYIGSSPTLCHLLPVKAPFCCLRLDKGCKHNSYEDAKAYGFKNKLIIVSAETAGNGLYNFIVPLRAYYRSRKELNPIVLLLDNKTAVPTGPTTTSWKPSAASPWSTTWRALWTTWTACCSVASSMRTTWWWWTRRAP

SEQ ID NO: 71144 - protein, 331 aa, Homo sapiens
MAGPAWISKVSRLLGAFHNPKQVTRGFTGGVQTVTLIPGDGIGPEISAAVMKIFDAAKAPIQWEERNVTAIQGPGGKWMIPSEAKESMDKNKMGLKGYKTPYTDVNIVTIRENTEGEYSGIEHVIVDGVVQSIKLITEGASKRIAEFAFEYARNNHRSNVTAVHKANIMRMSDGLFLQKCREVAESCKDIKFNEMYLDTVCLNMVQDPSQFDVLVMPNLYGDILSDLCAGLIGGLGVTPSGNIGANGVAIFESVHGTAPDIAGKDMANPTALLLSAVMMLRHMGLFDHAARIEAACFATIKDGKSLTKDLGGNAKCSDFTEEICRRVKDLD

SEQ ID NO: 71145 - protein, 154 aa, Homo sapiens
  MOD_RES (1)..(1): Any amino acid
XLLSRDFLLGHVDAESLVRHHPDCKDLLIEALKFHLLPEQRGVLGTSRTRPRRCEGAGPVLFAVGASPGAWGVAQQWDPLTSPVSTCPPQAAGACLPSTETVRPTTRAPTAGTWWPPCPRAGPGWEWLRWGTGSMLWAAMMGPQTWLPWSPTTP

SEQ ID NO: 71146 - protein, 92 aa, Homo sapiens
MSNKDRHIDSSCSSFIKTEPSSPASLTDSVNHHSPGGSSDASGSYSSTMNGHQNGLDSPPLYPSAPILGGSGPVRKLYDDCSSTIVEDPQTK

SEQ ID NO: 71147 - protein, 77 aa, Homo sapiens
  MOD_RES (1)..(1): Any amino acid
XGFGGSRGGGGYGGSGDGYNGFGNDGNNFGGGGSYNDFGNYNNQSSNFGPMKGGNFGGRSSGPYGGGGQYFAKPRNQ

SEQ ID NO: 71148 - protein, 77 aa, Homo sapiens
MERPLENGDESPDSQGHATDWRFAVCSFRDAWEEEEPASQMHVKDPGPPRPPAGATQDEELQGSPLSRKFQLPPAAD

SEQ ID NO: 71149 - protein, 915 aa, Homo sapiens
IVGKESKSAATKEESVSLKEKTKPLTPSIGAKEKEQHVALVTSTLPPLPLPPMLPEDKEADSLRGNISVKAVKKEVEKKLRCLLADLPLPPELPGGDDLSKSPEEKKTATQLHSKRRPKICGPRYGETKEKDIDWGKRCVDKFDIIGIIGEGTYGQVYKARDKDTGEMVALKKVRLDNEKEGFPITAIREIKILRQLTHQSIINMKEIVTDKEDALDFKKDKGAFYLVFEYMDHDLMGLLESGLVHFNENHIKSFMRQLMEGLDYCHKKNFLHRDIKCSNILLNNRGQIKLADFGLARLYSSEESRPYTNKVITLWYRPPELLLGEERYTPAIDVWSCGCILGELFTKKPIFQANQELAQLELIRASLCCQAGVQWRNLGSLQPLPPRFNRICGSPCPAVWPDVIKLPYFNTMKPKKQYRRKLREEFVFIPAAALDLFDYMLALDPSKRCTAEQALQCEFLRDVEPSKMPPPDLPLWQDCHELWSKKRRRQKQMGMTDDVSTIKAPRKDLSLGLDDSRTNTPQGVLPSSQLKSQGSSNVAPGEKQTDPSTPQQESSKPLGGIQPSSQTIQPKVETDAAQAAVQSAFAVLLTQLIKAQQSKQKDVLLEERENGSGHEASLQLRPPPEPSTPVSGQDDLIQHQDMRILELTPEPDRPRILPPDQRPPEPPEPPPVTEEDLDYRTENQHVPTTSSSLTDPHAGVKAALLQLLAQHQPQDDPKREGGIDYQAGDTYVSTSDYKDNFGSSSFSSAPYVSNDGLGSSSAPPLERRSFIGNSDIQSLDNYSTASSHSGGPPQPSAFSESFPSSVAGYGDIYLNAGPMLFSGDKDHRFEYSHGPIAVLANSSDPSTGPESTHPLPAKMHNYNYGGNLQENPSGPSLMHGQTWTSPAQGPGYSQGYRGHISTSTGRGRGRGLPY

SEQ ID NO: 71150 - protein, 141 aa, Homo sapiens
MESLQLKPGEVIYKCPKCCCIKPERAHHCSICKRCIRKMDHHCPWVNNCVGEKNQRFFVLFTMYIALSSVHALILCGFQFISCVRGQWTECSDFSPPITVILLIFLCLEGLLFFTFTAVMFGTQIHSICNDETEIERLKSE

SEQ ID NO: 71151 - protein, 465 aa, Homo sapiens
MSLLCVRVKRAKFQGSPDKFNTYVTLKVQNVKSTTVAVRGDQPSWEQDFMFEISRLDLGLSVEVWNKGLIWDTMVGTVWIALKTIRQSDEEGPGEWSTLEAETLMKDDEICGTRNPTPHKILLDTRFELPFDIPEEEARYWTYKWEQINALGADNEYSSQEESQRKPLPTAAAQCSFEDPDSAVDDRDSDYRSETSNSFPPPYHTASQPNASVHQFPVPVRSPQQLLLQGSSRDSCNDSMQSYDLDYPERRAISPTSSSRYGSSCNVSQGSSQLSELDQYHEQDDDHRETDSIHSCHSSHSLSRDGQAGFGEQEKPLEVTGQAEKEAACEPKEMKEDATTHPPPDLVLQKDHFLGPQESFPEENASSPFTQARAHWIRAVTKVRLQLQEKKSEEPFRFQMMVTPLCLSGSRKGQPEGSMALTACQIYAERSHCHLSVIWLCHWSSLGRQESLLQWLHALLLRTKS

SEQ ID NO: 71152 - protein, 226 aa, Homo sapiens
MQRRGALFGMPGGSGGRKMAAGDIGELLVPHMPTIRVPRSGDRVYKNECAFSYDSPKVRGASGGALPKRRNSKIFLDLDTDDDLNSDDYEYEDEAKLVIFPDHYEIALPNIEELPALVTIACDAVLSSKSPYRKQDPDTWENELPVSKYANNLTQLDNGVRIPPSGWKCARCDLRENLWLNLTDGSVLCGKWFFDSSGGNGHALEHYRDMGYPLAVKLGTITPDGA

SEQ ID NO: 71153 - protein, 131 aa, Homo sapiens; identical to SEQ ID NO: 43351

SEQ ID NO: 71154 - protein, 60 aa, Homo sapiens
MDVLASYSIFQELQLVHDTGYFSALPSLEETWQQTCLELERYLQTEPRRISETFGEDLDC

SEQ ID NO: 71155 - protein, 213 aa, Homo sapiens
MVEALRVWASTHMSPSWTLLKLCDVQPMQYFDLTCQLLGKAEVDGASFLLKVWDGTRTPFPSWRVLIQDLVLEGDLSHIHRLQNLTIDILVYDNHVHVARSLKVGSFLRIYSLHTKLQSMNSENQTMLSLEFHLHGGTSYGRGIRVLPESNSDVDQLKKDLESANLTANQHSDVICQSEPDDSFPSSGSVSLYEVERCQQLSATILTDHQYLE

SEQ ID NO: 71156 - protein, 740 aa, Homo sapiens
  MOD_RES (1)..(1): Any amino acid
XHDSNKSKILEKRLRYLNDHFTYNLYCNICRSLFEKDKLLFSFLLCANLLLARKEIEYQELMFLLTGGVSLKSAEKNPDPTWLQDKSWEEICRASEFPAFRGLRQHFCEHIYEWREIYDSKEPHNAKFPAPMDKNLNELQKIIILRCLRPDKITPAITNYVTDKLGKKFVEPPPFDLTKSYLDSNCTIPLIFVLSPGADPMASLLKFANDKSMSGNKFQAISLGQGQGPIAAKMIKAAIEEGTWVCLQNCHLAVSWMPMLEKICEDFTSETCNSSFRLWLTSYPSSKFPVTILQNGVKMTNEPPTGLRLNLLQSYLTDPVSDPEFFKGCRGKELLFINEYDTIPFEAISYLTGECNYGGRVTDDWDRRLLLTMLADFYNLYIVENPHYKFSPSGNYFAPPKGTYEDYIEFIKKLPFTQHPEIFGLHENVDISKDLQQTKTLFESLLLTQGGSKQTGASGSTDQILLEITKDILNKLPSDFDIEMALRKYPVRYEESMNTVLVQEMERFNNLIITIRNTLRDLEKAIKGVVVMDSALEALSGSLLVGKVPEIWAKRSYPSLKPLGSYITDFLARLNFLQDWYNSGKPCVFWLSGFFFTQAFLTGAMQNYARKYTTPIDLLGYEFEVIPSDTSDTSPEDGVYIHGLYLDGARWDRESGLLAEQYPKLLFDLMPIIWIKPTQKSRIIKSDAYVCPLYKTSERKGTLSTTGHSTNFVIAMLLKTDQPTRHWIKRGVALLCQLDD

SEQ ID NO: 71157 - protein, 139 aa, Homo sapiens
MLFVFGYRAQKIRSKKLSVLIHNSDEHKDIQSCTVEVHFQKIIDKEGDDYEVIPNSNFYVSRTACRDNTSVYHISGKKKTFKDVGNLLRSHGIDLDHNRFLILQGEVEQIAMMKPKGQTEHDEGMLEYLEDIIGCGRLN

SEQ ID NO: 71158 - protein, 95 aa, Homo sapiens
MTTSSIRRQMKNIVNNYSEAEIKVREATSNDPWGPSSSLMTEIADLTYNVVAFSEIMSMVWKRLNDHGKNWRHVYKALTLLDYLIKTGSERVAQQ

SEQ ID NO: 71159 - protein, 66 aa, Homo sapiens
MSPLKNGMIEDWECFRAILDHTYSKHVKSEPNLHPVLMSEAPWNTRAKREKLTELMFEQYNIPAFF

SEQ ID NO: 71160 - protein, 899 aa, Homo sapiens
MLLLLLLAPLFLRPPGAGGVQTPNATSEGCQIIHPPWEGGIRYRGLTRDQVKAINFLPVDYEIEYVCRGEREVVGPKVRKCLANGSWTDMDTPSRCVNRTPHSERRAVYIGALFPMSGGWPGGQACQPAVEMALEDVNSRRDILPDYELKLIHHDSKCDPGQATKYLYELLYNDPIKIILMPGCSSVSTLVAEAARMWNLIVLSYGSSSPALSNRQRFPTFFRTHPSATLHNPTRVKLFEKWGWKKIATIQQTTEVFTSTLDDLEERVKEAGIEITFRQSFFSDPAVPVKNLKRQDARIIVGLFYETEARKVFCEVYKERLFGKKYVWFLIGWYADNWFKIYDPSINCTVDEMTEAVEGHITTEIVMLNPANTRSISNMTSQEFVEKLTKRLKRHPEETGGFQEAPLAYDAIWALALALNKTSGGGGRSGVRLEDFNYNNQTITDQIYRAMNSSSFEGVSGHVVFDASGSRMAWTLIEQLQGGSYKKIGYYDSTKDDLSWSKTDKWIGGSPPADQTLVIKTFRFLSQKLFISVSVLSSLGIVLAVVCLSFNIYNSHVRYIQNSQPNLNNLTAVGCSLALAAVFPLGLDGYHIGRNQFPFVCQARLWLLGLGFSLGYGSMFTKIWWVHTVFTKKEEKKEWRKTLEPWKLYATVGLLVGMDVLTLAIWQIVDPLHRTIETFAKEEPKEDIDVSILPQLEHCSSRKMNTWLGIFYGYKGLLLLLGIFLAYETKSVSTEKINDHRAVGMAIYNVAVLCLITAPVTMILSSQQDAAFAFASLAIVFSSYITLVVLFVPKMRRLITRGEWQSEAQDTMKTGSSTNNNEEEKSRLLEKENRELEKIIAEKEERVSELRHQLQSRQQLRSRRHPPTPPEPSGGLPRGPPEPPDRLSCDGSRVHLLYK

SEQ ID NO: 71161 - protein, 167 aa, Homo sapiens
MVLAELYVSDREGSDATGDGTKEKPFKTGLKALMTVGKEPFPTIYVDSQKENERWNVISKSQLKNIKKMWHREQMKSESREKKEVKIGALEGYRGQRVKVFGWVHRLRRQGKNLMFLVLRDGTGYLQCVLADELCQCYNGVLLSTESSVAVYGMLNLTPKGKQAPGG

SEQ ID NO: 71162 - protein, 219 aa, Homo sapiens
MEDPSGAREPRARPRERDPGRRPHPDQGRTHDRPRDRPGDPRRKRSSDGNRRRDGDRDPERDQERDGNRDRNRDRERERERERDPDRGPRRDTHRDAGPRAGEHGVWEKPRQSRTRDGARGLTWDAAAPPGPAPWEAPEPPQPQRKGDPGRRRPESEPPSERYLPSTPRPGREEVEYYQSEAEGLLECHKCKYLCTGRGEPFCRLFDHLLSLVVLEGMV

SEQ ID NO: 71163 - protein, 129 aa, Homo sapiens
MAQTDKPTCIPPELPKMLKEFAKAAIRVQPQDLIQWAADYFEALSRGETPPVRERSERVALCNRAELTPELLKILHSQVAGRLIIRAEELAQMWKVVNLPTDLFNSVMNVGRFTEEIEWLKFLALACSA

SEQ ID NO: 71164 - protein, 71 aa, Homo sapiens
MAKVEQVLSLEPQHELKFRGPFTDVVTTNLKLGNPTDRNVCFKVKTTAPRRYCVRPNSGIIDAGASINVSA

SEQ ID NO: 71165 - protein, 370 aa, Homo sapiens
MQNSHSGVNQLGGVFVNGRPLPDSTRQKIVELAHSGARPCDISRILQTHADAKVQVLDNQNVSNGCVSKILGRYYETGSIRPRAIGGSKPRVATPEVVSKIAQYKRECPSIFAWEIRDRLLSEGVCTNDNIPSVSSINRVLRNLASEKQQMGADGMYDKLRMLNGQTGSWGTRPGWYPGTSVPGQPTQDGCQQQEGGGENTNSISSNGEDSDEAQMRLQLKRKLQRNRTSFTQEQIEALEKEFERTHYPDVFARERLAAKIDLPEARIQVWFSNRRAKWRREEKLRNQRRQASNTPSHIPISSSFSTSVYQPIPQPTTPVSSFTSGSMLGRTDTALTNTYSALPPMPSFTMANNLPMQPPVPSQTSSYSC

SEQ ID NO: 71166 - protein, 73 aa, Homo sapiens
MATHSPQKSHQCAHCEKTFNRKDHLKNHLQTHDPNKMAFGCEECGKKYNTMLGYKRHLALHAASSGDLTCGVC

SEQ ID NO: 71167 - protein, 145 aa, Homo sapiens
MSTIIPPVPLANPENQFRSDYIKSIAPITDFEYSQEFFDHVKKLWDDEGVKACFERSNEYQLIDCAQYFLERIDSVSLVDYTPTDQDLLRCRVLTSGIFETRFQVDKVNFHMFDVGGQRDERRKWIQCFNDVTAIIYVAACSSYN

SEQ ID NO: 71168 - protein, 104 aa, Homo sapiens
MGKQNSKLAPEVMEDLVKSTEFNEHELKQWYKGFLKDCPSGRLNLEEFQQLYVKFFPYGDASKFAQHAFRTFDKNGDGTIDFREFICALSITSRGSFEQKLNWA

SEQ ID NO: 71169 - protein, 107 aa, Homo sapiens
MSSKRPASPYGEADGEVAMVTSRQKVEEEESDGLPAFHLPLHEVDGNKVMSSFAPHNSSTSPQKAEEGGRQSGESLSSTALGTPERRKGSLADVVDTLKQRKMEELI

SEQ ID NO: 71170 - protein, 77 aa, Homo sapiens
MEESKTLKSENHEPKKNVICEESKAVQVIGNQTLKARNDKSVKEIENSSPNRNSSKKNKQNDICIEKTEVKSCKVNA

SEQ ID NO: 71171 - protein, 193 aa, Homo sapiens
MPGRSSSNSGSTGFISFSGVESALSSLKNFQACINSGMDTASSVALDLVESQTEVSSEYSMDKAMVEFATLDRQLNHYVKAVQSTINHVKEERPEKIPDLKLLVEKKFLALQSKNSDADFQNNEKFVQFKQQLKELKKQCGLQADREADGTEGVDEDIIVTQSQTNFTCPITKEEMKKPVKNKVCGHTYEEDA

SEQ ID NO: 71172 - protein, 246 aa, Homo sapiens
EASETAGSGFLYSATPGADVCFARQHNTSDNNNQCLLGANGNILLHLNPQKPGAIDNQPLVTQEPVKATSLTLEGGRLKRTPQLIHGRDYEMVPEPVWRALYHWYGANLALPRPVIKNSKTDIPELELFPRYLLFLRQQPATRTQQSNIWVNMGMMSLRMFPQHLPRGNVPSPNAPLKRVLAYTGCFSRMQTIKEIHEYLSQRLRIKEEDMRLWLYNSENYLTLLDDEDHKLEYLKIQDEQHLVIE

SEQ ID NO: 71173 - protein, 129 aa, Homo sapiens
MAFSPWQILSPVQWAKWTWSAVRGGAAGEDEAGGPEGDPEEEDSQAETKSLSFSSDSEGNFETPEAETPIRSPFKESCDPSLGLAGPGAKSQESQEADEQLVAEVVEKCSSKTCSKPSENEVPQQAIDS

SEQ ID NO: 71174 - protein, 96 aa, Homo sapiens
  MOD_RES (1)..(1): Any amino acid
XGYGGGGPGYSGGSRGYGSGGQGYGNQGSGYGGSGSYDSYNNGGGGGFGGGGSYNDFGNYNNQSSNFGPMKGGNFGGRSSGPYGGGGQYFAKPRNQ

SEQ ID NO: 71175 - protein, 184 aa, Homo sapiens
MHLEPQSMVWLPVLHRVAAAETAKHQAKCNICKECPIVGFRYRSLKHFNYDVCQSCFFSGRTAKGHKLHYPMVEYCIPTTSGEDVRDFTKVLKNKFRSKKYFAKHPRLGYLPVQTVLEGDNLETPSQSPQLFHDDTHSRIEQYATRLAQMERTNGSFLTDSSSTTGSVEDEHALIQQYCQTLGG

SEQ ID NO: 71176 - protein, 60 aa, Homo sapiens
MAAVGAGGSTAAPGPGAVSAGALEPGTASAGETVCPSSRMGGGGRDRWESGMFLTKLTGA

SEQ ID NO: 71177 - protein, 211 aa, Homo sapiens
MNSLSEANTKFMFDLFQQFRKSKENNIFYSPISITSALGMVLLGAKDNTAQQISKVLHFDQVTENTTEKAATYHEYLDAIKKFYQTSVESTDFANAPEESRKKINSWVESQTNEKIKNLFPDGTIGNDTTLVLVNAIYFKGQWENKFKKENTKEEKFWPNKNTYKSVQMMRQYNSFNFALLEDVQAKVLEIPYKGKDLSMIVLLPNEIDGL

SEQ ID NO: 71178 - protein, 8 aa, Homo sapiens
MESSDVNK

SEQ ID NO: 71179 - protein, 49 aa, Homo sapiens
MKDNDIKRLLYTHLLCIFSIILSVFIPSLFLENFSILETHLTWLCICSG

SEQ ID NO: 71180 - protein, 527 aa, Homo sapiens [sequence omitted]

SEQ ID NO: 71181 - protein, 207 aa, Homo sapiens
MATVGAPRHFCRCACFCTDNLYVARYGLHVRFRGEQQLRRDYGPILRSRGCVSAKDFQQLLAEAAARAAAPLPPPPSPGVSGGKLPRRVLSNLWNTGLGHDCLLSLCGPRWLSFFICTVASGGWEAPPGNNPVPPQLEQEVERRQRLGQESAARKALIASSYHPARPEVYDSLQDAALAPEFLAVTEYSVSPDADLKGLLQRLETVS

SEQ ID NO: 71182 - protein, 74 aa, Homo sapiens
MAAAAAEQQQFYLLLGNLLSPDNVVRKQAEETYENIPGQSKITFLLQAIRNTTAAEEARQMAAVLLRRLLSSAF

SEQ ID NO: 71183 - protein, 112 aa, Homo sapiens
MCGDCVEKEYPNRGNTCLENGSFLLNFTGCAVCSKRDFMLITNKSLKEEDGEEIVTYDHLCKNCHHVIARHEYTFSIMDEFQEYTMLCLLCGKAEDTISILPDDPRQMTLLF

SEQ ID NO: 71184 - protein, 165 aa, Homo sapiens
SSSVSPSASFRGAEKHRNSADYSSESKKQKTEEKEIAARYNEKSTTPVSKSNTPTPRTDAPTPGSNSTPGLRPVPGKPPGVDPLASSLRTPMAVPCPYPTPFGIVPHAGMNGELTSPGAAYAGLHNISPQMSAAAAAAAAAAAYGRSPVVGFDPHHHMRVPAIPP

SEQ ID NO: 71185 - protein, 281 aa, Homo sapiens
  MOD_RES (1)..(1): Any amino acid
XRTPAFAAWFPATCIPSCSASCAITNSQRWPISSPKRQELSAKVPERKLQANGPVAKKAKKKASSSDSEDSSEEEEEVQGPPAKKAAVPAKRVGLPPGKAAAKASESSSSEESSDDDDEEDQKKQPVQKGVKPQAKAAKAPPKKAKSSDSDSDSSSEDEPPKNQKPKITPVTVKAQTKAPPKPARAAPKIANGKAASSSSSSSSSSSSDDSEEEKAAATPKKTVPKKQVVAKAPVKAATTPTRKSSSSEDSSSDEEEEQKKPMKNKPGPYSSVPPPSAPPP

SEQ ID NO: 71186 - protein, 341 aa, Homo sapiens
MEEFSLTTFFCRMWGLKVLLLPVVSFALYPEEILDTHWELWKKTHRKQYNNKVDEISRRLIWEKNLKYISIHNLEASLGVHTYELAMNHLGDMTSEEVVQKMTGLKVPLSHSRSNDTLYIPEWEGRAPDSVDYRKKGYVTPVKNQGQCGSCWAFSSVGALEGQLKKKTGKLLNLSPQNLVDCVSENDGCGGGYMTNAFQYVQKNRGIDSEDAYPYVGQEESCMYNPTGKAAKCRGYREIPEGNEKALKRAVARVGPVSVAIDASLTSFQFYSKGVYYDESCNSDNLNHAVLAVGYGIQKGNKHWIIKNSWGENWGNKGYILMARNKNNACGIANLASFPKM

SEQ ID NO: 71187 - protein, 437 aa, Homo sapiens
MSEFWLISAPGDKENLQALERMNTVTSKSNLSYNTKFAIPDFKVGTLDSLVGLSDELGKLDTFAESLIRRMAQSVVEVMEDSKGKVQEHLLANGGLKGKMKCLKIDLTSFVTHFEWDMAKYPVKQPLVSVVDTIAKQLAQIEMDLKSRTAAYNTLKTNLENLEKKSMGNLFTRTLSDIVSKEDFVLDSEYLVTLLVIVPKPNYSQWQKTYESLSDMVVPRSTKLITEDKEGGLFTVTLFRKVIEDFKTKAKENKFTVREFYYDEKEIEREREEMARLLSDKKQQYQTSCVALKKGSSTFPDHKVKVTPLGNPDRPAAGQTDRERESEGEGEGPLLRWLKVNFSEAFIAWIHIKALRVFVESVLRYGLPVNFQAVLLQPHKKSSTKRLREVLNSVFRHLDEVAATSILDASVEIPGLQLNNQDYFPYVYFHIDLSLLD

SEQ ID NO: 71188 - protein, 198 aa, Homo sapiens
MILYRLKERFQLSLRQDKEKNQEIHLSPITLQPALSEAKTVHSMVQPEQAPKVLNVVVDPQGRGAPEIKATTATSVCPSPFKMKPIGLQERRGSNVSLTLDMSSLGNIEPFVSIPTPREKVAMEYLQSASRILTRSQLRDVVASSHLLQSEFMEIPMNFVDPKEIDIPRHGTKNRYKTILPNPLSRVCLRPKNVTDSL

SEQ ID NO: 71189 - protein, 81 aa, Homo sapiens
  MOD_RES (1)..(1): Any amino acid
XVRAGARLVEVALCSFTVTCLEVMRRFLLLYATQQGQAKAIAEEICEQAVVHGFSADLHCISESDKVSVIQNTPTFAMGGR

SEQ ID NO: 71190 - protein, 80 aa, Homo sapiens
MFPLARNALSSLKIQSILQSMARHSHVKHSPDFHDKYGNAVLASGTAFCVATWVFTATQIGIEWNLSPVGRVTPKEWKHQ

SEQ ID NO: 71191 - protein, 757 aa, Homo sapiens
MAAPDLAHGGHVSRDSVCLHEEQTQAAGMVAGWLINCYQDAVTFDDVAVDFTQEEWTLLDPSQRDLYRDVMLENYENLASVGHHLFQPSVIYWLEQEEELRAGRRAVLQEWRLKTKGPALRQDRSWFRASNETQTARSHNGGQLCDRTQCGEAFSEHSGLSTHVRTQNTGDSCVSNHYERDFFIPCQKTLFKIGEQFSVLGQCGKAFSSTPNVVSQQACTRDRSLDYSSCGEVFLNQSYLQARAGSHNGEETWKWKPCGKALTHSMGCATPVEMHAVRNPHVCRECGKAFRYTAYLTGRVQVHPGEKPCELEECGKASPVSSSLTQHVRIHAAEKPCECKECGKAFTGLSGLSKHVQTDPGQKPYECKDCGKACGGFYLLNEHGKTHTREKPFACVVCGKYFRNSSCLNNHVRIHTGIKPYTCSYCGKAFTVRCGLTRHVRTHTGEKPYTCKDCGKAFCTSSGLTEHVRTHTGEKPYECKDCGKSFTVSSSLTEHARIHTGEKPYECKQCGKAFTGRSGLTKHMRTHTGEKPYECKDCGKAYNRVYLLNEHVKTHTEEKPFICTVCRKSFRNSSCLNKHIQIHTGIKPYECKDCGKTFTVSSSLTEHIRTHTGEKPYECKVCGKAFTTSSHLIVHIRTHTGEKPYICKECGKAFASSSHLIEHRRTHTGEKPYICNECGKAFRASSHLHKHGRIHTGQKPYKCKECGKAYNRFYLLKEHLKTYTEEQVFVCKDCGKSFKNSSCLNHHTQIHTDEKPF

SEQ ID NO: 71192 - protein, 134 aa, Homo sapiens
  MOD_RES (1)..(1): Any amino acid
XTSSQNRPRADPGIQRQDPSGAAFQKPVGADVSLGLVPKEELSTQSLEPVSLGDPNCKIDLSFLIDGSTSIGKRRFRIQKQLLADVAQALDIGPAGPLMGVVQYGPLHWYWKNSPGNGEEWVGRETAPISQLST

SEQ ID NO: 71193 - protein, 40 aa, Homo sapiens
MGCTLSAEDKAAVERSKMIDRNLREDGEKAAREVKLLLCW

SEQ ID NO: 71194 - protein, 792 aa, Homo sapiens
MAGWIQAQQLQGDALRQMQVLYGQHFPIEVRHYLAQWIESQPWDAIDLDNPQDRAQATQLLEGLVQELQKKAEHQVGEDGFLLKIKLGHYATQLQKTYDRCPLELVRCIRHILYNEQRLVREANNCSSPAGILVDAMSQKHLQINQTFEELRLVTQDTENELKKLQQTQEYFIIQYQESLRIQAQFAQLAQLSPQERLSRETALQQKQVSLEAWLQREAQTLQQYRVELAEKHQKTLQLLRKQQTIILDDELIQWKRRQQLAGNGGPPEGSLDVLQSWCEKLAEIIWQNRQQIRRAEHLCQQLPIPGPVEEMLAEVNATITDIISALVTSTFIIEKQPPQVLKTQTKFAATVRLLVGGKLNVHMNPPQVKATIISEQQAKSLLKNENTRNECSGEILNNCCVMEYHQATGTLSAHFRNMSLKRIKRADRRGAESVTEEKFTVLFESQFSVGSNELVFQTLSLPVVVIVHGSQDHNATATVLWDNAFAEPGRVPFAVPDKVLWPQLCEALNMKFKAEVQSNRGLTKENLVFLAQKLFNNSSSHLEDYSGLSVSWSQFNRENLPGWNYTFWQWFDGVMEVLKKHHKPHWNDGAILGFVNKQQAHDLLINKPDGTFLLRFSDSEIGGITIAWKFDSPERNLWNLKPFTTRDFSIRSLADRLGDLSYLIYVFPDRPKDEVFSKYYTPVLAKAVDGYVKPQIKQVVPEFVNASADAGGSSATYMDQAPSPAVCPQAPYNMYPQNPDHVLDQDGEFDLDETMDVARHVEELLRRPMDSLDSRLSPPAGLFTSARGSLS

SEQ ID NO: 71195 - protein, 10 aa, Homo sapiens
MEENMEEGQT

SEQ ID NO: 71196 - protein, 165 aa, Homo sapiens
  MOD_RES (1)..(1): Any amino acid
XRKEFSPFGTITSAKVMMEGGRSKGFGFVCFSSPEEATKAVTEMNGRIVATKPLYVALAQRKEERQAHLTNQYMQRMASVRAVPNPVINPYQPAPPSGYFMAAIPQTQNRAAYYPPSQIAQLRPSPRWTAQGARPHPCCSCTRSGTFDCFHVGICPSSRAKANVG

SEQ ID NO: 71197 - protein, 47 aa, Homo sapiens
QRVVFDSAQRSRQDLFAVDTQVGAGSCSQLTRTSWWHSFPHPAYLQP

SEQ ID NO: 71198 - protein, 134 aa, Homo sapiens
MFRRPVLQVLRQFVRHESETTTSLVLERSLNRVHLLGRVGQDPVLRQVEGKNPVTIFSLATNEMWRSGDSEVYQLGDVSQKTTWHRISVFRPGLRDVAYQYVKKGSRIYLEGKIDYGEYMDKNNVRRQATTIIA

SEQ ID NO: 71199 - protein, 174 aa, Homo sapiens
MRPAALRGALLGCLCLALLCLGGADKRLRKHEWEKHGTCAAQVDALNSQKKYFGRSLELYRELDLNSVLLKLGIKPSINYYQVADFKDALARVYGVIPKIQCLPPSQDEEVQTIGQIELCLTKQDQQLQNCTEPGEQPSPKQEVWLANGAAESRGLRVCEDGPVFYPPPKKTKH

SEQ ID NO: 71200 - protein, 186 aa, Homo sapiens
MGGHPQLRLVKALLLLGLNPVSASLQDQHCESLSLASNISEKKQGALPCRSHHQLPGPLYLPGGPPGGLCPLSAAQEHPVPAKHHPLEPHLRLHPAQRHLVRGPANHEPRGPPEQRGLVQVGDSRLQLLPCDQLLLDVRRGLLPAHSHRAHLLHRPAAQMDVHLHWLGCALPHHCGLGHWEAVLRQ

SEQ ID NO: 71201 - protein, 141 aa, Homo sapiens
MVVQAAVAPNRSQRLLLKIPYGSLRRRSVERMTEGRRCQVHLLDDRKLELLVQPKLLAKELLDLVASHFNLKEKEYFGIAFTDETGHLNWLQLDRRVLEHDFPKKSGPVVLYFCVRFYIESISYLKDNATIELFFLNAKSC

SEQ ID NO: 71202 - protein, 658 aa, Homo sapiens
MSQKHLQINQTFEELRLVTQDTENELKKLQQTQEYFIIQYQESLRIQAQFAQLAQLSPQERLSRETALQQKQVSLEAWLQREAQTLQQYRVELAEKHQKTLQLLRKQQTIILDDELIQWKRRQQLAGNGGPPEGSLDVLQSWCEKLAEIIWQNRQQIRRAEHLCQQLPIPGPVEEMLAEVNATITDIISALVTSTFIIEKQPPQVLKTQTKFAATVRLLVGGKLNVHMNPPQVKATIISEQQAKSLLKNENTRNECSGEILNNCCVMEYHQATGTLSAHFRNMSLKRIKRADRRGAESVTEEKFTVLFESQFSVGSNELVFQVKTLSLPVVVIVHGSQDHNATATVLWDNAFAEPGRVPFAVPDKVLWPQLCEALNMKFKAEVQSNRGLTKENLVFLAQKLFNNSSSHLEDYSGLSVSWSQFNRENLPGWNYTFWQWFDGVMEVLKKHHKPHWNDGAILGFVNKQQAHDLLINKPDGTFLLRFSDSEIGGITIAWKFDSPERNLWNLKPFTTRDFSIRSLADRLGDLSYLIYVFPDRPKDEVFSKYYTPVLAKAVDGYVKPQIKQVVPEFVNASADAGGSSATYMDQAPSPAVCPQAPYNMYPQNPDHVLDQDGEFDLDETMDVARHVEELLRRPMDSLDSRLSPPAGLFTSARGSLS

SEQ ID NO: 71203 - protein, 92 aa, Homo sapiens
MAIPGRQYGLILPKKTQQLHPVLQKPSVFGNDSDDDDEDLALSPRMECNLCSHNSWQPQPPRPKHASHLSLPSSWDHRHTPPCLANFLIYFL
